United States Patent Application Publication US 2007/0067865 A1 - sequence listing, part 21

SEQ ID NO: 129964 - DNA, 652 bp, Arabidopsis thaliana
  unsure (1)..(652): unsure at all n locations
cccccccctttgatttgacattccnatgtacccgtccggaattcccggttcgacccacccgcccgtgctcaccgcttctccacgccgccgcatccaactggacgcaacacagaactactaagttcgctttgataatcagaggcgaatgttcttttgaggataagctgctcaatgcccagaactcaggttttcaagctgtgattgtctatgacaacattgacaacgaagatctcatcgtcatgaaggtgaaccctcaggacattacagttgatgcagtcttcgtttcaaatgtcgccggtgagattttgagaaagtacgcgagaggccgagatggtgaatgctgccttaatccgccagacagagggagcgcttgggctgtgttggccatctccttcttctctctccttcttatagtcactttcctgttgattgccttctttgcacccagacactggacccaatggcgagggaggcacaccaggaccatcaggttagatgcaaagctcgtccacacactcccctgcttcaccttcactgattctgctcaccacaaggccggggaaacatgtgctatatgtctcgaggattacagatttggagaaagcctcagacttctcccctgcccacatgcttttcacttgaattgcatcga

SEQ ID NO: 129965 - DNA, 1054 bp, Arabidopsis thaliana
  unsure (1)..(1054): unsure at all n locations
ttaggtgccactatagaagagctatgacgtcgcacgcacgcgtacgtaagctcggaattcggctcgagttctgaggagtgagtaatctccggcaccgaggaacaaagatggcttctttcacaaccaacagtctcgctcttcgcgcttcaattctcgcaaaccctagactacctcctccgatcatccgtccccgtctctctcttccccgtaaactctctttcaatctctccctccataacgctagaaccatcgtttcctccgccgttacctcctcgtctccggtactctcctctaaacccccttctcaattccccttctccgactcaactagatcgatcaccaccctcgtgcttctagccggcgtcgtaatcaaatctctaattcagaagctctctgtcgcaattgtgaacctatctccacagattcaagcatctttccgaacagcaagtccgttgttcttcgcgtcgctccgtgatcgacccgccggttatctgaacactccgttgacggtagttgcagccgggctatcgaaatggctcgatatatacagtggtgttctgatggtcagagttttgctcagttggttcccaaacattccatgggatcgtcagcctttgtcagccattagagatctgtgtgatccttatcttaatctcttcaggaacattatccctccagtctttgatacgcttgacgttagccctttgcttgctttcgccgttttgggaactctaggttcgattctcaacaacagcagaggatagtcaatagccactacttactctgctttgagtgatgatgcaaaggttatggatcgtattccgtttatctttggcgtttatattgtctatagttatagcatttggaagtatttataaggtaatgatgtattagactctaaagtttcagtctttacttctgttatgtgttatttatgtaaatgcacgaatatggtttcaataatagaactggagtttcgaggnnnnnnnnnnnnnnnnnnnnnnnnnnnnnnnnnnnnnnnnnnnnnnnnnnnnnnnnnnnnnnnnnnnnnnnn

SEQ ID NO: 129966 - DNA, 608 bp, Arabidopsis thaliana
  unsure (1)..(608): unsure at all n locations
gtaatctccggcaccgaggaacaaagatggcttctttcacaaccaacagtctcgctcttcgcgcttcaattctcgcaaaccctagactacctcctccgatcatccgtccccgtntctntcttccccgtaaactctctttcaatctctccctccataacgctagaaccatcgtttcctccgccgttacctcctcgtctccggtactctcctctaaacccccttctcaattccccttctccgactcaactagatcgatcaccaccctcgtgcttctagccggcgtcgtaatcaaatctctaaattcaggaggctctctgtcggaaattgtgaaccctattttccacaggatttcaaggcatcattttccggaacagcaaagtccggtggttcttcggggctggttccggtgattgggcccggccgggtaatttggaacaanttccgtgacggtagtttacacgggtnttgnaaggtngtanataaaggggggtttatggcaagttttgcaagtggtncaaaaaatcanggggggnaacttttaaacataagggtttgggcccaattnatttnnggaaatncccagtttnaggtaggagcttnttttngtt

SEQ ID NO: 129967 - DNA, 721 bp, Arabidopsis thaliana
aatttagaactttgaaggaagaaaaaggtattccgacgggcgaaatctgttggcgaaatcgaaaatgggttcgatgaaattgggggtttagggttcatcaaaatttgtcgaaacaacaacagagaaagagagaaatggggagtttagtgaaagcatattactgtaaccagatgcatcacaacagcatcatcccccactttcaccattacagaccttcaagccttcaaaaccctatctccctcttcgccatcacttctccctcctcctctgaacctccttctcctcctgttaaacatccccttcctcaattcggcggcggcggccacttcatcatccccaccatcgccgtcgctgcttccgcctggttcttcttccgtctacaccaataccctcctatcatcacctcccccgttgatctccacctcgattttggagaagaaggcgcttttaaagggcttcctttggagagcaagcctggttacgttaaagctcttcacttctacaaaatcaagccaggtaccgtcttgaaactcttggacgttttcgactccgacagctacgactccttgaaagcccggattcgtttatccgccgagtggttagaaactgccaggagagaattggaggaggtggttgagagagaccctggtcgggtcatggagtattctcaggtggttgatgagctcatggagattctcaaggacatggaggtttacattga

SEQ ID NO: 129968 - DNA, 513 bp, Arabidopsis thaliana
tgctcttcctatatctgaagttaagaatgggcatactccaagcatctgaaaagaaaaaagatgtcttggtggtatgcggagaaacaggctctggaaagactacacaggttcctcaatttatattggatgatatgattgattcggggcatggtggatactgtaatatcatatgcacacaaacctcgtcggatagcggctatctctgttgctcaaagagttgctgatgagcgttgtgaatcctctccaggcttagatgactcattggttgggtatcaagttcgtcttgaaagtgcaaggtctgctccttaattttgagatttttttttgtattgttttacgagcttattagattttactgtattcggcttctatgcatttccattgctactgtcctcaaggacccaagttaaatgatcatggaattctatcaaacccaaccccaaagggcgaccgctttagaggatccaagcttacgtacgcgtgcgtgcgacgtcaaaatcttgtaagtgtcac

SEQ ID NO: 129969 - DNA, 641 bp, Arabidopsis thaliana
aggctcaaaatgataatcacaatgccaatcttctcattttgcaaataaagaaaagaaaataataaaaattgattactagttttgagtattgacaaccttaataagcaagcaacaacaggcttgaatgcaatgacgtggtcatgattaaggaaaacagcggttggtccaaatcggaacacttgtcctcgtaacaacttcaaaacctggtttgacttatattacagtcctcactcatcacggaaccacgccgaaaattcatggcgaagactagcattttggcagctctaccctttaccaacttcgaattcccgtcgctgttccgggtcaagaactcttcgattatcagtttcagcgaaacccattttctccgacaatcaatttcgaccgcaatcgtaagatctccgactaagaggggaattgggtccgtctaatgttcttccgtcacggacgaagctttttctgaagagctacaagttcgaaccttgacatggaagtggaaaggttattcgataagatatcaatgtgctggaaccagtgcccctgctttgtcttggtcatggttcgtgctacagtgccatggaggagacacactatcttggaacacatggtgactcatcactatcgtatgtctcgtaacgatc

SEQ ID NO: 129970 - DNA, 578 bp, Arabidopsis thaliana
cggtattgaagggccggcccacgcgtccgcgatcagatttttttttgctttcaccgttcataacttctcagaaaggaagagcttgtgcgtgtacggttctcttctccgtagattgacttgctctaatgatggaggtcatattatggaacgacaaacgcgagagagagatgtatgagaattttgcagagctttttgcaatcatcaaagccacagagaagctagagaaagcttatataaagagacctaatcaatccttcagagtacgaatctgaatgccagaaactcattgtccacttcaaaactttatccgctacactcaaagacacggtgccaaacattgaaagatttgcagacacatacaaaatggactgtccagctgctctataccgcctggtgacatcaggtcttcctgccacagtggaacaccgagctaccgttgcggcatctacgtcgaactctgcatccattgttgctgaatgtgtacagaatttcatcacttcaatggattctttgaaactaaacatggtggctggcgatcaagttatcctctcttgactgatctatctgcttctctcaac

SEQ ID NO: 129971 - DNA, 486 bp, Arabidopsis thaliana
gcttcctcttcctctgagaaatcaaatcactcacactcccaaaaaaaaatctaaactttctcagagtttaatgaagaagcgcttaaccacttccacttgttcttcttctccatcttcctctgtttcttcttctactactacttcctctcctattcagtcggaggctccaaggcctaaacgagccaaaagggctaagaaatcttctccttctggtgataaatctcataacccgacaagccctgcttctacccgacgcagctctatctacagaggagtcactagacatagatggactgggagattcgaggctcatctttgggacaaaagctcttggaattcgattcagaacaagaaaggcaaacaagtttatctgggagcatatgacagtgaagaagcagcagcacatacgtacgatctggctgctctcaagtactggggacccgacaccatcttgaatttccggcagagattacacaaaggaattgg

SEQ ID NO: 129972 - DNA, 773 bp, Arabidopsis thaliana
atcacgtttctctcactctctctccttcgcttgtgtgtttaagctaagccgttagtcgttaatcatctcgtatcctaaaacgccgtcgttttagctatggcgttgagctcagctacgcttagacttacctctctgtcgttctcggcgaagaagacgaatcgaaaccctagaaatccagctctctccttcaccatcactagctcatcgtcctttgacgaatcacccaaaccttcttctctcgccacttcctcttctacgtcacctattcgcgtctcctctagttctacccccaaagctcgattcatcgctcgtcagaaacaatccgtctccgttcgtcagctacagcgacctctaattgagtatatgagcttacctgcgagtcagtactcggtgcttgatgcggagaggattgagagagttgatgataacacgtttagatgttatgtttatacgtttaaattcttcaactttgaagtctgccctgttttgcttgtcagggttgaagaacagcctaatggctgctgcatcaagctcttgtcctgcaagcttgagggatctcctgttgtggttgctcaaaatgacaaatttgatgcttctatggtgaaccgggtatcatgtgatagcactcaggagggctcatcagagcaacaaattacttcagatgcagtcattgaggtcaatatcgagattccttttgcatttagagtcttcccagtgggagcaatagaggcgactgggacacaagttcttgatcaaattcttaaactcatgct

SEQ ID NO: 129973 - DNA, 896 bp, Arabidopsis thaliana
  unsure (1)..(896): unsure at all n locations
gtctctctctctctgataaaatcttaaacccacctcgagatcatagtcttcatcaattagccataaaaaagcacaatgctttcttcaatcaaaccatcttcgtcttccttctccaccgctatctccggcagcgtaaggcggtcaattcctacgacgctcaatttttctcctttacccatcatcaaaaactgccataaccaaagctttcactctaatgttgtctcccatcaaaagcctctacacatttcatctgcttcgaatttcaaacgtgaggtcaaagtcgaagcttacgaggcagatcgatcccgtccactggacatcaacatcgagcttcccgatgaacaatccgcgcagaaactgaaaatcggaatctacttcgcaacttggtgggcacttaacgttgtcttcaacatctacaacaagaaagtcctcaatgcttttccttacccgtggcttacttcgacgttgtctctcgcttgtggttctttgatgatgcttgtctcttgggctactagaatcgcagatgctcctaaaactgatctcgagttctggaaaactctgttcccggtcgctgtagcacacacgataggacacgttgcagcaacagtgagtatgtcaaaagtagcagtttccttcacacacatcattaaaagtggtgaaccagctttcagtgtcttagtctcaagattcttcatgggagagactttccctcttcctgtctatctctctctcttaccaatcatcggaggctgcgctctcgcggccatcaccgagcttaacttcaacatcactgggtttatgggggcaatgatatcgaatttggncattgtgttccggaatatcttttcgaagaaagggatgaaaaggaagtcagtgagcggaatgaactactacgc

SEQ ID NO: 129974 - DNA, 588 bp, Arabidopsis thaliana
aaggaaaactcgtaatgggataccgtaaagcgacgaactctacagcgacacagatgttcaagggaagcagtgaacccaatctgaacatgttttccaacagcttgaatccgggatgtggtgacatcaattggtctaaactagagaagtctgaggacatggcaaaggataacttatttcttcagtcgtccttaacttcagctaggaaacgggttcggaacattgggactaagagcaagcgtctgctcattgatagcgtagatgttctggaactgaaaataacttgggaggaggcacaggagctgttgcggcctccccaatccaccaaacccagcatctttacgctggaaaatcaagattttgaagaatatgacgaaccaccagttttcgggaagaggaccctttttgtctcacgtcaaacaggggaacaagagcaatgggtgcagtgtgatgcttgtgggaaatggcgacagctgccggtggatatttttcttccaccaaagtggtcgtgctctgataatctcttggatcctggcaggtctttcatgttcccgcacctgatgaactctctccaagagaacagtgatacac

SEQ ID NO: 129975 - DNA, 532 bp, Arabidopsis thaliana
  unsure (1)..(532): unsure at all n locations
ctaacccaaatnccanggggttgntcctaaatccaaaattcacacctttggttctcaaatccaaaaaccccacactcaaaggcttcttaatatgaataacttgatgcctcccttgagccaaccccccaatccgacaaccagcttgaacaatgaaactccttatgaaactgctgcataccatctaagtagccaaaccttaccttaaattagtttctccaatgcaggacaaggtatcttctggaatcaaactcgaagagagaaagaagaagaaataaatccaaatcaaatcaaggatctgtggtggaaacggaatcctagtattttttctgacaaaaagaatcgaatcggatcggaaaacacacggtggttgatctgaccacggatccgaatctgagagagagtgaagaaaaattggctgaacgaatcagctttttggagcttccatggaatctgagagagaatccaagagagatggagggagagagagagagagtggtggtgagtagtgaaagagagagaggacaccgaacag

SEQ ID NO: 129976 - DNA, 513 bp, Arabidopsis thaliana
cacatcatcacacatgtttagtttaggtaatacatacaaggtatatcgagtcttaacaaaatttaacaaaattttcgtacatgttcgagcctatgtgatttatttaataggcattaaatagaaataaagcttttaataatttcaatcacgtgtgaagcggcgattgaattgcgaacggtgatgagatgcatttctattttctgatctattttttctatgaacaagtcaaaagtctttctaatagaaaaagggaaaaagaaaaataattttaagtaatttagtccaaaaaaaagaaaaatctataatgagaattatgctaaaaatagttttttcttatctaaagctcctatatttgactatcaaccaaggattcaaagttttactaattaggacaaagtctttgaaaacatttcgtagattagagtgcttttttaagaaaaaatattcttcggtgagatttttcagtagaatagactggtcaatattaatttatataatcccaatatatataac

SEQ ID NO: 129977 - DNA, 614 bp, Arabidopsis thaliana
  unsure (1)..(614): unsure at all n locations
atcagtgtggctgttgcatccgctacacagattaacgagaaagaccactggtatagacttggagtggaggctcttcgccaaggtaattctggaattgttgagtttgcataccagcagacaaagaactttgagaggttatcttttctttatctcattactggaaatttggacaagctttcaaagttgatgaagattgcagaagtgaagaacaacgtaatgggtcagtttcacaatgctctctacctaggagatgttaaagagcgtgttaagatactggagaatgctggtcatttgcctctagcttatatcacagcttcggttcatggtttaactgacattgctgagcgactggcaactgagctaggagacaacgtgccctcattgcctgaagggaagactccatcgcttctaatgccaccgtctcccatcatgtggtggtggtgattggcctcttctgagacgtgatgaaaggaatattttgaaggaggacttgaagagtgcaaacagaagngggcttgttnnntgaaagaagaaggangnatntttgaaagnccgacttggggttnagggggcctttgccaaatttcctntttttcaattgaattgttggncca

SEQ ID NO: 129978 - DNA, 850 bp, Arabidopsis thaliana
  unsure (1)..(850): unsure at all n locations
gatttccgaagatcatcaaatccaaaaccctagaaaccgaacaaaagctagcagaagctaggactattcaatggcgtcgaaaagaattaacaaagagcttagggacttgcaaagagatcctcctgtgtcctgcagtgcaggtcctacgggagatgatatgttccaatggcaagcaactatcatgggtccagcagatagcccgtttgccggaggtgtgtttcttgttaccattcacttcccaccagattaccctttcaagccaccaaaggttgccttccggaccaaggtttatcacccaaacatcaacagtaatggaagtatctgttttgacattctgaaagagcagtggagccctgcacttaccgtatccaaggttcttctgtcgatatgctcattgctgacggatccaaaaccctgacggtcctttggttcctgaaatagcgcacattttcaagacagcccgagtcaagtacgagtccacagctcaatcctgggctcagaagtttgcaatgggatgataacaagcaataatacccaccaccagtacattgcgtatttaccaggagaaataagaaagaaagaaaaaaactcagtttggcttttactttggctacttttgcttattagttttttttttttttaattatatccttgaagcttgtgtgcttgggtgtgtacatgagctttatgccttattttgaaacattgggatcttgcaaatgcttttaagccaataatccgctnnnnnnnnnnnnnnnnnnnnnnnnnnnnnnnnnnnnnnnnnnnnnnnnnnnnnnnnnnnnnnnnnnnnnnnnnnnnnnnnnnnnnnnnnnnnnnnnnnnnnnnnnnn

SEQ ID NO: 129979 - DNA, 466 bp, Arabidopsis thaliana
gacgacgaaagattatatactggacgaagcattgagcttcacatcgagccacttggagtcactagctgcaaatggggcgtgcccgcctcatatgtcaaggcgtatacgaaatgctctcaatgcatctcagcattggaacatggagatgctagtcgctgtggaatatatatcattctacgaaaaagaaaaagaccacaacgagatgctactcaagttttctaagctcaatttcaagtttctacaactccaataccttcaagaactcaaagttcttacaaagtggtacaaggaggtagattttgtatctaagttgccaccttacttcagagacagaatcgtcgaaaaccatttctttatacaaacgttgtttgtggagtcacaacaactacgtgcaaggattatgatggctaagtacttcattcttttagtaattcaagatgacaccttggacagatatgcgtccctt

SEQ ID NO: 129980 - DNA, 1023 bp, Arabidopsis thaliana
aaatgcgccctcaaggcgttttcccgcccacaaagtggcccccctgggaagtaccgatggagcccgaatccagatcgccgcgaccagccactttttcccatttgtaacaacgaacgacaaacaaccagagactgctaaacaggggaaaaagccaacgctcaagcatcccacagatgcacgacccgatggcggacaccccaaacgcttacagttccaccactggtgctccaccagcaaagcccacctccacgttatctgatcccaacagcaacaacactcagaatgcaaatggtcctggcttcaagccaccacaacaacaacaacaacaatcgtttcaggagaagaacacgcaggctcagcatgttggtgggcccagtcaccaccaccaacaccagcaccatcaaaaccggagatcgggctaccatggcagaaaccaacccatggccagagagagaggcctttccgaaaaaccccaaagggccaaagcaaaatcaaagtgggctaaagccagaactgggaaacaagctggtggccacttggggttaacctcttaactaaccaaccaacccaactttcccccccttcaaaattgggaagggaatatcctttcaacccaaaaaccacaggggccccgggttccaaggcaaaatataaaaactctccatttcctccaaagaaaaaccgcccaaaaccccagagctttttgggggcctttccctttaaaggaaaaggagaattgggggacccctttattattttccgcactttccaaaatgtgttccccccataaataattcaaggttgagggcccttcacctttttcacatcaccttgcccactgctaaaccccccgcggttgggaaaaaactcaggaaatttggggggcccccctttaacccccgcagttggggggggatatcaaataaaaatgggggggaccctctggggaaagcggccaaaaatatcccacaaagggggggggaaaaaaaaaatgggccgggaggggttttcgggggggaaaaa

SEQ ID NO: 129981 - DNA, 929 bp, Arabidopsis thaliana
gcagaaacagcaggaaggaacagatggctccaatcttccatcacctcagtttaacaacaacatgcttcctcctcctcctcctaacagatatgccaacgttcaagcatccacagttgtagacgcaatggtggactcctcaaacgcttacagttccaccactggtgctccaccagcaaagcccacctccacgttatttgatcccaacagcaacaacactgagaatccaaatggtcctggcttcaagccaccacaacaacaacaacaacaatcttctcaggagaagaacacgcagtctcagcatgttggtgggcccagccaccaccaccaacaccagcaccatcaaaaccggagatcgggctaccatggcagaaaccaacccatggccagagagagaggctttccgaataacccaaaggtcaagcaaatctatgtggctaagcagactggtaacagctgtgcctctgctttcctctactaccaccaccacttccccctcaatttaatgattcttcaccatccaggtccgttcagatataaactcatcccaataacccaaccagctttggcttcataagaagatttggactttttttcctttcaattttcccatatatcaattagcttcctttttttctactttttatcctcgttagataattagattttgttctctttactcgtttggggattcattatatggggactttggtaatgcttaatttcgtcatggttggtaaaaatattgtcgtgaggttttcggtgtagaatacccaattcacggccccaatgtatctgttgtcaacattatctttatagcttctacaaatcagtacacactcttattaaaagaaaaaaaaaaaagggcgaccgctctagaggatccaagcttacgtacgcgtgcagtcgacctcataactcttctatagtag

SEQ ID NO: 129982 - DNA, 460 bp, Arabidopsis thaliana
gttcttatcacattattcttaaaatgcattcgttatgttatgtgaatgcactagccaaaaataaataaatgcaactaccatcattggttaatattcatgaaactttttttttttttcatgaaacttatatatctattaaaagtttaaaaccttattatacgaaatgtttgagaatctattatctgtcaccacccgtttgtgaccagagagtagatttctaaagtgttttggataagtttagtgttttagagtattaaaaaatttagaagcacttttcattagactctatatatgacatatctataataatattcctgaatttgaatttagcatctacttatatcgcataactcatttatggtactgaaatttagtggaaaacagctagtaaaagagaagtattggtgtgataaattaagctcagaggcttatgttaagttaggattccttaactgatttt

SEQ ID NO: 129983 - DNA, 470 bp, Arabidopsis thaliana
ccaaattcgagaatacaaagctccagggatcagagctcatatatggcctcttacaagaatctccagtcgtattcatactctccaattgttggcccagctttgaaagcaaggctgcatttgctgtggctgagaagcttgtgcgagagatagaagtgtctcattgggggaatgtgcaggtcacggagaattacaatgttgtccaccgtggggctcaactcaagggcgagttttcaaggttagattttcaagccagacctaatccccgtggagcatctgcctttaggcatttacttgctagattaccccccagagcccattccatatattacagggatgatattggaaatatctccacgtctgagatgaaaagtgattcgaaaaagacagagctactaattgagcctaggtttcctttgtttggtgggtggaaaacttttttcacgataggttatggtttgccacttaccgac

SEQ ID NO: 129984 - DNA, 464 bp, Arabidopsis thaliana
acttatttaataaggtcgattggtttatgcgaattgattttctgttacgataaattgacgagactatagctaatccaatagctgcttcagcggctgcaattgctataacaaaaatgcagaaaatttccccttttagttgggaattatcaaaaaaatcagaaaatgttacgaaattcatattaactgcattgagtataagttcaagacacataagagccctaaccatatttcgacttgtgatcaatccataaagaccaatcaaaaataaataggcactcaaaacaagtacatgttcgagtatcattcagcaactccttatcaattttgattcatttcaatatgaaaaataattcaccggattccatcaactagaatataacaaaaaagtacgaataaaaaaaatatttaggtaaaaaaaattttcaaatatatatcaaatacaaatatatatcaaatataaaaat

SEQ ID NO: 129985 - DNA, 466 bp, Arabidopsis thaliana
atcaatttgtgtttttctcatactttcattgaaatagccgctaaaacagtaaacacagacctccaaatcctgaagccaaacttttactttctcccgctgccgtctccttgcattgtcacctctatctactacttcttcggaaattagcttgttacattccataacaagttcaccattgcaattttcacaatgaaaagaatcgtcttccatagaaattaatctcagggcatccagtgcattatatctataccagaaatgagaatctatacaggtttagtgaaaataatacaactcaccatgtaaagatttaaaaacataaagaatagtggactttactttcttttgcagttaggacagccatactcctgaacaagtaattctgtcttctagttcatctttgaactttttcttgagcccgggcagtttataacgaacaatatcatatatctgtaagagaggagaagtg

SEQ ID NO: 129986 - DNA, 541 bp, Arabidopsis thaliana
  unsure (1)..(541): unsure at all n locations
gccgagtatttcaattatcatccaccagaaactcttctcctccttcctcccggatcacccaccccatgtgtaccggttagagaaacgcggcgatctcttcctcctaaccctaaccggagacggcgaacacagattccaccccgacacaattgccaccattctctcccttctcgaacaagccaaatctcaatccacccgtggatccatcctcatcaccaccgccaagcggcaaattcttctccaacggattcgatcttgcatgggctcaaaccgccggatccaaaaccggagccgcaaaccggcttcaccaaatggttgaatcattcaaaccggtggtagcagcgcttctcgatctccctatgccgacgatcgccgccttgaacggccacgccgccgccgcgggggttgattttggctttgagccatgattacgtgttcactgcaggaaagatcgtggggttctgtatatgagtgaagttggcatcgggctttgatgccggttatttttcggggttggtagggntaaaatcgggcgngttcg

SEQ ID NO: 129987 - DNA, 741 bp, Arabidopsis thaliana
ttgtaattcgtggtttaattagacaacacctggcttcgaacataggagttgctaagaggggggttcgtgaaaaaaagccgggggtctgggaaatccttcaagaagtcatgcaggggcatcccgtattactgaatagagcacctaccctacatagattaggcatacagtcattccaacctattttagtggaaggacgcactatttgtttacatccattagtttgtaaggggttcaatgcagactttgatggggatcaaatggctgttcatgtgcctttatctttagaggctcaagcagaggctcggttacttatgttttctcatatgaatctcttatctccagctattggagatcccatttcggtaccgactcaagatatgcttattggactctatgtattaacgagcggcactcgtcgaggtatttgtgcaaacagatataatccatgtaatcgaaaaaactatcaaaatgaaagaatttacgaaacaaactataagtatacgaaagaaccctttttttgcaattcctatgatgcaattggagcttatcgacagaaaaaaatcaatttagatagtcctttgtggcttcggtggcaattagatcaacgcgttattgcttcaagagaagttcctatcgaagttcactatgaatcttttggtaactatcatgagatttatgcacactatctaatagtaagaagtgtaaaaaaagaaaatttttgtatatatattcgaaccacag

SEQ ID NO: 129988 - DNA, 620 bp, Arabidopsis thaliana
  unsure (1)..(620): unsure at all n locations
agctctccnnnnnnnnnnnnnnnnnnnnnnnnnnnnnnnnnnnnnnnnnnnnnnnnnnnnnnnnnnnnnnnnccacgcgtccgcggacgcgtgggcggacgcgtggggcttacagagctttctcagaaacgtcaccgtttcttcaattcgtcaacttcacagcaaaccaaacgattctcgagtcattcgaagggtttgatcggatccacattgtcgatttcgatatcggttatggaggtcaatgggcgtctctgattcaagagctcgccggaaaaagaaacagatcttcatcagctccgtcgctaaagattacagctttcgcttctccttcaactgtctccgacgaattcgagctccgattcactgaagaaaatctcagaagcttcgccggcgaaacaggtgtctccttcgaaatcgagctcttaaacatggagattctcttgaatccaacttattggccactgtctttattccgatcatcggagaaagaagcaatcgctgtgaatctcccaatcagctccatggtctccggttacctcccattgatacttcgtttcctcaagcaaatctcaccaaacgtcgtcgtttgctcagacagaagctgcgaccgtaacaacgac

SEQ ID NO: 129989 - DNA, 973 bp, Arabidopsis thaliana
gttctaacaaatggagttcactaccttgtgttcataaaggaatccttcgatcgaaacttcaaatcaaaaaggatgaaggataaaaacctatattgtataaatttaggtaacacaaaacgatctcaaaaatgacgacctgaatctcgatttctatttttttataaacaaaatcaaaatgttgtgaatcaattcgaagtttaagaaataatatttcttgattaaaataaaattattcacttcatagtctgatagatccttgatggaacttaattaatcggacgagaataaagatagagtcccattttacatgtcaatactgacaacagtggaatttatagtaagatgaaaatccgttgacttttaaaatcgtgagggttcaagtccctctatccccagctctactccccgaaaaggttgacaccttacctttttttcgttattatttatttgaattatttataatctatatcatttttcattttcaaacttagaaagtcttcttttatttataaaatccaagaaattcccggtccacaactttttgaatttactacttttgagtttcttttcattgacatagacctaagtcatatattaaaatgatactgatacttcagtagattatacttcggtaatggtacacatagcttaattgcgggggactgaaaatccttgtgtcaccattagtaaaagcaagatgatccttcggtaatggtcgacataccttagttgcagaggactgaaaatccttatgtcaccattagtaaaagcaagatgatacttcagtagatgatacctcagtaatggtcggcatagcttaattgcgggggactgaaaatccctgtgtcacatgataatgatccttcagtaaaggtagacatagcttttttgcagaggactcgaaatcctcgtgtcaccattaggaaaacgagcatgatacttcagtagatgatacttgatacttcagtagact

SEQ ID NO: 129990 - DNA, 604 bp, Arabidopsis thaliana
  unsure (1)..(604): unsure at all n locations
aaaataaaaagagtatatctctcacacacatacacaaacttgacagttttttaatttctctgttagtgaactcaaaccttcccatttccatggacaccaaaatcggatcgatcgatgattgcaagccgacgaacggcgacgtctgtagtccaacaaacggcaccgtcgcaacaatccacaactctgttccttcctccgctatcaccatcaactactgcgacgcgactctcggccgtcacttagctcgtcgtctcgtccaagccggcgttacggatgttttctctgttcccggagatttcaacctcactttgcttgatcacctcatggctgagccggaccctcaacctaatcggatgttgtaacgagctaaacgccggttacgctgccgacggttacgctagatctcgtggcagtcggcgcttgcgttgttaccttcaccgttgggggacttagcggtttaaaacgggntcgttgggggttanagngggaattttccncttatctgaatcgtcgggggcctanctttacggttatggnnctaanccgggtttttatnaaaccattnggtnccngattngcaagggtngggnttccaacgggggnc

SEQ ID NO: 129991 - DNA, 582 bp, Arabidopsis thaliana
tgatcaacgcttttaagactatccgatcactgccctcgaataccaccgtctcgttctgctcaacaccatctcgattaggccggaaagtcactggagttagttttgccaccacttctgatcagcaaaagatggataaaaagcctgaaaatccaaacgagaaaaccggtgacgtgatgtcgcattcttatggagaagggtacgcaacaaggtctgacgaagaagggtttggaggaatctatggaggaaatcaaacacttcagaaggaaaacgagatccatgagaatcaccctgattacgacaaaacgcaaggtagcgaatcgaaggagaaggagaaagcaaggaaccagacacaatcccactgctaaagaaaaaatgatgatttagtgtctttgttctttatgctttaataaaatcagacttgtgctctgtagttcgtagactctggttagagttttttttttgttaattgcgttttttgacccgtaacctttaccgggtttttgttggttatccttatcacttttgtaacactcgttgaattagtagtttttgttgattgttgaacattcccttaatttgact

SEQ ID NO: 129992 - DNA, 472 bp, Arabidopsis thaliana
accgcaaaagtgttcgtgaactttttggttaaagctcgtagctcgtgtatttcgtaataacagttattgtaatctgcgaactagtttcgatatgaattttggctcttggaaagtctcctgagttgggcttgtactatgatccaatagtaaataatcacttaaaaagcaacataaacgataaaaatatgataagtatgagccggctctaaaagtcaccaattttccattctcatgatcaaacataattagcaagtattatatttgagatctcataatagatcgtacgttttcattacttgttgaaataccaagattttaaaacaaacttatttagcttctacaccatcaatttttctaagcttatctaatcgaaacaacttttaataaatgaaacaagctgtataagtttattgataattgttatctataacatggtgttaagtcattctggcgccgaatgataacgcgaact

SEQ ID NO: 129993 - DNA, 852 bp, Arabidopsis thaliana
aattcgaattagcaaaagcaatgtctccttgcataatatggattccaaacattcatgatcttgatgtgaatgagtcgagttacttagccctcggtctattggtgaactctctctccagggattgtgaaagatgttccactagaaatattcttgttattgcttcgactcatattccccaaaaagtggatcccgctctaatagccccgaataaattaaatacatgcattaaaatacgaaggcttcttattccacaacaacgaaagcactttttcactctttcctatactaggggatttcacttggaaaagaaaatgttccatactaatggattcgagtctataaccatgggttccagtgcacgagatcttgtagcacttaccaatgaggccctatcaattagtattacacagaagaaatcaattatagacactaatacaattagatctgctcttcatagacaaacttgggatttgcgatcccaggtaagatcggttcaggatcatgggatccttttctatcagataggaagggctgctgcacaaaatgtacttataagtaattgccccatagatcctatatctatctatatgaagaagaaatcatgtaacgaaggggattcttatttgtacaaatggtacttcgagcttggaacgagcatgaagaaattcacgatacttctttatcttttgagttgttctgccggatcggtcgctcaagacctttggtctctacccgtacccgatgaaaaaaataggatcacttcttatggattcgatgagaatgattcggatctagttcatggcctattagaagtgcaaggcgctatggtgggatcctcacggacagaaaaag

SEQ ID NO: 129994 - DNA, 488 bp, Arabidopsis thaliana
tttagctgtagatgcggttctctctgttatagatccggaaaagcctgagattgtggatttgcgtgatattaagattgttaagaagcttggtgggactgtggatgatacacatactgtgaaaggtttggtttttgataagaaggttagccgtgctgctggtggaccgactcgtgtggagaatgctaagattgctgtgattcagttccagatctcacctcctaagactgatatcgagcagagtattgttgtctctgattatactcagatggataggatcttgaaagaagagaggaattacatattggggatgattaagaagatcaaagcaactggttgcaatgtgttgttgattcagaagagtattttgagggatgcagtgactgatctatctcttcactatttggccaaagctaagattatggttattaaaggatgttgagagagatgagattgaatttgtcaccaagacattgaactgcttgcctatc

SEQ ID NO: 129995 - DNA, 563 bp, Arabidopsis thaliana
  unsure (1)..(563): unsure at all n locations
gaagcatgggaaatagtgttgctgggcttggagctttcggcttcctattgaatatggcaggaacaggtatggggggaaccggaatctcatcgtcaatgtctgtccctggcatcggtaatatgggccagaacccaatgaatctgaatccagcatcaaatttgattgctataagccagcaactccgatctggtgcattaacaccacaccaaaacgctctgtttacacagattaggatgggcatggcaaaccgaggaggtgtaatgggtgctcctcaaaccgggataagtggcgtgtcaggtactaggcagatgcaccccagctcagctggtctttccatgttggatcagaacagagctaacctgcagcggagctgctgcttatgggtaacatgggccccacccaaagcttgatgcctggacatgattgaatctttaccatgaatcaacaaccatccagcagcagcaaccttccacgcagcaacccccaggcaaccacccagttgcagcagttatagcaaccngnttccaggtaggcntatgtttnggccgttttttggagttggt

SEQ ID NO: 129996 - DNA, 517 bp, Arabidopsis thaliana
  unsure (1)..(517): unsure at all n locations
tgtaaatgagagaacgataaccattgatgctgttattcatatggtaaggtacactccttttaatgccatgaggtgtaagggatacccaaaataacttcggacccattccccctatacccccctgcaatcataggccccccccaataagaatggccaatggtccttttttcccatgaaccttaaaaaacaaactggtaccttgttgatttgaagagctttgcgtacattcacgtcattgacccagtacgtagttagcaaatatcgataaatctgcaaaagcaaccttgtatacatatatatatatattttctcaaatggtttaacggttaagagagggcaagatacttggattacttacatagcaatttggagtttcagttacgcacaatggttttattacaacttcttggnatactcctttggtacactaaaacacacaataaccacaaaagtnatgttgtttatttactaagggagacagacacacacacacacaacagctnaaatatgattcttc

SEQ ID NO: 129997 - DNA, 594 bp, Arabidopsis thaliana
aaagtgtattgggttcctcaagaaggcatcataagctgcagttgccaactgtttgagttctctgggtttctctgcaggcacgcattccgtgttctctccacaggaaactgttttcaggtccctgataggtatcttccacttaggtggcgcaggatcagcacgtcgtttagcaagacgttcagaagtaacgctgaggatcatggagagagagttcagcttctgcagaatctggtttcgactctggtctcagaatcggctaaatcgaaggagaggctagatattgcaactgagcaaacctccatcctcttatcccgtatcagagagcagcctgtctcctcacttgctatcagagacatttcttcttctgtgcagaggaatttttgataccacaaatgctatgcgtgtctaactatttttagataacataattactttattaacctaatcttacaagattgtaactcttatcttaacttatgcattgttaaaaatatcaatcttatattcgttgacaaaaaaaaaaaaaaaagggcgaccgctctagaggatccaagcttacgtacgcgtgcaggcgacgtcataactcttctatag

SEQ ID NO: 129998 - DNA, 1725 bp, Arabidopsis thaliana
  unsure (1)..(1725): unsure at all n locations
ctttgcttttatagttctctttattctctcaaaaagcctctctttctctctcttttgtttctcgctaccatggctaagtcttgctatttcagaccagctcttcttcttctgttagttcttttggttcatgccgagtcacgcggtcggttcgagccaaagattcttatgccgacagaggaagctaacccggctgaccaagacgaagatggtgtcggtacaagatgggcggttctcgtcgctggttcttctggatatggaaactacagacaccaggctgacgtgtgtcacgcatatcaaatactaagaaaaggaggtttaaaggaagagaacatagtcgttttgatgtatgatgatatcgcaaaccacccacttaatcctcgtccgggtactctcatcaaccatcctgacggtgacgatgtttacgccggagtccctaaggactatactggtagtagtgttacggctgcaaacttctacgctgtactcctaggcgaccagaaagctgttaaaggtggaagcggtaaggtcatcgctagcaagcccaacgatcacattttcgtatattatgcggatcatggtggtcccggagttcttgggatgccaaatacgcctcacatatatgcagctgattttattgaaacgcttaagaagaagcatgcttccggaacatacaaagagatggttatatacgtagaagcgtgtgaaagtgggagtattttcgaagggataatgccaaaggacttgaacatttacgtaacaacggcttcaaatgcacaagagagtagttatggaacatattgtcctggcatgaatccgtcacccccatctgaatatatcacttgcttaggggatttatatagtgttgcttggatggaagatagtgagactcacaatttaaagaaagagaccataaagcaacaataccacacggtgaagatgaggacatcaaactacaatacctactcaggtggctctcatgtgatggaatacggtaacaatagtattaagtcggagaagctttatctttaccaagggtttgatccagccaccgttaatctcccactaaacgaattaccggtcaagtcaaaaataggagtcgttaaccaacgcgatgcggaccttctcttcctttggcatatgtatcggacatcggaagatgggtcaaggaaggaggatgacacattgaaggaattaactgagacaacaaggcataggaaacatttagatgcaagcgtcgaattgatagccacaattttgtttggtccgacgatgaatgttcttaacttggttagagaacccggtttgcctttggttgacgattgggaatgtcttaaatcgatggtacgtgtatttgaagagcattgtggatcactaacgcaatatgggatgaaacatatgcgagcgtttgcaaaccgttgtaacaacggtgtgtccaaagagctgatggaggaagcttctactgcggcatgcggtggttatagtgaggctcgctacacggtgcatccatcaatcttaggctatagcgcctgagagattttgaggcttttctgattttcaagtgtttcgaattataacgttaaagatgtcaaaataaaagaaatgtttagtatgtaaatacgtacgtagcaataaggtcgtctaacttttttttatcgattgtaatctttttaataaaactttgctaaatattgtngttaccatttacatctaaaanctttagtgatc

SEQ ID NO: 129999 - DNA, 670 bp, Arabidopsis thaliana
  unsure (1)..(670): unsure at all n locations
acaaggcatgcnttgaagcatatgaaggaaggaagcagcattatcaacaccacttcggtgaatgcctacaagggaaacgcttcacttctcgactacgccgctacaaaaggagcgattgtggcgtttactcgaggacttgcacttcagctagctgagaaaggaatccgtgtcaatggtgtggctcctggtccaatatggacaccccttatcccagcatcattcaatgaggagaagattaagaattttgggtctgaggttccgatgaaaagagcgggtcagccaattgaagtggcaccatcctatgttttcttggcgtgtaaccactgctcttcttacttcactggtcaagttcttcaccctaatggaggagctgtggtaaatgcgtaagcgtggagtggacaagaccggtcttaacgtcttagaccattaaatatgatatgatgatgttgtttgagtttaggggctttttgttatgttggtaatgtgttacgtccgtatatgttggtaatgtgttgcgtccgtaccttctgtagcaaaagtatgtgtttaataaagactttacctcgacaataagtcggggcctgttccccttaaacctaaaaaaagatgttagttacanaataaaagggnggnccgtttttgggggtcccangtttacggaangggnttt

SEQ ID NO: 130000 - DNA, 637 bp, Arabidopsis thaliana
gtaagaattgatatatagaataactttttacttgattgataatcacataaaaccgaagaaattttagccatttgcatcaaacttaaacttccttcttgcattcgtgctcctccggaagaacacactaaaataagaggtaaacattgattggtagcatactcgatcaaacgagttattttttcgcctactacggatcccatactaccccccataaaccgaaaatccataaccccaagggctaccggaataccgtttagttgacctgtacctgtttgaacagcgtcagtcaatcctgtagttttttgcgcagagtcaatacggtttttataaggttcctccttcgaatgaaatttaatgggatccgcagagaccatgtcttcatccataggattccaagtacccggatcaatcgaaagctcgattctttctgaactactcattttcaaataatgtccacattgttcacaaacattcattttgactttcttatacattaatccataacaattgtcgcattgaatccacaattgattgtagttttgagttatatcgaaatccttagaacttattaaattactacgattcctcttagttcttatcttgtaatttttactttcacgaatctttccgctttcac

SEQ ID NO: 130001 - DNA, 474 bp, Arabidopsis thaliana
  unsure (1)..(474): unsure at all n locations
aaactccgcctccgtttgtnggctatttacactcactctgtctccgccggtagatttntcagctgcgtcttcctcgttttctctctctctgtctgtgtctcttagaatgcaatcagctatggcgctttcgttctcccagacgtcgtttacaagaccaaaccacgtgctcggatcatctggttctgttttctctacgcccagaagtctccggttctgcggactccggcgggaagcgtttggtttctcaacgtcgaatcagttggctattcgcagtaaccgaatccaatttctaagtaggaagtcattccaagtctccgcttctgcttcaagtaatggtaatggcgctccaccgaaatctttcgattacgatttgatcatcatcggagctggagttggtggccacggagctgctttgcacgccgttgaaaagggacttaaaacagccattattgaaggagatgttgttggagggac

SEQ ID NO: 130002 - DNA, 690 bp, Arabidopsis thaliana
  unsure (1)..(690): unsure at all n locations
atgatcnnnnnnnnnnnnnnnnnnnnnnnnnnnnnnnnnnnnnnnnnnnnnnnnnnnnnnnnnnnnnnnnnnnnnnncttttttgttttttttttttgagtagaattgtgtctatatatatatatatataagttgcataacaatcaacagaagctgaagacacacatacacaagatttctgcctatagctctgcagtctacaatacaagaatcaaatcagaaactctttctaaggcaattcatgtcaactgaggctctctcattcgttctaaagaagtgatcaagattctctaacctaagaatctctccacgtggtttgattggttgtgtcatagtagaaatatcagcaacggaagcaatgagaagcagaagacaacaatgttgtttagttgggccacagaagctaaagatcttgagaactgaactgaacctgagtagcttccacctgagttgcttccagccgttgaatccatgcttggagttcttgtctgtacagtaacatttttgcatgaaccataagctgctcctggctgcaacatcaagaaccaaaatacgggtgccggttttagataatttaggcttgtaagatcttatttcatacccataagtaactttggcgcgagttaataagttaatacctggcaagcagaaagagtttcacaaccgcaaagtaccggtccattcattcta

SEQ ID NO: 130003 - DNA, 850 bp, Arabidopsis thaliana
ccaacacttggcagatccaaccgcgattactcaagctctttgctggaaatgcatacttggtggataacaagaagaggaaggagaagaaggagaagaaagagtatggtgaagaaagcaaagacattcaatgtttttgaatctgaaccggatttcgagagcccctacggtagtactataacgattaacaggaaggatctgaaagttttaaaaggctcaatggttggagtttccatggtgaatctcactcaaggatcgatgatgggaccgcactggaatccatgggcttgcgagatttcaattgtgttgaaaggagcaggaatggttagggtacttaggtcttcgatatcatcaaactcatcatccgactgtaagaacgtgaggtttaaagtagaggaaggagatattttcgcagttccacggttacatccaatggctcaaatgtctttcaacaatgactcgctagtattcgttgggtttactacttcagctaagaataacaagccgcagttcttagccggggaggactcggctttgcggatgcttgaccggcaagtattggctgcgtcgcttaatgtgagtagtgtgacgattgatggattgttgggagctcagaaggaagctgttatcttggaatgtcattcttgtgcggaaggagagatagagaagcttaaggtggagatagagaggaagaaaacagatgatgagaggaagaggagacatgatgaaaggaagaaagaagaagaagaggcgaaaagagaagaggaagagaggaggaaacgtgaagaagaagaagagaagaagcggtggccacctcaacaaccaccacaagaagaagaacttagggaacggc

SEQ ID NO: 130004 - DNA, 429 bp, Arabidopsis thaliana
  unsure (1)..(429): unsure at all n locations
aaacattggaaacaagaattctcttacacatgtatcggtagttggaaatgccgacccaaaaggtccaaaactcaccattatctcaagtgggagagcttctcaagaaactactccaccatttccacaatctccttttgtatttcttcatcctctggatcggcgggatagtcggaatcattgtttatccctctctacaaggattatcttcgccttcttcgctaaccatccaaagtgtctcccaactcttctttgtaacccctcctcctcctattctttctccttcatttcaggacaatgggcttgacatggttctgataccactgaagaacatcatgcacgatatggaagataatgaacttctggggagagcttcaatggatcctaagatcagggattacccttatcctagaatccnaaagttgctttcat

SEQ ID NO: 130005 - DNA, 569 bp, Arabidopsis thaliana
aaccgaaagagagtaatagagacaaaatgggttcatcatcatctccatccccgaacgacgccgtactggaatcagcccgaccttttctccgaggagagcttgaaaagatcgaccccaaactcccgtcgttaatcgccgtcctcaaaagcgtcggtgccggcgagtgttggcacaaacacggaagcttcctagatcacttaatcgatatctacaagatcctcaagctatggaaagctcctgaatccgtctgtctctgtggtctattccactctgcttactccaattcctatgtcaatttagctattttcgatccttccactggtcgtgacgtcgtccgtgatcacgtcggtgaagctgccgagtcgttgatccatctcttctgcgttgtaccgagacaaactctgattcacgatgagcttttgtttaagtactctgattgtgagcttgttgagcatcttgattgttctgaggtttccctgaggaacccaaaggacaaagggatttttgatggaatatgaagtgtgggggaagaagatgtatgataatgtttttgcccccccccccccccc

SEQ ID NO: 130006 - DNA, 858 bp, Arabidopsis thaliana
  unsure (1)..(858): unsure at all n locations
caaaaacccatttttttctccttctttaaatcccaaaccaacgnnnnnnnnnnnnnnnnnnaatttgggggcaataaaaaaaaaaacctaatttttctctttagtgatgagattgttgttgatgatgaaatgattggagatctaatgaagaataacaacaatggcgacgttgtggataacgaagtgaacaaccggttaagccggtggcatcacaattcttcccggataattagggtttcacgagcttccggtggtaaagatcgacacagcaaagtcttgacttctaaaggaccacgtgaccgtcgtgtccggttatcagtctccaccgctcttcaattctatgatcttcaagatcggttaggttatgatcaacctagcaaagctgttgaatggttaatcaaagctgctgaagattcaatctctgagcttccttcactcaacaacactcattttccgaccgatgacgagaatcaccagaatcagacattaacaacagttgctgctaattccttgtctaaatctgcttgtagtagcaattcagacacgagcaagaactcttctggtttgtctttatcaagatcggagcttagagataaagctagagagagggctagagagaggacagctaaaggggccaaggagagagatccataaccacactttcggtttcggttttgtttaaattcccggttcaaatncccggttaaatttaaaccgggnaattggntnggntttaangcnccctttttaaaatccccaangggggtttttcaatttcngggtttaattnncgggggtgggggtaaaaaaacccttttccccntttttaaanaaatntttnanccnttttaaanaatc

SEQ ID NO: 130007 - DNA, 999 bp, Arabidopsis thaliana
  unsure (1)..(999): unsure at all n locations
nnnnnnnnnnnnnnnnnnnnnnnnnnnnnnnnnnnnnnnnnnnnnnnnnnnnnnnnnnnnctgggaagaccacgcggccgcacaacaatatcacactcagataaatatcaagagatagagagagtaacagtgatatagtcgagaaaatggcgtcgtggatgaaagcggtgctaatctctactggcgtcgtagccacggctatgcatctaaaggttattgttcctgtggctatggatttctcacaaaatccgattattttgagctctttcctcacgtggctgaaaccgccgtatctttacgtcatcactaacgtcatcatcatcgttgtcggagtttcctaccggattactactgtctccagccacgtcgacggcaaagactatgaggcttcttacagtggcgacaataagtttcagactgatcatcagcagatcgtccaagaagctcctctaaggcgacgaacggagacgaaagatgcggattttggtttcatcggcaaagttttgcagatcgttaaggagccggaggttgtgtatgaagagaaggagaggccggcgacggtagaggaggaggagaagaagtgtataattgtggtgagcaaatcggaaaatcaacctccggtggagaagcctcttgttacggctaggatcggccaaaagaaaccggtggttaagactacaccagcagaaaggaattctatgagagcgttgagagttgcgaaaccgaaacgtaacgagacgttagagaatacgtggaagatgattatggaaggcaacaaagtcaacgcttcccgttgaccagttattacaagagacccgacacgttcggacttggcgaagagacaaaacaatcaggtgttttgaagaaatcggagacgtttagtgacagaactaactgttaccagtctctgccgccgccaccttcgccgctagtgaaggtgaagaaggtgaaagtgtcacggagtanggatgagctttaaccgaaagtagaagcgtttat

SEQ ID NO: 130008 - DNA, 673 bp, Arabidopsis thaliana
  unsure (1)..(673): unsure at all n locations
acattgtcatccgggtatttcgtggcacctagctctaagatttgatgttcaagacgtagacaaccccaatacttcacaagtgcatttatcggataccctgtggtgtgatcctcacgactggagtcatgaactggtttcaacaagcacagcctgctttgttatacattgtcccagccgtaattgggttcttggcttctcactgcatttggaacggtgacatcaaaccgttgttggcgtttgatgaatcaaagacagaggaagcaacgactgatgaatcaaagactagtgaggaggttaataaagctcatgatgaatgaggaaaaatcgagaaagaagggcagaggagaaatatatacacataaatgtgtcttaatatatggaacaagaaggaaaacaattttgtttccaaatgatcatcaatcagtcccttctaaccccttttttgtttttttagattttcaaactttcttttggccaagacttgtgtaagttactataagttacaacaaattttctttgacttttctttctngttttatgttaaattcngttaggagactggagangttatatatcaaaaaaaaaaaaaaaaaaaaaaaaaaggcgaaccgctctagaggatccaagcttacgtacgcgtgcaggcgacgtcatagctcttctatagtgtgtc

SEQ ID NO: 130009 - DNA, 779 bp, Arabidopsis thaliana
ggcaaagtgacgactatggagagaatggagagagacgcaatggagacggtggctccatatgctccggtgacttatcaccgccgtgttcgtggtgacttggatgacacacttcctaaaccttatttgccgagagcactacaagcacctgacatggaacacccacaaggaacaccagatcatagacataatggccttagtgttcttcagcaacatgtcgctttcttcgatttggacaataatggcatcatttatccctttgaaaccttctctgggttccggttactcggtttcaatttactcgcgtcgcttatcttggctgctggtatcaacatagctcttagctatgctactctcccgggatggttaccgtctccgttcttccctatatatattcacaacattcacaaggcaaagcacggaagcgactctaaaacatatgacaatgaaggaaggtatacaccagcgaatcttgagttgatgtttagcaaatacgcgaggaccataccagacaagttgagtcttggagagctatgggacatgaccgaaggaaaccgcgatgcctttgacttttttggatggttagcgagcaaagtggaatggggtgtattgtatgcattagcgagtgatgaagaaggattcttgtctaaagaagccacaaggcggtgcttcgatgggagcttgttcgagtattgtgccaagaactacgctgagatcaaggagtacaagacgtactactgatcatgatgatcggtggtttttgtattcaaagcaacacgctc

SEQ ID NO: 130010 - DNA, 881 bp, Arabidopsis thaliana
  unsure (1)..(881): unsure at all n locations
aggccggacaannctatttgcncaatcattgcattgagatgaagtaacnccttttgttatntcaagcaagaactcgatagcatgncttttgaattcccagaccagatctccagaggnaagtatatatttcaacatnccataagcttgccaccttttcactggattgttttgaagctcatcaacaacacttcctaaaaccgcattagccgcctctgcaacctcatgggagatctttgcacagatgaataaaagcgatgcacccaagctgatgtcagggaaagaggtgataaactcatcatcatctccagcaaccgtgctcattaatttttcagtgtcattccccgtgattaacccaagttgtgttaacccacaggatgtcaagaacggttctaactgaatcaccagaggaatacaagaggccgctttgtctctgatgctaactgaaataatagccgttatctgtatcacatagagacaaagtagacaacggacttttgcttcttcttcgttattagaccagttttgaagaaacgtctcgaattgaagaggcaatgcctagagccttatcaaataaatcttcaacttgcacgtctgtttccaatgaaatgtccttcaaaacgttcaggacaattggaactgcaacctttaattgctcgtagtgacgcctctggatcaaaataaatactttagagagcccatgcaataaaggagtagaacaagtggaggctgaatgatagcaccgtgcagcatcgagtgcctcacaaagaattgaaagcatatcccgtggattgcatgcttccacaaaccgatcaacgatttcctcaactaaccggacgcgtgggtcgacccgggaattccgaaccggtacctgcaggcgcacc

SEQ ID NO: 130011 - DNA, 975 bp, Arabidopsis thaliana
  unsure (1)..(975): unsure at all n locations
gttatcgcagttttccttacgacaagttagaaaacaatttttttnnnnnnnnnnnnnnnttagcgagaaaagcaagctactctcatttgcacagaaaggggcattttctctatttctcggtatgtatgtaatgtttgtctttttaagcatttaccttaacccatatcattgcattgcctaaagggcttatagtatgcacatgaaaagagaaacaaaacatacttttaaagaattgatataggaaaagaaaagatcaccgcatcactctggtccggaaggagtggaggacctccctgtggaggccttaagaccaactccactagctcaataacatgcgtatcaacagccgcacaatctgtatcttgcaaactgcttttgctcatgctgtctttaactagacccagaaggattgctgtcattgaaggagaccgggaatttgtgacaagggctcttaaaacgtcaaacctatgaggagctgggatatcagaaagaaccctcttcagtgcctcaaatgtctttttcctcagatctgcgtctggcgcatacatgatcagtaatgtaacagcctgtaaagtagcgtagatgccaggcgtgtagtccgaacaatctatttgctcatcattgcattgagatgaagtaactccttttgttatgtcaagcaagaactcgatagcatgtcttttgaattcccagaccagatctccagaggaaagtatatatttcaacatcccataagcttgccaccttttcactggattgttggaagcgatcaacaacacttcctaaaaccgcaatagccgcctctgcaacctcatgggagatctttgcacagatgaataaaagcgatgcacccaagctgatgtcagggaaagaggtgataaactcatcatcatctccagcaaccgtgctcattaatttttcagtgtcattcccccggacgcgtgagtcgacccgggggttccggcgagggccgct

SEQ ID NO: 130012 - DNA, 480 bp, Arabidopsis thaliana
tccggaaggagtggaggacctccctgtggaggccttaagtccaactccactagctcaataacatgcgtatcaacagccgcacaatctgtatcttgcaaactgcttttgctcatgctgtctttaactagacccagaaggattgctgtcattgaagtagaccgggaatttgtgacaagggctcttaaaacgtcaaacctatgaggagctgggatatcagaaagaaccctcttcagtgcctcaaatgtctttttcctcagatctgcgtctggcgcatacatgatcagtaatgtatcagcctggttgaaagaaacgagacacttggagcgctagtaattggtaaacctgaatggtgtaaagattaaggagaagaatattacacctgtaaagtagcgtagatgccaggcgtgtagtccgagcaatctatttgctcatcatagcctcgagccgaattccgagcttacgtacgcgtgcatgcgacgt

SEQ ID NO: 130013 - DNA, 738 bp, Arabidopsis thaliana
ccaattctcctaaagtttgttttctctcgcctctaagaaacaatgttgagtgcctttttgggtcatgcgtcagctattgctatagcttcaccagtagtcagcattgtgggcatcaggcgacaaacatatggagagatgaaacacgtgggggtcgttgaaaaacaaagagaaatgccaacatttcctcaatcgtttcctatgaacggtggtgatggtccgcacagttacatccacaattcctcttatcaaaaagtagcgatagatggcgctaaagaaaagacaagtgaagccatcctaaaaaacctcgatctcgaactcttgaaccgtaattctgatgaaaatatcttaagaattgcggattttggttgttctattggacccaacacgttcgaagtagtccaaaatattatcgatacggtgaagcaaaaaaacctaaaagaaaacaatgcctatattggtgctcctctcgagttccaagtttgcttcaatgatcaaccaaacaatgattttaacacactttttagaacccaacctatctcttccaaacaagcatatttatcggttggagttccaggatctttccatggtagagtattaccaaaaaatagcctccatatcggtcacattacctatgcgctccactggctttctacagttccccaacatgtttgcgacaagaaatctccggcattgaataaaagctacattcaatgtaataatttaatagaggaagtgact

SEQ ID NO: 130014 - DNA, 385 bp, Arabidopsis thaliana
gattggtttttaataatgttagtctccatggagaattagttaattggtatatgattatacttatatgggttatagcgtgaaaaaaagaaacatctactttaagcaacagcagaaagcattaaagaatagataaccccaatttccgagaggaacgttaggagaaagtttttgaaaatttacaaaactttctgttagtagatgcttaatttcatcagtgttttccaagcaattttgaattaaggattaataaaattgttatgtatattatgaaataatgaagatatttcgctatctctagagtctaaagagattagcagttggtgccttggtggttgacaaaagaaaagaagaagagattagcagttgcgtctaacattgcttttat

SEQ ID NO: 130015 - DNA, 576 bp, Arabidopsis thaliana
caaaaaccctaaaaagcttaccgaatttttcttgtggtaatgcagagtcaatgtacctggacataaatggtgtgatgatcaaacagtttagcttcaaagcctctcttctcccattctcttctaatttccgacaaagctccgccaaaatccatcgtcctatcggagccaccatgaccacagtttcgactcagaacgagtctactcaaaaacccgtccaggtggcgaagagattagagaagttcaagactactattttcactcaaatgagcatattggcagttaaacatggagcgatcaatttaggccaaggctttcccaatttcgacggtcctgattttgttaaagaagctgcgatccaagctattaaagatggtaaaaaccagtatgctcgtggatacggcattcctcagctcaactctgctatagctgcgcggtttcgtgaagatacgggtcttgttgttgatcctgagaaagaagttactgttacatctggttgcacagaagccatagctgcagctatgttgggtttaataaaccctggtgatgaagtcattctctttgcaccgttttatgatt

SEQ ID NO: 130016 - DNA, 418 bp, Arabidopsis thaliana
aatgatgctagctatgccgacgatgatgaaggatatgagaactttggaacttcttttgattatgagggtcaatccggtgatgttgatgaaaactttggccccaatgatgcagaaccaacatattcaaattttcatgaggttattaccatcgctcttctaatgatcttttttcttaatgaattttatttggtactgaaaacctgatgttttcactttgcaggaagatgaaccagcctccctgcaagacatggattcagatgacagactggagaatgttgatgactatctctttttgtcgttgggaatttcatctaagcaaaattcttgggcaggtcctgatcactggaagtatcgaaaaacaaaaggtatgcacttatatctctgatttcaagaaataacataagtcctcttagttatc

SEQ ID NO: 130017 - DNA, 484 bp, Arabidopsis thaliana
gtggtttcaaatttctttttctcgtcagtggttagaaacttacaattttaaaaatcttatcttaagctctcctctcttctctctccaaaatctttcagagaggagagcttgataatcgttttgtctccggtttgatccggatttgtttatattctcgtctctatgcgagatcaataatttccgattacatatcggatcttctgttaccggctatgaccggtcttttctccgtttttaacggaacttgatctctatctccatcgttgctcacccatcgatctcaacgttttcttccaagatttttgttgtctccatttcttcgtggattaacatcttcgtcacctccgattgctcaagacgcaagagcaaaaatggactttagactacatcaagatagatgtagtcggtggtggagtctcccgaaactggtgattccaaagaatttatgaagcagctctaccctttaatccggtaaatgatttcg

SEQ ID NO: 130018 - DNA, 460 bp, Arabidopsis thaliana
ctaaaacaaaaaatctcttaacaacttctccaccttctccccaccaccaccactcaccgcggagaaagaaaaaggggcaaccaccatgaaagactgtgaaaaccacggccactctcgccggaaactaataaggcgaatattttggtcaataatcttcgtcctcttcatcatcttcctaacaatcctcctcatttgggcaattctccaaccatcaaagccacgcttcatcctccaagacgccaccgtctacgccttcaacgtctccggcaatccaccgaacctcctcacctccaacttccaaatcactctctcttcccggaaccctaacaacaaaatcggcatttactacgaccggcttgacgtctacgctacttaccggagccaacaaatcactttcccaacatcaatccctcccacgtatcagggacacaaagatgtcgacatcttgtcgccgtttgtt

SEQ ID NO: 130019 - DNA, 421 bp, Arabidopsis thaliana
attgagcagagggaatgaaggaagctcttcacagtagaaattattacctttgtgctgtttttaataatcaaatgaaaacgtgctcttacaaaaccaaaagacacatttaacatcttaaaccatgttacttaactaatatacctcttgagatttgaaatgattggatcatataatcataggatacgtatcaccgtaccatgccatgttatttccactaatgttggaataattgatttatgacttgaccaacttatgcattaaagggttcatcgtcagctacatgccagctctttgcactctatgtatgagtcattttcggtccttttcgtattctttataaacttaatgggttccaaaaagaaaaatccaattctgattgctccatttattatagaaacttaaaagtaatgtactatagaaa

SEQ ID NO: 130020 - DNA, 536 bp, Arabidopsis thaliana
caccccaaacatcacaatttcacattcttttgcatatttcttcttcttcttccattatggagatacggagcttgattgtttctatgaaccctaatttatcttcctttgagctctctcgccctgtatctcctctcactcgctcactagttccgttccgatcgactaaactagttccccgctccatttctagggtttcggcgtcgatctccaccccgaatagtgaaactgacaagatctccgttaaacctgtttacgtcccgacgtctcccaatcgcgaactccggactcctcacagtggataccatttcgatggaacacctcggaagttcttcgagggatggtatttcagggtttccatcccagagaagagggagagtttttgttttatgtattctgtggagaatcctgcatttcggcagagtttgtcaccattggaagtggctctatatggacctagattcactggtgttggagctcagattcttggcgctaatgataaatatttatgccaatacgaacaagactctcacaatttc

SEQ ID NO: 130021 - DNA, 527 bp, Arabidopsis thaliana
  unsure (1)..(527): unsure at all n locations
cacaaagctcgttgtcgtcatcgcgcgacttgaaccaaaaaaaccatgaacagtgagaaggaagacgagccattggaagagatcggcgattcgaataatgttctcgatctcactagctatcagctccacagtctcgatacggtcgagttaccgccgaacctgattgagctggaccttacggcgaaccgtttgtcgggattggactcgaggatcgctcagctctccacgcttaagaagctttctctccgccaaaacctaattgatgattccgccgtcgaaccgttgtctcactgggacgccttgtccgatctcgaggagttagttctcagagataacaagctagcaaaagtaccagatgtcagcatattcacgaagcttttggtttacgacatatctttcaatgaatcactttctttgggaggattntccaaggcttttgnacactgaggnnctttnttgttntaaaantgnggtaccaagtttttggggtgacccttaaaaatttaggtttgacttgggtnanggtt

SEQ ID NO: 130022 - DNA, 461 bp, Arabidopsis thaliana
  unsure (1)..(461): unsure at all n locations
accgggncggaaataccggggcggccccacgcgtccggaaccactcaacgaacccgccaaatttttagggctagaattgggagaaaccctaattttcaactttcatttccttttgctataaatctctgactccggttgttccttgatattaaaaagttgtatggtttggagatacaatctgcttttatcccacaagtaagtttctctactatcttcttctcatctagtgtcttcttttttttaaagcctttttgttgaatttctaactcaagctcatcttctctgtatttagccggcctcagatggtttcttgagaaggtttaaaaccaagtgcaagattcaagtaatctctgataacctcagcttgtcctctacttaattaaccatgtttccaagtcatcgacgtaatggattttattggatttcgaaagaacttttctggttcctcaagttgtttagga

SEQ ID NO: 130023 - DNA, 419 bp, Arabidopsis thaliana
cggacgcgtgggttccaatacccaaataaacatagctaagcttcacataaactaatgatcttaacatgaaaaagccttacaagagaatagctacaccttacgtggtcaattgaaatcattaaaaaatacatgtaaacatcataatttgagaacaaaaataagtgcaaaattaaaagatttaaaattactatgatattaatgcaataacaaaatttaaataaatatatctatttttagatatcaagaaagtcttttgaaattgtgaatattattctatgcaatttgttgaaccattgggtgaactgtttttcttatataatatttctaattctaaagaagaagaaaaatttacttgcaaacttacatataaaaacatgccaagttttaatactatattacaacctacaagaaaacatatt

SEQ ID NO: 130024 - DNA, 1116 bp, Arabidopsis thaliana
gggtatcggttcccccctcgcggtccacggtatcgataagcttgatatcgaattcgcggccgcgccggttgtttttgatttaataccgatattttagcaacaaatctaataaatctaagtgtagttttcggtgtattgatcttttttggaaagggagtgttaaatgatttattagataaccgaaagcagaggatattaaatactattcgaaattcagaagaactgcgtgaaggagctattcaacaattagaaaatgcccgggcgcgcttgcgtaacgtagaaacggaagcggataagtttcgcgtgaatggatactctgaaatcgaacgagaaaaattgaatttgattaattcaacttataaaactttgaaacaattagaaaattacaaaaatgaaaccattctttttgagcaacaaagaacaattaatcaagtccgcgaacgggttttccaacaagctttacaaggagctataggaaccctaaatagttgtttgagtaatgagttacatttacgtactattaatgcaaatattgggatgtttggtacgatgaaaggaaataactgattaattatttccttacgattattataggcattatttttttttcttccaacaaaagaatcaggacaatactcatggtaaccattagagccggcgaaattagtaatattatccgtgaacgtattgagcaatataatagagaagtaacgattgtaaataccggtaccgtacttcaagtgggcgatggcatcgctcgtatttatggtcttgatgaagtaatggcaggtgaattagtagaatttgaggagggtactataggtattgcccttaatttagaatccaataatgttggtgttgtattaatgggtgacggtttgatgatccaagaaggaagttcagtcaaagctacgggaaaaattgctcagataccggtgagtgaggcttatttggggcgtgttataaacgccttggctaaccctattgatggtcgaggtaagatttccgcttctgaatctcggttaattgaatcttctgccccaggtattatttcgagacgttctgtatatgagcctcttcaaacaggacttattgctattgaattcttgatccctt

SEQ ID NO: 130025 - DNA, 660 bp, Arabidopsis thaliana
gaacttgacataaaacttggtctcaaattctagcttaattgtaatagagtctcattattatgtattgaaaattaaaaattttggaaaatacgtttgtaaatagaataggtttttgattctgtttacaaatatccaaataggtaaatgaaattattaaattcaaatttctttttattttcaataaaaagaataaaaaaaaaaggacagagttccttttttatagtttagctagaagaggagattatatgaaaaatttaaccgattctttcgtttacttgggtcactggccatccgccgggagtttcggatttaataccgatattttagcaacaaatccaataaatctaagtgtagttttcggtgtattgatcttttttggaaagggagtgtgtgtgagttgttcatttcaagaataggctggattcacccagtggcactataactaggaaagagtgcataatcccgcgaattacttctgaataaaaaaatcatatttgagaaccatagcctttcgttattctttggtaagtccgctttactttgattctctattaaccaaaaattgggacaattaattaacatggttaaagctaacccgtttgaagtccacacgcaacatggtactctttctactatatatagtctaaatgtagactaaat

SEQ ID NO: 130026 - DNA, 505 bp, Arabidopsis thaliana
aaacaacaatcgctctctacaatggcggaaaggttctctagcggcgaggcccaatattggcccaattatggtagcaccgccaccaccaccgttagcaacagccccatctcgtcgtttttccatcagctccgatcccattcaccaacatcctcgcagctctttggtttcctcgctctctttatctccactggcatcctcctcttcctccttggtgtaagcgtcaccgctgccgtgctcggcttcattgtctttcttccattgatcatcatctcgagtccgatatggattcccctttttgtcgtcgttggcgggttcttaacggtctccggatttcttgtcggaacggtggctttagtgtcgtggacgtaccgctatttccggggaatgcacccggttggatcgaatcagatggattatgcacgtagtaggatctatgacacggcatctcacgtcaaagattacgctagagaattcacgggtactttcatggcagggctaaagatgc

SEQ ID NO: 130027 - DNA, 523 bp, Arabidopsis thaliana
  unsure (1)..(523): unsure at all n locations
ttttgattcccaaaacaaaaaactttcttcaattattctattcatcttctcatggcggctctctccaccaccttctactaccacccactctgcactaaccaccgtacaaagagacaagcctcaagcagacacggagttagatctatgagagtgatgtcttgtcggaagcagaaattaccagaagagaatgaaggagtgatccagagaacattgagaaggatgatttcagaggctgggaagattgggaagaatctgaagccagagaagaagaaaggagacgtcaaggacctgatgcttatgagtctctcttttgctggttatgtttatatctctcaactattgggttgtgcttacttctcctggcaacatctcagcttccccaaatcttcatgaaaaggccaaccaaccattggggtaaactttcaaccagttagggctctttttttttgngccgaaaggngttnaagaccctnggaaannncgntggtttnccttnaaaaccaaatttttnccnaaatttttt

SEQ ID NO: 130028 - DNA, 714 bp, Arabidopsis thaliana
aattcaacaagagatcgcagcagttaccgtgcaggctgcgtatagaggatacttggcacgacgtgctttcaagatattaaaaggtataataaggctacaagcacttatccgtggtcacatggttagaaggcaagctgtttcgactctgtgctgtgttatgggaattgtcagattgcaagcacttgctcgtgggagagagatcagacattcagacattggagttgaagttcagaggaaatgtcatttgcatcatcagcctttagagaataaagccaactcggttgttgatacacattcttacttgggaatcaataagctaacaggaaatgcttttgctcagaagcttctagcttcatcgccaaacgtgctgcctttgtccctcgacaatgattcttccaattcaatctggttagagaactggtcagcatcttgcttctggaaaccagttcctcagccaaagaaagcatcactcagaaaatctcagaagaagtttgccagtaatcctcagatagtcgaggctgagtttgcgagaccaaagaagagtgttcgcaaagtcccttcttcaaatctcgacaattcctcggtggcacagacatcaatctgagcttgagaaacccaaacgcagcttccgcaaggtttcaacaagccagtctgtagaaccactaccgtctatggacaatcctcaagttgatctagagaaagtgaaacgtggct

SEQ ID NO: 130029 - DNA, 558 bp, Arabidopsis thaliana
  unsure (1)..(558): unsure at all n locations
attaannnnnnnnnnnnnnnnnnnnnnnnnnnnnnnnnnnnnnnnnnnnnnnnnnnnnnnnnnnnncgagcgccctccctttttttgtttttttcaaaacacaaaggattctctttcttcaacaatgaaaagcttccgtaccataagacaatgtaatcttaaccttaaacatatgaatagagttatttataatcgtacataaagacatgttaaagtagcagtttcttctctctctgtataaaatgtttgctttcctttgtcggtaaatgtttgacgaagaatgattgagattcttagtgaacaagcgggtcttgcgtgaaaaaaaactcaaacgatttcccggaattttcaaattccaacatactcaatgctgcgtcattctcctttgtgcaacatttggctcagggtcctttgagaattcttctagcaaagcaatgctctgttcatcagcaatagaaccaagcgcttctgcaggctcatgtctaaccattggggtgctcattcacatctctaagtactttgcttagagtagctaaagcagttttactttgcaactga

SEQ ID NO: 130030 - DNA, 417 bp, Arabidopsis thaliana
gcgggacccacgcaacccgtcctttaaaaactcttctagcaaagcaatgctctgttcatctgaaaagggccgtgcaatgtgaagagtgagtaaagactaaagactaagacagtagattgttgtaatctcaaactaagcattttagggaagataccagcaatagaaccaagcgcttctgcagcctcatgtctaaccattgggtgctcattcacatctctaagtactttgcttagagtagctaaagcagttttactttgcaactgacccaagacataagcaacctaagaaaaattgcatcaattacaaggcagcacttatacagatttaaggttcgagagcaataaagcaaagattcaaggtacaagattttaacaaaaacagacacatcaagtcatgacatatacaggaaagtgcaaa

SEQ ID NO: 130031 - DNA, 387 bp, Arabidopsis thaliana
tttccggaagcttgcctcggcatatacctgcaagtcagcatcataagtcaggcgcttatctttgtgacccgatcacggagttggtcttatgtagatcgtcctgggatgttgcttgtggtagcctttatccttgcacaattggtggctactctaattgcagtctatgcgaattggagctttgctgcaatagaagggatcgggtggggatgggccggggtcatctggctttacaatatcgtattctatattcctcttgatatcatcaagttcttgattcgttatgcccttagcggaagagcctgggatcttgttatcgaacaaagggttgcattcacgaggcagaaggatttcgggaaagaacaaaaggagctacaatgggcacatgca

SEQ ID NO: 130032 - DNA, 651 bp, Arabidopsis thaliana
  unsure (1)..(651): unsure at all n locations
caaaaaaagagagagtaaaacagaatagagttatcctaataaccaaacactctcaaaatcatttcccaaaaaccccaaagctttgtcacacacacttcttctcgtttagaaaatttgcatttcaatcagaaaattggtcttccccttggagacgacaatgcagaggttttgcactaagctacgttccatttccctccaatccaatcggaatctctcctttttcggtgcttctcctcaccgtctcattcaccattctccttctccgagtcgtcacttaacaacaacaacaaccctaggtttcgccaattccaccaaatggagcttccttcccgccgccggagtttctccgtcgaatgttagctccatgggctctacctttgttcctcatcacgttggtctcctgcgttatatcacttctaaggaaaaaatggcaaaatggaagaagaagtggagncctaggactccaatcacatcaaaagtcaagnaagtcaagnttaagntttattcgtcattcaaaggcaggtttaaccactaaatgatggtaccatccgtcgctggaagaaggcaagggcacaacgacatttgagcaagnaatcgagcgtgnttgggcaacctggctngtcccngattggagnatggnctatttgantc

SEQ ID NO: 130033 - DNA, 428 bp, Arabidopsis thaliana
gcgctcacacaggcatcaaaagcagaaacaaatatatacatcaccataatcatcatcatcgtgagaaccttcatctttttgagcaacaaagttatgggtttctcgggaatttggttaaatctttatgtggtgtttggatctttaatggtttttgagagaatggtggtgatgaaggcacagccactggttccagcaattttcatatttggtgattcggtggttgatgtgggaaacaacaatgatatctacacaatcgtcaaagctaatttccctccttatggaagagatttcacaacccatacacccaccggacgcttctgcaatggaaagttagctactgacttcaccgctgagaatcttgggttcaaatcatacccacaagcttatctaagcaaaaaggcaaaaggcaagaaccttttgattggagc

SEQ ID NO: 130034 - DNA, 410 bp, Arabidopsis thaliana
ggtcacaccggtccatgatgtggaaggagtagagttatgtgggactttgaagaatgtagttgctatggcagcgggtttcgtggacggtttggaaatgggtaataacacaaaggctgcaatcatgaggattggtctaagagagatgaaagcactctcaaagcttttgtttccatctgttaaagattgtactttcttcgagagctgcggtgtagcagatgtcattacaacttgcttaggaggaagaaaccggagagttgcggaagcatttgcaaaaagcagaggaaaaaggtcttttgatgagcttgaagcagagatgctacaagggcaaaagctacaggtgggatcgacggtaaaagaggtctacgaggtgttgaaacattgtcgatggttggagctttttaccttctttt

SEQ ID NO: 130035 - DNA, 436 bp, Arabidopsis thaliana
ggggataagtttgagcggtggattttgtatggagccgccgagttcgagaccggaggaacctccgtcatgggaggacctttacaaaatcaatcttatgccgtcggagctattccttaagttccgcaaagagcttcaaggccttcgcgtcggcgtcaatcccgagttatataacgaccccaccaatgattaccacgcaaagcttgttttgaagcctctatgtccagaaaggaagtgggaggttacaatatgagccgccacaccaagaagttcgtgttttatccaagaagattcccggtcaccagatttccaaacctccaggttggtgttggacataactttcaaatgaatgcaattggttggaaatggaagcttacttcatgtttgggtggagatggtgtgtctcggattcgaaataaaactactcttggtcttagtc

SEQ ID NO: 130036 - DNA, 418 bp, Arabidopsis thaliana
gtttctccttctctctgcagaaaccgtaattaaaaaccccccacaacttcttcaacataacgtcttcttcttccatctttcgttgcattcacgtttttaaaggttctctgaatcactccattaaaaatagctttgaacaagttttctcaatagtcaacaaaaacaatggccgttgaagctcaccatctaaatcctctgttctcttccaacagagaaatgattcatcccgttgaagcaagcggtgtagtctataacacccagatgagatacggcaccgttccgacgtttaaccccaccgtggaatgtcaaacttctctgtttaacccaatctacaacatctcaccagtcgatcgtttggttcatcaatccatgaaaccaacgatacagtccgttgatagttctctcacattcaacagcg

SEQ ID NO: 130037 - DNA, 701 bp, Arabidopsis thaliana
  unsure (1)..(701): unsure at all n locations
tgcagacaggattcccgaagctcatattcttgaaatggcagaacgatctgctaaaaatcagagactggagatttgggaaaactatgttgaaggagaggaagtagtaaacggtagttctaaagtagaaaccaggcagaaggaaacactaaaggttgttgttacggaagtacttggaggcggtcgtttctatgttcagacggttggcgatcaaaaagtagcttcgattcaaaaccagcttgcagctctgagtcttaaagacgctcccattattggatcgtttaatcctaagaagggtgacatcgtccttgcacaatttagcctcgataactcctggaaccgcgcaatgattgttaatggacctcgaggagcagttcaatctccagaggaggaatttgaagtgttctacatcgattatggaaaccaagaaatagttccgtacagcgcaatacgccctgtggacccttcagtatcctcagcaccagggctagcacagctctgcagacttgcctacataaaagttccaggcaaggaagaggactttggtcgtgacgccggagagtatttgcataccgtaacactcgnaagtggtaaagagttcagggcagtagtagnggaaagagatacttcaggaggcaangtgangggccaacgaacttgtacttngctcgttgtaactctcatcgttgtcgatgatgagatct

SEQ ID NO: 130038 - DNA, 459 bp, Arabidopsis thaliana
caattttcttctgctgctgcttcttcacaaggttgctgctgcttcttcacaagaggttgaagaatgtcagctccgaaatcgggtggtgatccactaccacatccgccgaaagaacagcttccagatatctcttactgcattacaagtcctcctccatggcctgaggctgttctgcttgggtttcaacactaccttgtgatgcttggaacaacagttctgattccatcggctcttgttccacaaatgggaggtagaaatgaagagaaggcaaagctgatccagacaatactgtttgtagctggattgaacacattgctccaaactgtgtttggaactagattacctgctgttattggagcatcttatacatttgtcccagttactatctcaatcatgctttctgggagattcaatgacgttgcagatccagttgagcgatttaagaggataattcgggca

SEQ ID NO: 130039 - DNA, 451 bp, Arabidopsis thaliana
ctgaggatgaagctcggttctacagtgcagaagttgttgatgctcttgggggtatacataatatgggactgatacatcgagatattaagccggagaatctgttgttaactttagatgggcacataaagattgctgattttggtagcgtaaagccaatgcaagacagccaaatcacagtgcttcctaatgcggcttctgatgataaggcgtgcacttttgtcgggacggctgcatatgttcctcctgaagttctaaactcctctccagcaacgttcggaaatgatctctgggcactcggctgcactctgtaccaaatgctttcaggaacttccccattcaaggatgcaagtgaatggctgattttccaaagaattatagctagagatataaagtttccaaatcatttctcagaagcagcaagagacctcatcgaccgattgctagatacaga

SEQ ID NO: 130040 - DNA, 520 bp, Arabidopsis thaliana
  unsure (1)..(520): unsure at all n locations
cgttttatcttccaatcaaagcagctcaaatcaagctcgcaaagatgatgcacatgaccttctactggggaatcaaagccacaattctcttcgatttctggaaaactgactcatggcttagttacatcctcactttaatcgcttgcttcgtcttctccgctttctatcaatacctcgagaatcgccgcatccaattcaaatccctttcttcctcccgtcgtgctcctccaccgcctcgctcttcctccggcgtctccgcgcctcttatccctaaatccggtaccagatccgccgctaaagctgcttcggttcttcttttcggcgtcaacgcagcgatcggttacttgctgatgcttgcagctatgtctttcaacggaggtgttttcatcgcgattgtcgtcggattaaccggccggatacgctgtttttagatctgatgacgggggtgctgataccgccacggatgttccatgtccatgtgcttgataatgtttggtagaaaatnaaaantngggnaant

SEQ ID NO: 130041 - DNA, 626 bp, Arabidopsis thaliana
gggaaactcaagggataatcgtaaatcaccatcaatgcttcattccgcgctacagtatctcttgtcgtgttcttggctttttcgatctttctaaactgaaaccactttccctttcaagttcgaatcaattcagatgattctggaattttgattaaaagacttaaatctttgagaattttgtcggctcttctcttctgggtttggttctgatcatagaaaaggatacgatggagtcttctttaattcatcatatcatcattgtgttgctgttactctggttcatctcttccttgaatcgatcccacgcctttttctatttcctcgctctcatttatctctacctggttcacgaacggtatgtgatgagattgaagagaaaattgcagttcgaagagaggaagcaagcaaatcagagaagggttctatctgattctgaatctgtgagatggatgaattatgctgtggagaagatatggccaatatgcatggaacagatagcgtctcagaagattctgggtccaatcataccttggttcttggaaaaatatagaccttggacagcgaaaaaagctgtgatacagcacctttacatgggaagaaacccacctctgttgactgatattagg

SEQ ID NO: 130042 - DNA, 410 bp, Arabidopsis thaliana
ctccaaagtccaagctcacaatgaacacttccccaaaaatggaaatggaaatgaaaatggaaacgaaggcggctcctgaagctggtatgatcaaaaagtccaacgaggagtggcgtacggttctatctcctgaacagtttaagattcttagagagaaatctattgaaaagagagggtcaggagaatatgtgaagttgttcgaggaaggaatctactgttgtgttggttgtggaaatccggtttataaatcaaccactaaattcgattccggttgcggttggccggctttttttgatgctattcctggcgccatttaccgaaccggtaacctaatctccccttttttttcttttttttaatgaatattgaatttttatcataactctaaagaaacctaaactaatctctga

SEQ ID NO: 130043 - DNA, 624 bp, Arabidopsis thaliana
  unsure (1)..(624): unsure at all n locations
cgagtcttcgacgagtctccggctgcnagtttctcttgctccggcaaacagacctgtcattgcttctctctccggctaactacacagaagcatggtgtttggacaagtagtaataggtcctccaggatcgggaaagaccacttattgtaatggaatgtctcagttcctctctctaatgggcaggaaggttgctattgttaatctggatcctgcaaatgatgcattaccttatgagtgtggtgtgaatatagaagaattgatcaagttagaagatgttatgtcggaacactcgcttggtcctaatggaggtcttgtatattgtatggagtacttggagaaaaacattgactggctggaatctaaactaaagcctcttctgaaggatcattacattctctttgattttcctggccaagtggaattgttcttcattcatgacagtaccaagaatgttctcacgaagctgattaaatcattgaaccttagattaactgctgtgcaactaattgattcccatctatgttgtgatcccgggaactacgtaagttcgctacttctctccttatccacaatgcttcacatggaactcccacatgtcaatgtattgtctaaaatcgatctgat

SEQ ID NO: 130044 - DNA, 408 bp, Arabidopsis thaliana
cacagacactgcactcgatctttctcgtggccaaatcttttgattctccgttcattctccggttccgatctcgaagaagatgagagtagtagtaatatcttcctttgtctccgtctctttgcaactatcctttcttcttctccttgcttctgccattagatcaagctcgtctccaccgaacgatccgtttctcggcatttctcctcaagatgagaagtattacaagtcatcttcagagattaagtgtaaggatggatcaaagaaattcacgaaagctcagcttaatgacgatttctgtgattgttcagatggaactgacgagccaggtacctcagcttgtccaactggaaaattctattgccggaacgccggccactctccggtgattttgttttcttccagagttaa

SEQ ID NO: 130045 - DNA, 409 bp, Arabidopsis thaliana
ctttaaattagacctaattctggcttcttctttttcgttcacgggtttcgttcagtaacgttgagagtataataaatatctcaaaaatattttcaggtcattgattatattctggtaaaagaaaacatatgtgtgcgttcataattaacatcgttctgaatcttatgatgatgatcataattaacatgtgtgtgttctttcacaaaaaaaacatatgtgtgtggtcataattaacatcgatcggctcagaaaggggtttcatcaaccaaacgctgtaagattgtaagtttttctttttttttttttttttgttaaaatgacctgagaatctcaaacttgaatctaaattggccttcaataattgtggaaagccggaatttcttataattttttggtttagataaaatat

SEQ ID NO: 130046 - DNA, 416 bp, Arabidopsis thaliana
cccacgcgtccggtgccagtgtctcggataataccttctcaaggacataagatcctccaatcttcggctttcgtagctgaaactagcaaacaacatttcaactccactggatcatcagatcatcaaatggttgaagaatctccctgtaatcttgtggatgaacatgaaggaggatggcaaagcacaacaggatttctaacagctggagaagttgcagtaccttcaaatccagatgcgtggctgaatcaaaacttctcttgtatgtctaatgtggatgcagcagagcagcaacaaatcccatgtgaagacatcagttcgaaacgctcgcttggaagcgacgacttgtttgatatgttgggtttggatgataagaacaaaggttgtgacaacagttggggagtttcacagatgagaac

SEQ ID NO: 130047 - DNA, 409 bp, Arabidopsis thaliana
tcggtgtggagtatgtagatataagcaggaacagcttctcgggttcacttgatctgggtctagcaaagtcaagctttgtttcctcgattcgtcatttgaacgtaagtgggaattctttggtaggggagctatttgctcatgatggtatcccctttttcgatagcttagaggtgtttgatgctagcagcaatcaattgtctggttctgttccagtcttcagctttgttgtctctctcaagattcttcggttacaagacaatcagttgtcggcttctttaccaccgggccttctgcaagaaagttcaaccatcttaactgaccttgatcttagcctcaatcaacttgaaggtcctatcggaagtataacctcttcaacactagagaagctcaatttgtcttcaaatagact

SEQ ID NO: 130048 - DNA, 384 bp, Arabidopsis thaliana
tggggttgagatatggctcaacgaatttgtctgtcggagctactgtcactccttttagtgcgagtgacggattgccaaaccatgcatggcttgtaagcaagatgggaagtcttacagtaggagtacaatatgagccgctacatggaagcaaagatttggcaaagtacacagacccaagaaactggagttgtgctgctggctatggagtagggtcacagagccccttgactccttcgtttaacatgggcattgaactagcaagaagctcccagtttattgcttcgttctaccaacacgtagtggtccaaagaagggtgcaaaatcctttcgaagaaaaccaagtagttggaataacaaactacattgattttggttttgagctac

SEQ ID NO: 130049 - DNA, 440 bp, Arabidopsis thaliana
cagcacttcacaacttctcatgaacaagtagaaaaaaaagagcaagactaataagccatataagagacaacatgaacaacctagacgagatcaagatcgagagcaagacctgcctcaacgatcaagaacaagaagtcaaaatagacaacatgcacatgagcgaccaagacaagaacaagatcgaaatcaagaacaagagtggcctcggcgaaaagtggccagaacccatcgtccgagtccaatctctagccgagagcaacctcactagtctccctgaccgttacatcaagccgccgtctcaacgccctcaaaccaccatcatcgaccaccaaccggaagtagctgacataaatataccgatcatagacctagacagtctattctctggcaatgaagacgacaagaagaggatatccgaggcatgccgtgaatggggattc

SEQ ID NO: 130050 - DNA, 536 bp, Arabidopsis thaliana
caaacggacacgcttcagctgatgatagatttaattttgccaatagtataaaccagttacgcctttttatagaacaactctgccatacttgataattcatacactctatctcttctctctctctctcaatctctcaaaagatctccggtaacgttttaacgtcggtgaaaaaatgcggaagttaacggcggttaattcactactgaaacggaacaattatcttcttccgcgccatggctcctcacaaacagcagctcagagaacatcctccgtccgcgagaccgagaccgaaacaaaacttccgaaaatgcccccgttcaattattctccgccgccttacgacggtccatctacggcagagatcatcgcaaagcggcgagagttcctcagccccgctctttttcacttctacaacacacccttaaacattgtggaggcaaagatgcagtatgtgttcgacgagaatggacgtcgatatttagatgcctttggaggaatagcgacggtttcgtgcggccattgccacccggaagtag

SEQ ID NO: 130051 - DNA, 463 bp, Arabidopsis thaliana
ccactcatttcatttgaagaacaacctcctttattattctcaagattccagttcatgatcaagcaagcgtggataactcttcaaaggttgaggcgctttcttccaacccaattcacccgggtcgattccaagagtttcctgttttcgattcccttctcttcaaattctcagtttggatcagaatctgttaagcgggtcacttccaaattcttcttgcacctcctcaaagattataactttagacgtgtctcacaatcttctaaccgggaagcttccttcttgctactcttcaaagaggttcagttatcagaccgggcttttctcattcaaccgcttgtctttgattggcactcctaacgcgaagtatcagcgtccgctttctttctgtcaaaaccaaacaagcaaggcaatagctttggaacctatccccaaagctaaagataaaaattcttcaagaatcaaa

SEQ ID NO: 130052 - DNA, 432 bp, Arabidopsis thaliana
  unsure (1)..(432): unsure at all n locations
gctactctcaagtgatcaaattaactccgtcgcaggtgatgaggagatacagtccgccttattacagtcctccgaggagaggatacggtggtcgaggtagaagtcctcctcctcctcctcctcgacgtggatatggtggtggtggtggtggacgtagaggatctagccatggaagtctcttggttcgtaacattcctcttgattgcagaccagaagagcttcgtgagccctttgagaggtttggacctgtgagagatgtctatatccccagagactattactcagggcaaccgccggggtttgcgtttgtggagtttgttgatgcatatgatgctggggaggctcacagaagcaatgaaccaggagaagcttttcttgaagagagattaacggtggttttttncttcnaaagtntagggaaaaggccttaaa

SEQ ID NO: 130053 - DNA, 407 bp, Arabidopsis thaliana
cacattttcacattcatgtcgaattaattaagttggaaattctgcaaaatcatttcaagaaagaacttgatgagagctggtaggtcttttgattgactttcgtggtctatattctcaatatatagtatatgctttgaaagttgaatatgcactagttcttgttgtgttaagagttaattagcgtgaagtaatataattctcatatcgagtgtttaatttactagctttatgacaaaataatcataatcaaatagaatactaatgaagaaaaaggtaatatatatatgtaagaaagatgaattatgtaaagattgcttttactagccctgtgacaaaaaatgttaaatctttatcaaattgaacgatgattgataattgaaatttaattttaatgaaaagaagtagtt

SEQ ID NO: 130054 - DNA, 394 bp, Arabidopsis thaliana
atctggtacttcgatccattgaatcgacgaagcatctttcgcgtttttattcaaaatcccgaatcttgatttcttcttctcgtcgtaaaccaccggagaaccacctcttatcatctccggcaatcggaataccacttgttggtctggaatcactacgaaattctcagtgatcgcgaaatcgtggatcatcgttggttgatcaagcggaatctcgacgtctggtgatttctcaccgtcggatgtgaatctgaagtattttaagtaaggctttgaaacgacgtcgtagcttaaagcgaagagttctcgggtttcgggatcgattttcgggtgggctatcattgttgattttaactgaccgtcgaaatcgtaccgacccgaagtttctaaatctccg

SEQ ID NO: 130055 - DNA, 397 bp, Arabidopsis thaliana
cacaaggaatggtgagacccatgtcatgatcaaaaccaaactcttcctcagctcttctaaggagacattggaagtcaagattggtcaagaaagagataggaaccatgtatctgcttctggtggggcccacgcagacacgggaagtgtcccttgggtacaccaagtgggagagcaacctcttcatatcctcctcctccattcttcttccccaagcttgaacatctcttcagaatctgcctaagcattgctgtttgagccagttttgtagatttcttgagaatggacatttttgttttttggtggtttgagagaatcttctgggtgttggagagagagagagagagagagtttggtggatattgaagggaggggtgttaatatttataaaggcgtgcat

SEQ ID NO: 130056 - DNA, 404 bp, Arabidopsis thaliana
ttctttctctgctctcaaagctcaagagaactctatccttattaacttacaaggataactaaaaccggtgtaatcacgatcatagtagaagatgggcggtcccggatcatcaccatgtgcttcgtgtaagcttcttcgacgacgatgtgcaaaagattgcatcttcgcaccttattttcctcctgacgatcctcacaaattcgccattgttcataaggtctttggtgccagcaacgtcagcaaaatgttgcaggagctaccagttcatcaaagagctgacgcggtgaatagtctggtttttgaagcaaacgcaagagtaagagatccggtctacggctgcgtaggagcaatctcctacttacaaaaccaagtctcgcagcttcagatgcaactagcagtggctc

SEQ ID NO: 130057 - DNA, 356 bp, Arabidopsis thaliana
ttaaaataaaaccttaacttctttttttgtttaatttatttgcagctttgaatcagtcaatatatatatatacgatgctcatatcttattattttgtgtcttttaaaagaaaagaaaaacctttttaaacaaagttaaggtttttatatatcagccatatttcttaggcaagtaaaaaagaagtaaagttcaacgttgtaaactttagggcacaataagtttgcttcctatccaagctactattctatatcttcttccaagttgaagatactctagtttgttttcttctggaatattcttcatgagacttgtaatccattattcttttttcttactagaaattactaattggtaag

SEQ ID NO: 130058 - DNA, 264 bp, Arabidopsis thaliana
aatgaacggaaaaaatcataacatacacaaagttttctttggtctttaataatttagaacattttttattgacgagccacagaaattgcacctatcaaagcaactaaaagaattattgaaatgagttcaaatggcagaaaaaaatctgttgataaatgaattcctatttgttgactattacttattaaatcttgctctagaatctggtttaattttgtagtccaaataaccccgtaccatgacgtatcgagaatagtagacatt

SEQ ID NO: 130059 - DNA, 392 bp, Arabidopsis thaliana
agtaatattaatgaaattggtattttatcaatgctgaaattagtatctatgctacgttacattgtctaacaacgctgatacttcaaaattgaataccaagtaaactaaaataaaaacataaataaatgaaaaaaaaaacagaaacctcagattggatgtcttggagtttggtgaccgactgtctactttagactcataattgatctaaaattgtgtatataagttcaagaagagacgtataaaatcataaattaatatcgaattgtttagcaaatatggtcaccaaaatttaaaatgataagagttaggttttgatataaccgatatgtatgtttcattcatggggataatgtcggctaatatgtcagatgacatgttcattgatccatcct

SEQ ID NO: 130060 - DNA, 649 bp, Arabidopsis thaliana
  unsure (1)..(649): unsure at all n locations
gtttcggaattncccgggggcgacgccacgtcgtccgcttcgactaataaagtatatcggcggagtaaattttgttgttatatanntggtaatccttctaagtatagaatattattatatcgtgtagctgtaccaatttgtgaataaaatngggggttgtgtaattacccacccctgttcaaaaaagtttctggattgttttaccttcgaatgaagttaaggaaaaaatgagttgataaaagttttctttcttaatcacttccgaacggcatggttcgattttgtttagatactaaagattttttttcgttcatgcttctgaaaggattcgacatatttttgtataggtatacctataggataaaaaggtaaaattttgagtaagttcttaagtataagttaataaggggacagccattttctagactccataataagtattcaaatgagtaagtgttttttcaatttcaaccattcctttcacgaagatacaattcaagattcaaaaatatcaagaaacctttttttcgtccaccaataaatatattcacagaattaaggaataacaactatgaaaataagggcttccgttcgtaaaatttgtgaaaagtgtcgactaatccgcaggaggggacgaattatagtaatt

SEQ ID NO: 130061 - DNA, 628 bp, Arabidopsis thaliana
aacaagagccaagctaatgagataagtgtatcggtgaggctgagagttattcacttacaaaaaaaaaaaaaaaacttgagtgtaaccaaaaaaaaaaggttgatatactttctggttttctccttaacttttattctttacaaatccatcccccttagatctgtttatttcccgctactttgattcatttctgttagtaatctgtctttcgtatagaagaaaactgatttcttggtttgtattttcttaaagagatcaatctttttttatttttgatcttcttgtgtttttttttctttgtagaattaatcgtttgtgagggtatttttttaattccctcctctcagaaatctacacagaggttttttattttataaacctctttttcgattttcttgaaaacaaaaaatcctgttctttactttttttacaagaacaagggaaaaaaatttctttttattagaaatgacaacttctatggatttttacagtaacaaaacgtttcaacaatctgatccattcggtggtgaattaatggaagcgcttttaccttttatcaaaagcccttccaacgattcatccgcgtttgcgttctctctacccgctccaatttcatacgggtcggatc

SEQ ID NO: 130062 - DNA, 406 bp, Arabidopsis thaliana
aaaacttgaaagtttaagtcactaagaaaaggaattgtagcctaaaactattctgatagttcttatggaatcctaccattagataacgagcctaaaggcgcattgagttgaagggcgcctgcacacatatcaacgatatcttgtaatgtttgcctcgcggagccaacagtaagttcctcctcaagtgaagccctagatcgagcatgaatggctgcaaccctctgaacctgtaatttttatattgggtaatgagatttaagtaagctgaaaaaccatagaagttttgatgttggacataataacttacaagcacttggaaagcaaaaccagtgggtagaaattgtccggggcgcctctcgttcataggactaataattcttctagtaattctgcggtaccactccat

SEQ ID NO: 130063 - DNA, 753 bp, Arabidopsis thaliana
gaagtgagatgtgtacgagaggatcttacatagagctgtgaaaccggtgagaaggttgttggtgtaggatcttttaatgtttggagcactaaaccttgcgagagaggtatttggtctcgtggagtggaggttgggtcattcgtttgctctactaatgatctgtcttctgataataaagccgccatgaacattgcgtgtttgaaaaatctcgacccgagcctacaaggtatgccaaatcttgatcaggtccatgcacttattcaccattatggaccgatggtctacttccatcccgaagagacttacatgccttcgtctgtgccatggttctttaaaaacggagctttggggcaccggtttgggaaatctcaaggcgaaccgattaactcagctggctcgaacttgcctgcgggtggagaaaacgatgggagcttctggattgatctccctgaagatgaagaagttagaagtaatctaaagaagggaaatatagaaagctcagagctttacgtccacgtgaaacccgcgcttggcgggattttcacggacgttgtaatgtggatattctgtccatttaatggtccagccactctcaaaatcgggcttctcacggtaccaatgaaccgccttggagagcatgttggtgattgggaacatttcacattcccgattagccaccttcaacggcgatcttacacagatgttcttctcacagcatagtggtggaggaatgggtgatgtatccgatcttga

SEQ ID NO: 130064 - DNA, 414 bp, Arabidopsis thaliana
caaaaatatcaaagattctgctttagaaactgtccatggatgctaatggaggacctgtacagatccggacccaaaactacgtcaagcttggttatcactatctgatcactcacttttttaaactcatgttcctccctctaatggctgttttgttcatgaatgtctcattgttaagcctaaaccatcttcagctctattacaattccaccggattcatcttcgtcatcactctcgccattgtcggatccattgtcttcttcatgtctcgacctagatccatctaccttctagattactcttgctacctcccgccttcgagtcaaaaagttagctaccagaaattcatgaacaactctagtttgattcaagatttcagcgaaacttctcttgagttccagaggaagatcttgattc

SEQ ID NO: 130065 - DNA, 308 bp, Arabidopsis thaliana
aatcggactacgtgaagcgtccggtttcgagtaaccggcctcggtttgatactcaagaaattggttgaggtggagaaagttgaaatgaattggaatccgtatggaggaagaatgggtgagatcccgagttcgaggacacctttcccacatagaggaggcaatttgttcaacattgaatatatcatagactggtcagacgctggggatgttggggagaacgatcgtttcgttcgttcacacgttttgttcatatatatgacaccgtgtgagtctagttatccgttgttggcttttattaaattatttgt

SEQ ID NO: 130066 - DNA, 440 bp, Arabidopsis thaliana
ccggaccggagggccgggctagacccacgcgtacgtaacgactcaaggaatgtaacagccaatagtatgaagcacgccgggtttcaaattcatgagggcagagctacaattatgcacataaaagaaatggtcagaatcacagagatagtttttaaaacagcagatgctttcgatacagaaaagggaatttttattactgaaagtaaatagtggcaaaatgcagcagctaaagttatattaagtaatgctgcaaataggcaaaagatctcgaaagagactaaccgaatgcgttatattctcaagagaatcaacagtgcagtgggcataatcataactcggatagatacaccacttgtcaccagccttaggatgaggtgcgaactgcaaagcatattaacaagtcagacaggaaaagaagagagagagcctactttttatat

SEQ ID NO: 130067 - DNA, 833 bp, Arabidopsis thaliana
  unsure (1)..(833): unsure at all n locations
gtcattgtttagaattaaaaaaaaagaaggtaaaagagtcagagccgcctagagaaatcgatcacaaattcagaagaaaagaacagagaaaacagaggaagaggtgagatggaggaacttgtagggcttctgagaatccgagtgaagagagggatcaatcttgctcagcgagacactctaagcagcgacccttttgttgtcataaccatgggatcacagaagctgaagactcgtgttgtggaaaataactgcaaccctgagtggaacgaggaattaacccttgcgttaagacatcccgatgaacctgtgaatctgatagtgtatgataaagatacattcacatcgcacgacaagatgggagatgcaaagatagatattaaaccatttctggaggttcacaaaatgggtttgcaagaacttccagatggaacagagatcaagagagttgtgcccaacagagaaaactgtttggctgaagcgagcagtatcgtctccaataatggcaaaatcgttcagaacatgattcttctgttgaggaatgtcgaatgcggtgaggtcgagattcagcttgaatggattgatattccaggttctagagggctttgaacatatctctttctgtgtgtaataaaaaaaaaactcagttcgttttgggtttttagacaaaagtcacaataagtagaacagagtactactctgttttgtaattgaaatatttggttttagcacctaacctaaatcgttttggttaaaaaaaaaaaaaaagnnnnnnnnnnnnnnnnnnnnnnnnnnnnnnnnnnnnnnnnnnnnnnnnnnnnnnnnnnnnnnnnnna

SEQ ID NO: 130068 - DNA, 587 bp, Arabidopsis thaliana
  unsure (1)..(587): unsure at all n locations
nnnnnnnnnnnnnnnnnnnnnnnnnnnnnnnnnnnnnnnnnnnnatttgaaaatctcagctaaagagagaaagagaagctccatttttctttctcgtcgtgtcatcgttttctcagattcctgaataatcattcccttccgattccaaaatccccaaacctcatccactcctccatctcccggattcggattcccagaatcatgcccatggagaacgacaatggcccacacgttggcaacgtcgtcgtcaccgctgagcaagcgaccaagattaacgagactgatggacggttgccggagaatcggcagaccggtgttgtctctgacaccggaagtggtagcgagagaggagagcaaggggttggagagtcggcagttgctgtggcggtgccggtggaggagagcggatcgatttcggtgggagagctacctgctccccgatcttcctctgctagagttccgtttactaatctaagccaaattgatgcggatcttgctcttgctcgcacactccaggaacaggagcggtcgtatatgatgtttgccatgaatagtgaaatcagtgtctttgggtgctgggaatactg

SEQ ID NO: 130069 - DNA, 395 bp, Arabidopsis thaliana
gaggaaagagaaaagtgtctatttctcatatttctaaaaaactacctactttgcaaattatttgtagaaaaagtgtatacttccaacttatctctattataaaagccccgatcaaagtgcagatatcaacaaaaataaaattgtggaatgggtgtatatatttttgttgcagtatcttttatgtaatgcatttgcaacatcttttacctatacttctcgtgtttgtgtgtttactctcttttatgtcaagaagtgaatgtgtcaatctcgtaacataagtctctatttatattcatcgacatcttattatatagctttttctcaagttcaaaattgcaaaagagaggagcatgagaaaaaaatgtcgcgttaacgacaccaatgtcgagaagttt

SEQ ID NO: 130070 - DNA, 846 bp, Arabidopsis thaliana
  unsure (1)..(846): unsure at all n locations
ctcaacaaaaactcgctgatttgatctctcgtcgatataacaatagaggtgtcttacgcgtgatctgaaacctagattcgattcagtcagaacttttgtcgaagatggaaagacaaatcatggcttcttctaaaaaggtacaacgggaagagaatacgaaagaggaatatttaccaaacaagcaagtttcagatgaatcagaacaacttgagaagagttgtttgacagaagaagaagatgcgtgtttgtctgatgctagtcatagcagtaagaagacgataagggaagatgcaatttgtgaatcaaagaatagaaagaagtataagccaagcaacgaatctggattcaacacgttatttgatgatgactggctttttggtaacaatcagcaaaagaatgttgtcaccactaataaagccgctatcaaggacgatgcagagatgatcatgaagttgctgcagagatcatgtggagattccttggttcctagctaaggccccgttttcgcctcaattccggaatattggtattacccatatacagttccgttctaaactgtctctgtattgttttctcatccctcgatcggatttagccttagcctgtgatctattcggggatgtatattttcatatcctatcatgaatatctctggttaaactcgtaaatcctgtataattttttgtcgtgcgagagtttcctttttgtagatttccttttccttgtngtattggttatctacttatcttgtagtctcatattcttatcatgaatatctctatttactcatatttgtatataatttgttgtacaagtgttccttttttagatttcctttttccttgt

SEQ ID NO: 130071 - DNA, 637 bp, Arabidopsis thaliana
aaaaaaagtatacttctttttgcttttgttgttttgggttctgttcattgattctttcaagatggagaaatcaacaagctcggatttgaaatcctccgttaacggtggcgttgttgatgtgtatggagaagattcagccaccattgagcacaacataactccttggtctctctctgtttctagtggatattcattgctgagagatcctcgctacaacaaaggacttgctttcactgagaaagagcgagacactcattacttgcgtggtcttctccctccagttgttcttgatcaaaagcttcaggagaagaggctgatgaacaatatccgccaatatcaatttccattacaaaagtacatggcccttgacagaacttcaggaaagaaacgagagactgttttacaagttgttgatagataatgttgaggagcttcttcctattgtttatactccaactgttggtgaagcttgccagaaatttggaagtattttcaggcgacctcagggtttattcatcagtttaaaagacaagggaaagattctagatgtgttaaagaactggcctgaaaggaatatacaagttattgttgttactgatggtgaaaggattttgggattaggggatcttggatgtca

SEQ ID NO: 130072 - DNA, 1304 bp, Arabidopsis thaliana
  unsure (1)..(1304): unsure at all n locations
ctcttcgttcctttctctctctagatcttaagcccaaatgttgcacaaggcttctcccgctctctctctcttgagctccggctacaccggcggtggaaatctgtttcctccgtcgagaaattcgtcgaatcttctgttttctccgagtggatccaggttttctgttcaggcggcgaaaggaacgaacacgaagtcgttaaccggagttgtattcgaaccttttgaggaggtgaagaaagaaatggagctcgttcccactaccccttttgtttctctcgctcgccacaagttctccgacgattctgaatctgccatcaacgatcagatcaacgtggagtacaacgtctcgtatgtctaccatgccctgtatgcctactttgacagagacaatgtcggcttgaaaggtttcgccaagtcagtttctttagtctaaaggaaaaccgtatttgtgtctcttcagctggtggatcatctttttgttattgttgagggtttaacgctaataggttctttaacgattcaagtgttgaagaacgagggttaatgcctgagaaagttttatggaagtatcagattgcattgttttgcgatggagcttgcactgactttggagaaacttattaatgaaaagcttctgaagttacaaagtgttggtgtgaagaacaatgatgttaagctggttgattttgtagaatctgagtttctaggcgagctggtcgaagccatcaagaaaatctcagagtacatagatggaacaaaaataagggcaatgcagtggtgaagctgagatcggatgtttttgatataagctggcaagtgaagatggagggtcaaagactaacccaaggctggcaaaagttcgcaacaagccacgatctccgagtcgtcgacatagttgttttcagacatgatggagatttcttctcaaaactttgaagtctttgaattctttgtttcgagatctatcgatactcgacatcaaagaactccttataactcttgattcattgaaacaagagtaggcatgtcaatcgagctatcccggtccgacccgaaacccgtaatacccgtatatgtttgagtttgggtcagaaaagctctgagcctatattttaatttaggtatttcctgtattttttattttttgtattcaatttctccaaaattagtggaaattatccatattttctttctaaaaaaaaaaaaaaaaaaaaaaaggctggccgctctagaggatccaagcttacgtacgcgtgcatgcgacgtcaagctcttctaannngtnnnnnnnnnnnnnnnnnnnn

SEQ ID NO: 130073 - DNA, 1113 bp, Arabidopsis thaliana
ctcttcgttcctttctctctctagatcttaagcccaaatgttgcacaaggcttctcccgctctctctctcttgagctccggctacaccggcggtggaaatctgtttcctccgtcgagaaattcgtcgaatcttctgttttctccgagtggatccaggttttctgttcaggcggcgaaaggaacgaacacgaagtcgttaaccggagttgtattcgaaccttttgaggaggtgaagaaagaaatggagctcgttcccactaccccttttgtttctctcgctcgccacaagttctccgacgattctgaatctgccatcaacgatcagatcaacgtggagtacaacgtctcgtatgtctaccatgccctgtatgcctactttgacagagacaatgtcggcttgaaaggtttcgccaagttttttaacgattcgagtcttgaagaacgaggtcatgctgagatgtttatggagtatcagaacaagcgtggtgggagagtgaagctgcagtctattttgatgcccgtctctgagtttgatcacgaggagaagggagatgcattgcatgcgatggagcttgcattgtctttggagaaacttacaaatgaaaagcttctgaagttacaaagtgttggtgtgaagaacaatgatgttcagctggttgattttgtagaatctgagtttctaggcgagcaggtcgaagctatcaagaaaatctcagagtacgttgcacagctaagaagaataggaaagggtcatggagtgtggccttttggtccaaagcttttcaatgatgaggtttaaggaaggaaagttcagctttttaggttgatggccattttccctttgctataaggccccctttcttttttaaaaccacgttttttaagtttgttcgaaaaaaagggttctggcccgtcctttcttttcttggttttgggtaacccgaaggcttgtaagtgggtccttaataatgtacctcgtagtctgataataaatccaagtccccctgtttccaaaaaaaaaaaaaaaaaaaaaaaaaagggccgcccgctctaaaggatccaagcttacgtacgcgtgcatgcgacgtcatagctcttctataagtgtcacat

SEQ ID NO: 130074 - DNA, 522 bp, Arabidopsis thaliana
ctcttgtggagccattcggattagcaccttacattctcaagcgccgtagatctctcgcttcagtttttgaaataatagatcgagttcctacaatcgaacctgatgatacctcggctcttagtccgcctaacgtgtatggaagcattgaactgaaaaacatcgacttctgctacccaacccgcccggaagtgttagtactaagcaacttcagtctcaaagtcaatggcggacaaacagtagctgtggttggtgtttctggttctggaaagagcacaataatatcgttgatcgagagatactacgacccagttgctggtcaggtcttattagatgggcgagacttgaagtcatataatttgagatggttaagaagccatatgggtctgattcaacaggaacccataatcttttccacaacgatcagagaaaacattatatacgcaaggcacaatgcaagtgaagctgagatgaaggaagcagcaaggattgcaaatgcccaccatttcatcagcagcttacctc

SEQ ID NO: 130075 - DNA, 1413 bp, Arabidopsis thaliana
  unsure (1)..(1413): unsure at all n locations
attacccgggtccgcacccacgccgtcccggagaataaccttaacagaaagagaatctactccatcttccttgtggtacattttatacaagcgcaccaaggcacactcaaggggcatagttttggttgataaggaagtaagcacaagtcaagatgcctgcttggctcaaacgaagctactggatgtgcaacaacttggccaaaagtaatcaagaaaaatagccctcaaaccagcttactttgtatatttagatggaaaggcaacacacatgcctccatccccttcttaagtccgccagagtagttcacaccaaatattctctcttcatccaacgcttcaggcttttcaacagctcttcttctacgctcgtgagtgttcgcatcattcagcaatgggggacgtacgttaaagctggtttggctgaattagagcagtggtgtatagaggctaccgatgaatatgctggctcagcttgggatgagttgaggcatatcaggcaggctgatggcttcttggttattcatcaaaagccaaaaaagaccttagacgaaattacaagagaactctgtccggtgctaagtatacaacagctatacagaatcagcacaatgtactgggatgacaaatatggcacccatagtgtttcttcagatgttattgcaaacatgagggttatgatgacagaggactcgaacaatgccgtaagcagctccttccttttggacgatgactcgagcattccattcacggtggaggatatatcaaagtccatgcaacaagtggatgtaaatgacattgaacctcctcaactaatccgtgaaaactcgggtttcggattcttgctcacacgtaaagaaggcagtacatcgtaactgccctcggagaactgggtatggtccatcaaatacgattgcatctaccgcatatacataaatacatcgtgtgagccgctgcattcctatgggcattttgtgtatattatcttcttttcggttcccattctttcttcttctttgttttggggttcagtctccggcctttgtatttgtggagaggccgagtttatttcattctttgcatccctgtgtagttatggaaactcacaggggttatttgtttgccattttggttttgtcatagaatggctttaggtgtgtttgatgctgtcctgcccagagaggggaggagagtattgttttagcaattacttatttgttggtttgggcgagttcttatactcgttttgggaaattgtaatgaatgaactagaatttgttttcactatttatataggctgcacatcttatattaaaaaaaaaaaaaaaaaaaaaaaaaannaagggcggccgctctagaggatccaagcttacgtacgcgtgcatgcgacgtcagagnnnnnnnnnnnnnnnnnnn

SEQ ID NO: 130076 - DNA, 795 bp, Arabidopsis thaliana
  unsure (1)..(795): unsure at all n locations
caccttattatcgattgtggagcgcacactaaaagcaactggcgcagctagtttaacaccgcagaggcgaagaacaacatcagcatccctttttggaaggatgtcacaaggattaaggggatctcctcaaagtgctggactctcttttctgaatagacaagggctcaccaagcttgacgacttgaggcaagttgaagcaaagtaccccgcactacttttcaagcagcagcttactgcattcctcgagaagatatatggaatgagcagagataacctaaagaaagagatctctcctcttcttggcttatgtatacaggcaccaaggacatcaagggcaagtttggtgaaaggaagagcacaagcaaatgctgttgctcaacaagctctgattgcacattggcaaagtatcagaaaaagcctaaacagttacttgaatttaatgaaagcaaacaatgctccacccttcttagtccgcaaagtattcacacaaatattctccttcatcaacgttcagcttttcaacagtcttcttctacgtcgtgagtgttgctcattcagcaatggggagtacgttaaagctggtttggctgaattagagcagtggtgtatagaggctaccgatgaatatgctggctcagcttgggatgagttgaggcatatcaggcaggctgttggcttcttggttattcatcaaaagccaaaaaagaccttagacggaattacaaaggggactctgtccgggggcttaagttttcaacacgtttttcnggnttncngcccnattttccntggggg

SEQ ID NO: 130077 - DNA, 756 bp, Arabidopsis thaliana
ggaaaatagggaaagccatgcgcatagaggttgatcgaagtggaatgattccaaggttgaggttccatgatcgtgaatcgtatgcaagcaataaaaccaaggagtatgatgacattgccatcaaattcttatcctatgtgctcctcctccttgtcattggcttgtccatatattctctcgcttatgaacgccacaagagctggtattcttggatactatcttcactaacaagctgtgtctacatgttcggtttcatcatgatgtgtcctcagctattcgtcaactacaagctaaaatcagtggcacatttaccatggagacagatgacttacaagttcctcaacaccattatcgacgatctctttgcctttgtcatcaaaatgccgattttacatcgactttctgtattcagagatgatgtgatattcttgatatacttataccaaaggtgggtttacccagtggataagacacgtgtgaacgagttcggttttggaggtgaggatgaaactgcagagaagaagttgatcactgagaaagaagaagaagacaagaaaacaaactaatctcttctcttcttcaaattttattacagttcagttatagtgtcttaatttatttttgttctcacttttggaaattgttttgttcaagtttaatgtcaaccctcaagacacattataaagcaaaaaaaaaaaaaaagggcggccgctctagaggatccaagcttacgtacgcgtgcatgcgacgtcatag

SEQ ID NO: 130078 - DNA, 659 bp, Arabidopsis thaliana
  unsure (1)..(659): unsure at all n locations
cctnngccccccctgcatggctgccaataccnccgctttggncncccaagngctggtatcctggatcctatcttccctaacaagctgtgtctccatgtccggtttcaccatgaggtgccctccgctattcctcaactacaagctaaaatccgtggcacatttaccatggagacagatgacttacaagtccctcaacccccattatcgacgatctctttgcctttgtcatcaaaatgccgattttacatcgactttctgtattcagagatgatgtgatattcttgatatacttataccaaaggtgggtttacccagtggataagacacgtgtgaacgagttcggttttggaggtgaggatgaaactgcagagaagaagttgatcactgagaaagaagaagaagacaagaaaacaaactaatctcttctcttcttcaaattttattacagttcagttatagtgtcttaatttatttttgttctcacttttggaaattgttttgttcaagtttaatgtcaaccctcaagacacattataaagcaactcctttggttttttgtgaaaaaggaaaaaaacaacattttctctaaaaaaaaaaaaaaaaaagggcggccgctctagaggatccaagcttacgtacgcgtgcatgcgacgtcagag

SEQ ID NO: 130079 - DNA, 428 bp, Arabidopsis thaliana
tccagcttgccttagagtttgtctcaagcttctccttttttggtattttgtcttaagcttccttgcttctctttcttcttcttctctactctttctctctatttcaaaccttcgttttctttccttttttgtaaaatcttaaaatcaaccaagacaatggaaatgaaattgctctttacatcggctttcacccaaatgttcggctactcgaaccatatggatcaagccagcaactgccaaagcacccgcaacaaaattataaagatgatgaagaaagaagaattcccaagtggattccaagtccctcttcactaccctaaatactccaagtctgattacgaagttatggatgatctccgccttgacttgctcctcaaacaatatggattctccttcgaaggatctcttgaagacaagaaggtttttgc

SEQ ID NO: 130080 - DNA, 463 bp, Arabidopsis thaliana
cggacgcgtggggagatttgtaataatcaaatcatggggaagagaagaggtgtctccgccgtgaacgttgttttcgggtggctgcgacaacaatcgaacaaggttaaaatagctttaggaattatcatctctttgatcctcgtcgttcttctgaaattcaccgttaggaatcacaatcactttttcatcgcctccgagctcatccacgccgccggaatcttgatcctcatctacaaactcactcgccaaaagacttgctccggtctttctttaaaatctcaagaagtgacagcaatatttctagcggtgagattgatatgcagcataaacatggaaggtgatatccatacagttctcgatttcgccaccttggtttcgactctatgggtcatttatatgattcgatacaagctgaaagcatcttatataaagtctctcgacacttgctacaattactatgtgc

SEQ ID NO: 130081 - DNA, 424 bp, Arabidopsis thaliana
gcgaaataattgaacgagtaatttttgtttactttttgtgttctttttattcgttttgttcgtttctgcgtcttcgaggctttctttttagtatttgaccaagttggtctattctattttattagtattccgttataccatgccttcgacaacgtgaacaagcaaacaacaatatttcgtaatcgaatcaatataaattgtgaaattgaattttttcatagaaaataatttaaaaatccatttttgcttttgctgttgtgtctggtcaaatcctatcatgtaactccataatgcaataactgattttttcaagtggctctactctcttacaattacaacttgcaatgttattgttatgtagataatgttattgctgtaaatggtttgagtaactccctaaggcaagtggcccttgtctcgaatc

SEQ ID NO: 130082 - DNA, 454 bp, Arabidopsis thaliana
ggggcagtttgtgttcttgatgatgaaccaatgataagtggtaaacattgcggccaaatggactcaagtgtctgtcaaagtcagaagattagcttttccgttacagcaatgatccaatccgattctggacctgtatgtctttttggcactgaatttcataagaaagtatgttgggagattctgggtgctggttctgagcaaggaattgaggctggccaagttgggcttaggttgataacaaaaggtgagaggcagacaaccgttgctagagagtggtatattggtgcaaccagcataactgatggaaggcggcatacagtgacaatcacaattgatgctgatgcgggggaagctacttgttacatagatggtgggtttgatggctaccataatgggatacctctaaatattgacagagccatttgagaacaaagagctgaaattgggttgggtg

SEQ ID NO: 130083 - DNA, 460 bp, Arabidopsis thaliana
  unsure (1)..(460): unsure at all n locations
gaanaaccgggccgagccacgcgnccgaaacagacacacagagcaaaaaagggcaaacaagggggccctcgcccgcgcagcacacgcgcgcggcgggcgccggaccaacgcgcccagcgaccgcaccgccgccgagnncgaagaagaagacgccaccaaccccaaaggcccaaaaaagaggaaaagccgcaaggaggcgcagaaagaacaacaccnaagagccggccagcaatagaagcgccagcaagcaaggcaaggccgaagcgaagagggggaaaacgaagacgacacggagaacccacagggacaacagcaggaacaacagcgaggccagcagggccgcaacgagccccgccaggaagagccagaagggggcggccccaccgcgaaacaagcngccaaggccggaagaccccagggacagcaccaaccaaggcaaggcaggaaaannnaccagaca

SEQ ID NO: 130084 - DNA, 1379 bp, Arabidopsis thaliana
aattttcttccttttcacacagagacatcggaggagaaaaaaagggcaaggacaaaaaacaaaggtgcggaatttttcctctggaaatatctcagtgagtgtctgtgtaaaacaaaaaaaacaaggaagaaaatttactacatttctgtattatttagcattaaatggatctgttccaacgataattctctgtctgtgataaaagaaaaattgaattttttttcttctatctatctacctctgttcttcctcgtcatttcttacccagaaaattagaggataacaaaaatctgtttctttcgatgatcatcgtgacactttctctgtgatttttcctttcttctgttgttgttgatcatcgtgatcatcgtctttccttacatgcgaacccccatgtcagacactcagcatgtacagagctctttggtgtcgattcgatcttccgacaaaatcgaagatgcctttaggaagatgaaagtaaatgagaccggcgtggaggaactgaatccgtatccagatcgtcccggtgaaagagattgccaattctatttaagaactggtctctgtggctatggaagcagttgccgttacaatcatcctactcatcttccacaggatgttgcttagtacaaggaggagctccctgagagaattggacagccggattgtgagtattttctgaagacaggagcttgtaagtacggcccaacttgtaaatatcatcatccaaaggacaggaacggtgcacaacctgtaatgttcaatgttatcggtttacctatgcgtctgggtgagaagccatgtccatattacctgcgaacgggaacttgcagattcggagttgcttgcaaattccaccattctcaacctgataatggacattctactgcatatggaatgtctagctttcctgctgcagatttacgatatgctagtggtttaacaatgatgtctacatatggaactttgcctcgtccgcaagttccccagtcctatgtgccaatcctggtttcaccctctcaaggctttttacctcctcaaggctgggccccttacatggctgcatctaactccatgtacaatgtgaagaatcaaccttattactccggtagtagtgcatccatggccatggctgtggcattgaaccgtggtttgtcagaaagttctgaccaaccagaatgtcggttttttatgaacaccgggacatgtaaatacggagacgattgcaaatacagccatcccggagtaaggatttcacaaccaccaccaagtcttataaacccttttgttcttccagcgagacctggacaaccagcttgtggtaacttcaggtcttatggattctgcaagtttggaccaaactgcaaattcgaccaccc

SEQ ID NO: 130085 - DNA, 528 bp, Arabidopsis thaliana
  unsure (1)..(528): unsure at all n locations
acgcgtccgaaaaaaaaaaataaacaccttcatagagattactttatggccggaagagagcgatacctagggtgtcctgtcgagaacatatgaacagagcgacgtgatcctcgggtcaattcttcttgccgagtttcaacattcgtaccacaatcgaacctcgtcatatagtctatcaaaaagtcttccatgagttttcagttacattccgatgttcaggacattaaaaaggagacatggattctgactgatgaagggaagaaatatgcggcagaagggtcaccagaggttcaacttttcttagctgttcctgaagaaggcagcatatcaaaagatgagctccagaaaaagttagctcctgcagtcttcaagatcggctgttctcaagctggaaaaaacaagtgggtggaaatgggaaagcaagtctcgaggaaggttaaagatgttgaagataaagtgaaaggccagcttttacaaatacaacaagggnnggantttgccaangaangtntcanttctnttaaagcc

SEQ ID NO: 130086 - DNA, 498 bp, Arabidopsis thaliana
aaaagctagcattttctattctctctcaactccgaaagtacaaaaccccaaattaacaaaacatgttgcgtttcgtggtactctctctaactctcatggttttcatcaactcatcaaactttccaaagacagcagccaccccaccaggcacgtaccaaaaccacacaacgtacgtaaaaacggcatgcaactcaacaacataccctacaatgtgctacaactgtctgtcctcctattcctccaccatcaagtccgacccaatcaaactatgcacaacatcgctaaatctcaacgtcaaatccgctaaaaacgccacattagtcgtctctaaccttctccaaaaggccaaagccgcgaaaagccatgaggtctcgatccttaaggactgcgtggacgagatgaaggacactatcgacgagcttaagcaagcggtcgccgagatgaagtatgtcagaggcggagggaaaactacggaggagcatttaaagaacgtgaaga

SEQ ID NO: 130087 - DNA, 489 bp, Arabidopsis thaliana
ttgacgtcgcatgcacgcgtccgtaagctcggatttcggcccgagtggaaaacaaagagaccaagcaagaaccagcagcagcagctgagcaaaagaccgttccgttgatcgaagatgagatcgagaggagcaaagtcgggatcatgagagctctctgcgaccgacaagatcctgaaactaaggaggtggatgatctgatgataaggaggtttctgagagcgcgtgacctggacattgaaaaggcttcaacgatgtttctaaattacctgacttggaagagaagcatgctcccaaaggggcacataccagaagcagagattgcaaatgatctatcgcataacaagatgtgtatgcaaggtcatgacaagatgggtcgacctatcgctgttgccattgggaacagacataacccttccaaaggcaaccctgacgagttcaagcgttttgttgtctacacgctcgagaagatttgtgctagaatgccgagag

SEQ ID NO: 130088 - DNA, 468 bp, Arabidopsis thaliana
cttctccgtatcggctttaggtcttctccgggaagaaagcttcgaacccaattaacgccggacggtagactgtgaccgactagtccccaaaagctcaagtcaatgagaaaatgctcctcaattttaacgttttagagatccatacccaacaagccctgttttcgcatattctttccgttggtttctcaccatcttcgtcgctatgtcaagagttttgatctctaaaatcgttggaaagcaaacacaatctcttgtctcgaaccagaaagatagagtgtctcaatggggaagctatagaactgcttttacagctgctctaaggtcgcctcagctcagaacttactcttcatctggtaggattccgagtaatgtgtattgtacttttgcctttagagatctcaaaggaagttttttaagtaatcatcttgtctgaagttatactactgcccctgcaagaaatgtagttag

SEQ ID NO: 130089 - DNA, 811 bp, Arabidopsis thaliana
gttctgcaagtaccggtccggaattcccgggtcgacccacgcgtccgggccctagcttttttgaagcacttgattctatagcatttccgccacgcgatcctaatggtccattcaagatgccaattattgataagtgcaaggacatgggaactgttgttatgggaaaagtagaatctggcagcattcgggagggtgattccttggttgttatgccgaacaaggaacaagtgaaagttcgcgctatatattgcgatgaggataaatgtaggcgtgcaagaccgggtgagaatttgagagttcgcattactggcattgaagatgaagacatcctttctggttttgttttatccagcattgtaaaccctgtccctgctgttaccgagtttgttgcccaactacaaattcttgagctgcttgacaacgctatttttacagctggttacaaagcaattctccacatccatgcgggtgacgacgagtgtgagactatcgaattgaatatccaaattgatctctacacaaagaaaccgatgaaaaagaagttttgtttgtgaagaatggtgctgctgttgtgtgccgcatccaagatacaaattcaatttgtattgaaaaattctcagatttccctcaactttgaaagatcactctacgaactgaaagaaaacaattgctgttggaaaggttaccgagctctttaattttgtcttaagccgcttgatccaaattttgtgaagagaaaagccttgaaacgggctttccgggttgcacccagggagggagaattaggaaaaaccgctttcatgaatggatt

SEQ ID NO: 130090 - DNA, 614 bp, Arabidopsis thaliana
ggaagaccgggccggcccacgcgtacggaagcaaaagacaaatgtagtgaaagctggtttttggcatatataatggatacaaatgaaggggagaggcttaagggcgggacgggtgaacttggaagggctcactttgaaacggagagcactagattcactattttagatgctccggggcacaagagttacgtacccaatatgattagtggagcatctcaagcggacattggtgtgctggtgatttcagctcgaaaaggtgaatttgaaacaggatatgagaggggtgggcagacacgtgaacatgttcaacttgccaaaacattgggtgtctctaaactgattgttgttgtgaacaagatggatgacccaactgggaactggtcgaaagaaaggtacgatgaaatagaacaaaaaatggtaccgttcctgaaagcctctggctacaacacaaagaaagatgttgtcttcttgcctatatctggtctaatgggcaaaaatatggaccagaggatgggtcaagaaatttgtccttggtggagtggccctagcttttttgaagtacttgattctattgaaattccgccacgcgatcctaatggtccattcaggatgcc

SEQ ID NO: 130091 - DNA, 251 bp, Arabidopsis thaliana
tagagagacttttttgaccgtccagacattaccattgtttttagtaaatattctccaagacatgtgagacaacttcttttattatttaatgcgatctccaataattaacaagctatattatttaatacaaaataaacaattaaaacattgcagtagttcttgtttctttttgaaaataagaatgatctattattgagtttctatttattattgcattcacacatacagcaataaatcttaggattatgttt

SEQ ID NO: 130092 - DNA, 512 bp, Arabidopsis thaliana
  unsure (1)..(512): unsure at all n locations
caaaatccgtctcggtggaggaaaaatggctgaagaagctcaagtagatcgttctaatggctctgattcatcatctcctcccataaagttacctcctttcatcaccaacctattcgcctttcttcaacctaagcctcctcctgctactattgatgccaatgctcctaaacctaccggcgagaaggaacctctgaaatcgacctacgagactgtcactttcccttacaatccacccaaaagcgcagagccaatcaagtttgaggctgagcccagctctggcaggacttccaactctgtcatcctttggcaggtatatgcacttggagggtttcttgtcctgaagtgggcctgggcaagatggaatgaaaggaacgagagaagtgacaaaaaaggaggcgacgggtgatgatgatcagaaagatgatgatgaggatgatcaatcatctgattgggcattaagctagtcatattccttgaccncggtgaaaattttncccttttggtntttttgg

SEQ ID NO: 130093 - DNA, 1208 bp, Arabidopsis thaliana
  unsure (1)..(1208): unsure at all n locations
ttcagatttggcgagcatccggaataactagtgatttacaactttattgtaccgcaattggcgcattggtcttcgcagccttaatgctttttgctggttggttccattatcacaaagcagctccaaaattggcttggttccaagatgtagaatctatgttgaatcaccatttagcagggctactaggacttgggtccctttcttgggcaggacatcaagtacatgtatctttaccgattaaccaatttctaaacgctggagtagatcctaaagaaataccgcttcctcatgaatttatcttgaatcgggatcttttggctcaactttatccaagttttgctgaaggagcaactcccttttttaccttaaattggtcaaaatactcggaatttcttacttttcgtggcggattagatccagtgactgggggtctatggttaaccgatatagcacatcatcatttagctatcgcaattcttgttctccgcgcgggtcatatgtataggaccaactggggtattggtcatggtataaaagatattttagaggctcataaaggtccatttacaggccaaggccataaaggcctatatgaaattctaacaacatcatggcatgctcaattatctcttaacctagctatgttaggctctttaaccattattgtagctcaccatatgtattccatgcccccttatccatatctagctactgactatgctacacaactgtcattgttcacacatcacatgtggattggtggatttctcatagttggtgctgctgcgcatgcagccatttttatggtaagagactatgatccaactaatcgatataacgatttattagatcgtgtcctgaggcatcgcgatgcaatcatatcacatctcaactgggtatgtatatttctaggcttccacagttttggtttgtatattcataatgataccatgagtgctttagggcgtccacaagatatgttttcagatactgctatacaattacaaccagtctttgctcaatggatacaaaatacccatgctttagcacctggtgtaacagcccctggtgaaacagcgagcaccagtttgccttgggggggcggtgngttngtagcagtgggtggcccagtagctttgttacctcctccctttggnncggcngnttttaaaagtttacttattcntgcntttcntattcatgtgccg

SEQ ID NO: 130094 - DNA, 508 bp, Arabidopsis thaliana
  unsure (1)..(508): unsure at all n locations
cgcgaccgncagatagtttttgctccattttagtttagatgacccaagcgctnaaaggctggttggaatctactggacaacaacatgttcttgctcaggtttgggcgcctgtcaaaaaccgtggacgatatgttcttacaacttcaggacagccatttgttcttggtcccaatagtaatggccttaatcaatacaggatggtttcattgacgtatatgttttcccttgatggtgaacgggacggagagctcgggcttcctggtcgcgttttcaggaaaaagttacctgagtggactcctaatgtgcagtattactccagcaaagagttttcaaggcttggtcacgccttgcactataatgttcagggaactttggctttgcctgtttttgaaccatccaggcaactctgtgtaggagttgtcgagcttattatgactgctccgaagattaactatgctcctgaggttgaaaaagtttgtaaagcgcttgaggctcggaatttgaaaac

SEQ ID NO: 130095 - DNA, 451 bp, Arabidopsis thaliana
tgaaggaacagttcatgagcacaaaacacattgctctggctgttagtgaagagcttgacttgcagactaggcttattgatgacttagattaccatgtggatgttactgactctcgcttaaggagagtgcagaagagccttgctgtcatgaacaagaatatgagaagtggttgctcttgcatgtcaatgctcttgtcagtgctggggatcgtcggtcttgctgttgtaatatggatgttggttaagtatatgtaataccaacatcagacaacttataagttcctctgtaggtccactggcctctactctctatgtgaatggttgcaatgtatttcctcattccacatttgtggctgagcttttcatttctcttctgttaccaaaaccctttaactgcacacattatatattacttaaagggttttggtaacatataatgtgtgcagttaaaa

SEQ ID NO: 130096 - DNA, 569 bp, Arabidopsis thaliana
cgctctgtacgtacctgccacgtggcgtaatctctctgcacgacgcgcttcttttctttctatatacatctctccgacacaaacctaacccttcttctgaatcactttagttatcaatcgatagaaacgccgcccaattaccaaacatcgaaaccaccatgagggttatctcaaaactgttcgattccgacagaagacgaatacccaaatcgccgaagcatttggattccggcgaaagcgccacgtcatcttcctcactcagcgacgtaaccaccggctcaagcagccttcatagcagtctctctctccaaacgcttccttcagttccctctcttcagaaaatcccatccaccaccgtcaccgtctctcactccgttacctcctcgtttaaactccgtgatcggagtcttcctgtaacttgtctcgccgtcaacggtggctatctcttcgccgtttctggacacgaagtaagtatctacgatcgcgacatgtgtgctcatctcgacacattcaacggccaagatcctttcttaagaaccgtggaagccgacggcttctccggtgagaaa

SEQ ID NO: 130097 - DNA, 613 bp, Arabidopsis thaliana
atcaaatcagtcttctacttcactgacttactccgcactgttagcttcaaatgcaggtcccagcagggattgccctcccatgacggtgacatacagacttcaggggttagatggtgaagctactgagcctatgatcaaggaattggaagaagatagagaagaatcacaagatccagagattgagtttgcaatagcaggtgcagttcgagaatatggtggtctggaaattttacttgatatgatcaagagtttacaagatgacttcaaatccaaccaagaagagatggttgcagttcttgatctcctaaaccattgctgcaagattagagagaacaggcgagctctactcaggctaggggctttaagcttacttcttgaaacagctaggagggcattttctgtggatgctatggagccagctgaaggcatactcttaattgtcgagagtttgacgcttgaagcaaatgaaagtgacagcatcagtgccgcacaaagtgctttgactgtcagtaacgaggaaactggaacttgggaacaggccaaaaaaatagtgcttatgttcttagaaaggctaagccatccttcagggcttaaaaagtcaaacaaacagcat

SEQ ID NO: 130098 - DNA, 406 bp, Arabidopsis thaliana
ctgcgttatagatacttacgcatattccatgccaggagcgttaacatggataggaacatttgtatccaaccactctatttgtagaccactttgctgcgtgtgcaactctcgatgcaagctccctttcgttcgtacgcttcccgaggacggagctgatctatacttttgttctttagaatgtgagaagaaaattgatcaggaacgtttcgaattttaaaattatgttctttactatgtttagaaaactatttatttatagatgataatgtttgctagcttgaatgactcgcaaatttggtaaaatttgtgaggaatctgggtctgttaaattattacaagtccctacaataacatttggttgtgtacttgtgttagtgtaatatatatatatatctcattgaacccc

SEQ ID NO: 130099 - DNA, 566 bp, Arabidopsis thaliana
  unsure (1)..(566): unsure at all n locations
cagaaagtgaaaaagagagcgagcgatgaacagtatcttctccattgacgatttctccgatcctttctgggaaactcctccgattcctctcaatcccgactcttctaagcctgttacggcggatgaagttagccagagtcaaccggaatggactttcgagatgtttctcgaagagatttcttcgtcggcggtgagctctgagccacttggtaacaacaacaacgcgatcgtcggtgtttcttcggcgcaatctcttccttctgtttccggacagaatgatttcgaggatgatagtcgatttcgtgatcgcgattcgggaaatttggattgtgctgctcccatgacgacgaagacggtgattgttgattccgatgattatcgtcgtgttcttaagaacaagcttgagactgagtgggcactgttggtcccctccgggtnggcctgtnancctaaaatncncaaagtncccaaaacnaactcaccagnaaccagccctaccaagggacttgggaanctcctacantgggnaaantgggacatacaganaatggncannaactngtnng

SEQ ID NO: 130100 - DNA, 465 bp, Arabidopsis thaliana
gagttttcgaaaattttgaagggagcttttctgacagatggctagattctttcttctctgttgcctcttcgcggcggtgctgacgtcatcattgacggaggccggcgacaataatcaagtctactcgccttgttcagattctactgttgcgatcggcgatggattcactttcggcattgccttcgctgcgaaagattctttcttcagtacaaatcgatccaaatccgttcagtactctccctgcgatcatcgccatctctcgctcaacggaaactctgaggtcgccgtgttcagacctaaagtcgatgagatcacactccttaccatcaatacctctagttcctccagtttccgcccggatgcttccaagggatatatggtagcattcgctggtgcaaaatacgctgcaagatcactccccaattatggttgcagacagcaatcacatcgtgacaagcttcaccc

SEQ ID NO: 130101 - DNA, 750 bp, Arabidopsis thaliana
gtccgttctgaattataacggttccccggaaaatcaatggaagagatcgccgttatcaagattcagacggcatttagaggatatatggcaagaagagcattgcgtgcgttgagaggtcttgtgaggctaaaatctttagtccaggggaaatgtgtgagacgtcaagccacatctacattgcaaagcatgcaaacactagctagagtacaatatcagattcgtgagagaaggctccgattgtctgaggataaacaggctttaacacgacagctccaacaaaaacacaataaagactttgataagactggagaaaattggaatgatagtacattgtcgcgggagaaagttgaagcaaacatgttgaacaagcaagttgcaacaatgagaagagaaaaagcgcttgcatatgcattcagtcaccagaatacatggaaaaactcaactaaaatgggttctcaaacattcatggaccctaacaatccgcattggggttggagttggctagaacgttggatggctgctcgaccaaacgaaaaccactcactcacaccagaaaatgctgaaaaagactcttctgctaggagtgtagcaagccgtgccatgtctgagatgattccacgaggcaaaaacctttcaccaagaggaaagacaccaaacagtcgaagagggtcaagcccgagagtgaggcaagtcccaagtgaagactcaaacagcattgtgagtttccaatcagaacaaccttgcaatcgt

SEQ ID NO: 130102 - DNA, 646 bp, Arabidopsis thaliana
gtctacagcttatccgtttcacaaacctgaggaacacacacccgctgtaattttcttgtcaagaaagattccaaaattgattggaaaggctgcacgctatgctggctcggcaaaacccaagaagggtatgcaatacattccgacgataactaattacacgaagctttggtgggttcctaatgttgttgtggctcatcaaaaggaaggaattgaagctattcatttgcctactggtcgaacactttgcaagctttctctacttgaaggtggacttcacgccgacataaacggagatggtgttctcgatcatgtccagactgtcggaggcaatgttggagagagaactgtagtgagcgggtcaatggaagtgttgaagccttgctgggcagtggcaacctcaggcgttcccatccgggaacagctctttaacgtctcgatctgccatcactccccttttaacttcttgcactatggaggagattactcacgacacttcgcccaggcaagagacacctctactctggagatcgcaactcccattctcatccccagagatgatggacacaaacaccgcaaaggcagtcacggagatgtaatcttcttgacaaaccgtggagaggtgacatcatacacgcctgatgtgcac

SEQ ID NO: 130103 - DNA, 420 bp, Arabidopsis thaliana
ctttttttgtatgttcatcattcaagtctaagctcatggtctgcaaggttaatcaccgcggggaaatcggtttcgcgtacttctaagccggttagagggttaaccgactatagtaccggggtctatttcgttagccaaaccggtccaccagaaatccagtttcccggtggatctccttcggaggaagagttaccttcacgaccaagtagaggaccagagttggctccattagaagttccggagcttcctaatttaccagagataagtccgtcggaaactccaccggaagttacaacggttccaagtgatccacccccgcttggaccaccgcagactccgggcccggagtttccggtttcaccatctccatctccaccgatgccagatactccaaattctcctacaccaaaatcaccacct

SEQ ID NO: 130104 - DNA, 427 bp, Arabidopsis thaliana
tgaggttgttcccatggccgatggagaatcaaaacaactaaggagattttcttagagaagcttcagaggcgaatgcagtcgttatcatgaacagcataacactagttgacgcctttctaaacgctgataaatggtcagagatgttctgttcaatcgtggctagggcgaaaactgttcagataatttcatcaggagtttctggagctagtggttctctccttctgatgtttgcagagttacaggtactatctcctctggttccaactagagaagcttattttcttcggtatgtggaacaaaacgcagaaaccggaaattgggcaatcgtggatttcccgatcgatagcttccatgaccaaatgcagcgaatgaatactattactcatgagtataagagaaaaccttcaggctgcatcattcaggacat

SEQ ID NO: 130105 - DNA, 621 bp, Arabidopsis thaliana
  unsure (1)..(621): unsure at all n locations
aaggcttttcacatactggacgagcgatgcttatcaagctacgggctgctacaatctcctttgttcgggtttcatacaaatcaacagtcaaatagcaatgggagcaagtatctctccggtatctggcttccataacccgcaatacgatataagtattaccatttggaaggatccaaaagaagggcactggtggatgcagtttggagacgggtatgtgttgggatactggccaagctttctattctcttacttagcagatagtgcatcaatagtagagtggggtggagaagtagtgaacatggaagaagatggtcaccacacaaccacgcaaatgggaagcggtcaatttccggatgaagggttcacgatagcgagttacttcaggaacattcaagtcgttgatagctctaataatctgaaagaaccaaaagggctcaacactttcactgagaaatcgaattgctatnatgttgnaggttggtaagaattgntgnttnggggccatnatttttacctattgggggccncgggagnaacccntatttccagngggggttaaanaaagaggtngttnangttttngnggaccccttngctgggtttttctttttaagggagggg

SEQ ID NO: 130106 - DNA, 592 bp, Arabidopsis thaliana
  unsure (1)..(592): unsure at all n locations
gcaaatcaaaagagtttaaaaaccacttgccaccgtatgagaaccttgtctctgacggtcgattctccgctcgccacgacgacgccacgtcagcatccacatagattcctctaaatctcacnaataccatcaaaccgattttcgaagattcgaatccaattcttctcctcctcctccttcttcttctgagaaaatctcatcggatttcatatttttgtcctattgactattcaacgtgacagatcgaatacaaagctttttggttttgaatcggggattgttgcgactgagacggtgccgtttcaattcgctgcaaatgcttccctgagaaataccttttggttcttttatgtaaataaaagaatcgaggaggatagtaaatatgggttggagcaacttttggttcaccggaggaagcattcatggccgactggggaattcatcagcaggagtactttgcaatggctcgatttggatggggcggctccgccaccacacgcatggaggaggagattaaactgccatgccaatatcttaaaagaattcactattacttttagggaagccattaaaatggtacgcttggggatac

SEQ ID NO: 130107 - DNA, 777 bp, Arabidopsis thaliana
cattaaccccttttacagtgaacggaacctgaacctggaggcgggcgctctagaactagtggatcccccgggctgtttgatttttcggtcgcggtcaattgacatgttcgggggcccatcgccgccgcacacaccactcgttaaccgccgtaacatcaacaaccaccggcctcgtaacgcaaccgtcacctccgctttacctgatattttcctcgcggcggtctctctccttttcctctggtcatctcctaaacctctagtctctcttcctccgaacagattctctttccctctaaatcctcgccgtcgatccatcaccgccatgtctcgccgatctcctcctcctcctcctcctactcaacgcttcgctaatcctcaatctctctccgattggctcgaatcgcgattaccttccgattcattcgccgcttggggagtcaaaccgggaaccaaaaacgttcataacctctggctagaactctccgacggcgaaacttctctcgccgattcaacttctccagtacgcaccggcaacgtcgtcaccggttcgagtaatcggaaaaaacggacgaatcctagtggaagcttatcaggaattatccgatgggagtattcgcgaaagaattcgtcctttataagagaaaatgaaagcctgaagaaatttctccgacgaaagcagtttttttggcgcccataaaaagaaaaaaccttcggatcctaattcttttaaatggcccgaatgggtggattaaccatttgggacccggaggaaattta

SEQ ID NO: 130108 - DNA, 759 bp, Arabidopsis thaliana
cggaaagttaaatcgcggggaaaaaaataacacgggaccggaaattccccttaggtgggaaaaggcttcatccctggggaagtttattcccaaatggggcaggtatttcgttggaaagatttttggtcccttaatccagagaaaattaaaggccttaaagaatctccccgacgaagcagtttttcgcgccataaaaaaagagctcggatctatcttcaatggcagatggtgataacattgggacagagaattaagaattcttcccggagcttataacagaacagtttgaagaaaggaactcgctatcgtatccaggattaccggcgcgttacgctcttcactctgtgaatgcaacggtggagggattaccggagcaagatttctgtacggaggaaaaagagtacgagggagccgactcgacgaaagattcggttgaaacactcgccgctgggaatgctgtaactgtgaaacgacattactggaaatgggttagtcctgattcgattcgatcttaaaaaaaatctcaaaacaaagcttttcacaaattttatcaatcttgcttttgatacatgaataatcagagagccatgtagagatacatatacacatttatatatgttcataatcatcttcttcgtttggctatttttgtgttagtggatactattctccagaagttttgatctcacatagcaatcttcttcgagttcattgttttgtgctcaaccgacccgatatgcgatttctagctcattcatc

SEQ ID NO: 130109 - DNA, 1136 bp, Arabidopsis thaliana
tttatttctctggtcttatttatttattaataggcctctctgtatcttcttcggtacgagtatgagccacgatagagagttggtttcgatcgttaggggtattttggtcaattgacatgttcgttggcccatctccgccgcacacaccactcgttaaccgccgtaacatcaacaaccaccggcctcgtaacgcaaccgtcacctccgctttacctgatattttcctcgcggcggtctctctccttttcctctggtcatctcctaaacctctagtctctcttcctccggacagattctctttccctctaaatcctcgccgtcgatccatcaccgccatgtctcgccgatctcctcctcctcctcctcctactcaacgcttcgctaatcctcaatctctctccgtttggctcgaatcgcgattaccttccgattcattcgccgcttggggagtcaaaccgggaaccaaaaacgttcataacctctggctagaactctccgacggcgaaacttctctcgccgattcaactcctccagtacgcaccgtcaacgtcgtcaccgttcgagtaatcggaaaaaacggacgaatcctagtggaagctcatcaggaattatccgatgggagtattcgtgaaagatttcgtcctttatcagagaaaatgaagcctgaagaatctcccgacgaagcagtttttcgcgccataaaagaagagctcggatctatcttcaatggcgatggtgataacattggacagagaattaagattcgggcggaacttataacagaagagttgaagaaaggaactcgctatcgtatccagggattacgcgcgcgttacgctcttcactctgtgaatgcaacggtggagggattaccggagcaagatttctgtacggtggaaaaagagtacgagggaggagactcgacgaaagattcggttgaaacactcgccgctgggaatgctgtaactgtgaaacgacattactggaaatgggttagtcctgattcgattcgatcttaaaaaaaatctcaaaacaaagcttttcacaaattttatcaatcttgcttttgatacatgaataatcagagagccatgtagagatacatatacacatttatatatgttcataatcatctt

SEQ ID NO: 130110 - DNA, 418 bp, Arabidopsis thaliana
gagaaagttaaagagagaaggagagatccatagagaaagagaaagagaatgggttctaagggagacaacgttgctgtatgtaacatgaagctcgagagacttctcagcatgaaaggtggcaaaggacaagacagctacgccaataactctcaagctcaagcaatgcatgcacggtccatgcttcacctcctagaggaaacacttgaaaatgttcacctcaactcctccgccagtccgccaccgttcacggcggttgatcttggctgttcctccggcgcatatactgtccacataatcgatttcatagtcaaacatatctctaagaggtttgatgctgccggaatcgaccctccggagttcacagctttcttctccgatctcccaagcaacgacttcaacacgctttttcagctttctt

SEQ ID NO: 130111 - DNA, 417 bp, Arabidopsis thaliana
tagagtttctcatgtctgaggcaaatgaggtgagaacacatggcgattttagggaaatgggtcagaggcttgcgcaggaagttgtttcttttttcaagaggaaaaaggataaacatgcgagatacgggcgcttgaaaaacatcaagctgagttttgttggacattcaattggtaacgtcatcatcagagctgcaatagctgatagtttgatggatccatacaggaagtattttcatacatatatatcgctttcgggtccacacttgggttatctatacagttcaaattccttgtttaattctggactttggctcctgaagaagttaaagagtactcaggttattcatcagcttacactcacagatgatcctgatctccagaatactttcttttacaagctctgcaagcaaaagacgt

SEQ ID NO: 130112 - DNA, 762 bp, Arabidopsis thaliana
ccatttgccggtccgcaattcccgggtcgacccacgcgtccggacagctacaaagtcttccaccagaagtacctcatcaacaaccgtttctggcgaaaaggtggtcccatctttgtttacactggaaatgaaggagacatcgactggtttgcttccaacaccggtttcatgctggatattgctcccaagttccgggctcttcttgttttcattgaacaccggttctatggagaatcaacgccatttgggaagaagtcgcataagtcagctgagacattgggttacctaaactctcagcaagcgttggctgattatgcaatcctgataagaagcttgaagcaggaatctatcgtctgagggcatcgcctgtgggttgtcttttggtggctcttatgggtgggatcccttgcaagcgtgggtcaagacttcaaggtatccccacataaacaatccggggcattggcatcctccgccccaatactttcatttcgataacattgtaccattgacaagcttctatgatgccatttctcaggattttaaggatgcaagtattaattgtttcaaagtcatcaagagaagctgggaaaacctagaggcagtttcaactatgaaaaatggcttgcaagaactcaacaaaaagttcccaacttgcagggcccttattctcaatattcagccagagattggttaagtggagcatttgtttatacagccatgggtaattattcaactgcagctaatttcatggcgccactgcct

SEQ ID NO: 130113 - DNA, 556 bp, Arabidopsis thaliana
  unsure (1)..(556): unsure at all n locations
cttgttttgagagaaagggtagagaatatgtctgcctgtttgtgtcttgttttcctgttcttctctattgttgcagaagcagcgtattctccaggaggtttccaccatctttcttctctaagactaaagaagaaggtgtccaagtcaaaacatgagttaccttttgaaactcgttacttccctcaaaatcttgaccacttcagtttcacaccagacagctacaaagtcttccaccagaagtacctcatcaacaaccgtttctggcgaaaaggtggtcccatctttgtttacactggaaatgaaggagacatcgactggtttgcttccaacaccggtttcatgctggatattgctcccaagttccgggctcttcttgttttcattgaacaccggttctatggagaatcaacgccatttggggagaagtcgcataagtcagctgagacattggggtacctaaactttcagcaagcgtggctgattatgnaacctgntaagagntttangangattttcgtttgggangcnnnggttgntttgggggcnttntgggngc

SEQ ID NO: 130114 - DNA, 549 bp, Arabidopsis thaliana
tggcgatgtacactggctataatcagcttggatacgaggtggcattgactggtcaacaagttcagttacatccatcgtgttcattgctagcatttggccagaagccaagctgggttgttttcggtgaacttctatctattgtggaccagtacttggtatgtgtaactgcgtgtgattttgaagctttgtatatgcttgatccaccaccaccttgggacgtatcccagatgggtgggcggaggctccgaattaaaaaagtggttggttgtagcagcactgtgctaaaacgattctgtgggaaatctaatcgtagtctgctttcaattgtttctcgtgctaggtctctttgttcggatgaaaggattggtattcaagtcgatgttgatcagaatgagattcgactgtatgcgcctcccctcgacatggaaaaagtgtcagcccttgtgaacgatgcattggaatgtgaaaagaaatggatgcataatgaatgtttggagaagtatctatattatggtctgggacaagtacctattgcactgtttggatctt

SEQ ID NO: 130115 - DNA, 374 bp, Arabidopsis thaliana
tttcctaccatataggcgcttgttgtcctggtgcatgatatggggcctaactgggagctcattagtgatgcaatgaacagcactcttaaaattaaggtaagtgcctgttgttttgaaaaatcttgggattctttctttggtacctttcgaacagagtggcagagctatacttcaatagttttttttttttctattctagtgaatggttgtgttggatattgttgtccaggttattgctttctcgtatcactgaacaacttggttttggttactggctgcttgattcttccactgttgtctcccctttatttttcgcaatccgactgagtgcaaggaccggcataagattctgatggataaaacttgtggtgatg

SEQ ID NO: 130116 - DNA, 1108 bp, Arabidopsis thaliana
cattgttactctttggggataaaatttttatcttgtataagcttatccatcaggttcgaaaatggatcgaattgcgtctgcgactttctcttgccctgcgatttcattgtcccgcgtctgtagaatcagcccttttggcttaaacattaaaaccaaccatagaaagagattctcgtgtcgagtagctgtagcttctggagagacttcggccagggtcgtcgtcgacaatgaacttgacttagaacacaagaaacacgatctactgagagctgttcaagacactcaacgaggactcactgccacttctgatcaacgatctatcattgaggaggctctggtgactgtggaagggtttaatggcggtgaagaaattgatccagtgaagttagatggaacatggaggctacaatatacatctgcacctgatgttgttgttctgtttgaagctgcttcaaagacttcccttctttcaggtagggcaggtctttcagaagtttgagtgcagagatagatccgacggtgggatcattcggaatgttgttcagtggagtcttccaagcttgttggaggagcaagaaggtgcaccccctgttgttcccccggaatttgataaggcctctagtcggaacatctacccttccagtttgaagagattagtgtttgaaacctttacctcaattgagccggcttcaagctcttatccgcacctgcaatacttcccacgctcatttctaagcctacagcttttgcagtttacccgtactttcaaaagctcagattccagtaaacgcaaccagcccaggaaggagatctgtaggtggattgtattacctatcgtatctcgataacaacatgcttttgggacggtctgtaggaggaggaggagtatttgtctttacaaaatctcaacccctcgagctgtgagcatcagacaaatctataaaactctgtttttgactgtataatcacagaaaaaagaagaacattatgttagcagattctgtttatgtacaatctattcgggttttattgaaaaaaaaaaaaaaaagggcggccgctctagaggatccaagcttacgtacgcgtgcatgagacgtcataatagtgt

SEQ ID NO: 130117 - DNA, 393 bp, Arabidopsis thaliana
ttttcacacaaaacagataaaattcatagtttggtaacgaaacacttatcaaacccattggttgatctacattacaattacaacttcataacataaaccaaaacgacccaaaaagaaaaacacataggcgggtggtgaaatccctcctctgcccctacccacttctgctttttaaaccacaagacagaagcttgaaaaaagaagataaaacaaaataaaaaaattataaaacaaaggaacccattggtgaaacatagaggtcccttaagacacaccactctactactcaacacccacttactaaaaccctaatccttaacatgactaaaagagcccttattaaacaagcttttttttcattttacccctcaagagttaaagaaaaagttttaa

SEQ ID NO: 130118 - DNA, 434 bp, Arabidopsis thaliana
atctatcggtcctgtggttggaggcgttgattatgcctatgctgttcgcgcgcgcttggcgtgtgtctttatgcgaaggaagggaagcgacctgctagagttcaaagtccaagcagcaacatggctattcatccgcatcattcgggtgacaacgatgacattaaactcactgttgcagcttctagtcttaacagtggtggaggaagtgatcgctacagtcacagcggaagtgcagcgagtgatattcacgttgttgaagctgcgaacttggttatatcgatacaggtccttgaggaatgtgacgaataacttcagcgcagagaatattctcgggagaggtgggttcggcacagtttacaaaggcgaaactccaccatcggacaaaaatagctgtgaaaagaattgagtcttcctttgtgagtgatcaatgtctt

SEQ ID NO: 130119 - DNA, 440 bp, Arabidopsis thaliana
ctcctctgaatttttaagacaaaatagatttcttcttctctttgtttgacccacattttctctggaaaaaattcgtctactttctccgatcgtctcttcattgatcggagggccaacaacgacccattatgcctctcctgtttctggcgcaaacccttgtagcaagttttgattttggtgagaaaatattttagggatctgaagagaaagaacacgatgatgacgagtatggaagggatggtggagaaaggagtattggatgatattataagaagattgttagaaggtaaaggaggcaaacaggttcagctttccgagagcgagattcgtcaactctgctttaacgctcgtcaaatcggcctctctcaacctaatctccttgatctccatgccccaattcgcatctgcggtgatattcatggtcaatatcaagatctttt

SEQ ID NO: 130120 - DNA, 399 bp, Arabidopsis thaliana
gagatatggaattcttctcaggtagagaaggagttccatattccacagaaagttcatggctctgtatacgttgatggatggcttgaagggatctcttggaattcagatgagactcatgttgcgtatgtcgccgaggagccatctcgtcccaagcctacatttgatcaccttggttattacaagaaaggaaattctttggacaaggatattggaagctggaaaggtgaaggggattgggaagaggaatggggagaagcatacgccggaaaaaggcagcctgcgctgtttgttatcaaatgttgacagtggagaggtcgagccaatcaaaggaattcctagatcaataagtggtggacaggttgtttggagttcaaacaggtaccgatcatcttaatattt

SEQ ID NO: 130121 - DNA, 590 bp, Arabidopsis thaliana
  unsure (1)..(590): unsure at all n locations
nnnnnnnnnnnnnnnnnnnnnnnnnnnnnnnnnnnnnnnnnnnnnnnnnnnnnnnnnnnnnnnnnnnnnnnnnnncttttttttttttttttatcataaagaatatatgttttcattaattctttttaactttcttcattattggacaaaaattttatattacacctacatccatttatcaaataatatacttttcaacatgacatccatctaaattcaagctaagatcatctttcgaatttttcgatcagatcattgccgttaagcaaatataaaacaaatcaggagcaaaccttattgttcttccttaggtatgcatgtgcacctcttctgttcttctgttaactcctggatctgcctttgaagaactttcacgtattctactgcttcttctaacatgtctgcagtgttggtttgcttgtccatgttaggtacaagctcttgtagcttccttatccgatcactaatccgcgtccttcgtaccctctcggcaatgctgcggggatgagttgcgcaaccacgtttagcccgaaccctaaaagcaacagagtcctccataaggttctccatgttcatatccgacatgcttg

SEQ ID NO: 130122 - DNA, 407 bp, Arabidopsis thaliana
gaacttgtcccagcggcgaattgtcgaacatctggatccctctggcgaagcatttcgtcggatcttcgaattcgtgctggagaacaccttcgtaagggtatttcactagggagaggtaatggaaccagatccagtagagtgggattcgatctctagagatgaagaatccggagaagaggaggaaataagcgaggattgctacaaccaccgtgaatccgatcatcacgtgtgagactacgccggataagaacgtcacgaaggaacttccggcccaaaacgcggtgaggattgtgaagaagaagaagaggaatccctcggagcctccggcgagtcctacggccgaaaatgttgtggcggcgaatgcggcggataagattatgagagcaaggatggagattatgtgtgag

SEQ ID NO: 130123 - DNA, 672 bp, Arabidopsis thaliana
ggacgaactcgattcattatttacaaaatatagatcgttcatatactctattgtgtctgaaacttgggggggacattggtgcagagccaagcaactccattttttagaaaacccccaatgataacaaatgagtatccattaagcgggggaaattccattttttagaaaaaagattccactcttgaaagaaaagaacggactaacagggtaaatgacctaatcaattttcaaaatgaaataccgttactgtataaaggggatctcattgtgaaagacctattactggaatattcatggggtagagccaaagaatgtgaattgtacaagttaccaatagtattgattaattaaaagaaggagctccggtgtatagagaggacctcaccgttttagaagtaaccatagaaacgatggaacccactatttatccaattctatttactacgttttgtagttattctatttttttatatcaaggcctttcaaagtaaaggaaaatacctagcaaaaaatagtggtggggaaggttagagtagcaaaagccattggaattttttttatacattggaataattcgttcgggtattaatagactagtaaaggggaaaagaataacttaaaaaagaattagttattcatcaaagtttgatttattcaatgacttgatttaaa

SEQ ID NO: 130124 - DNA, 579 bp, Arabidopsis thaliana
  unsure (1)..(579): unsure at all n locations
cttggagtctgttatcaggacccgtattccaagtatactatccttaataaacaaaagcattgaagaacttgaaagagagttagaccgaatgggtcggcctgtcgcagttgatgctggggctcaactatacactatattggagatgtgccgtgcattcgataagatattcaaggaacatcttgatggcgggcgtcctggaggtgaccgtatctatggagtctttgacaaccaacttccagctgcacttaaaaagcttccttttgatcgccatctttctctacaaagcgtgaagaaaatcgtgtccgaggcagatggttatcaacctcacttgattgcaccagaacagggttatcgccgtctaatcgaaggggcactgggttactttagaggtccagctgaagcttcttgtggatgctgttcactatgtcttgaaagagcttgtgaggaaatcaatatcagaaactgaggagctaaagcgtttcccttcactgcaagtcgagctttcttcagcagccaacaggtccttgggaattaaggggtggaacaagaacgccgggtnttcgcctttttttcccatgg

SEQ ID NO: 130125 - DNA, 491 bp, Arabidopsis thaliana
cggacgcgtgggttcttcttcttcttgttcttctttctttgggttagctgagaaatggatgtaatgaagcttgatcacgacagtgtattaaaagagcttgagaggatcacctcgaaagctgctgaagttcaagataacattttacgtgggatcttggaaagaaacaaggacacagagtacttgagtaagtacatgaatggctctaaggatgttctggagtttaaacgcgctgtgccaatcatcacatacaaagatatctatccgtacattcagagaattgctaatggagaagactcatctctttattactggccattctattactgaaatattatgcagctctgggacttctgctggagagccaaagctaatgccaaccattcctgaagatcttgatcgccgtacttttctctacaattttatcattccaatcgtgaacaagtacttaacaggacttgtcaaaggaaaagcaatgtaccttaaatttgtaa

SEQ ID NO: 130126 - DNA, 351 bp, Arabidopsis thaliana
ctctttgtacgaacaaactgcttcgagtttttgttaacctttttctctgatctaatggcgatggaagatcaatcggcggcgagatctatcggaaaagttagttggtttagcgatggaaaaggctacggtttcattactcccgatgatggcggcgaagagctttttgttcatcaatcctcaattgtctccgatggatttcgtagcttgactcttggtgaatcgggtgaatacgaaatcgcgcttggaagcgacgggaagaccaaggccattgaagttactgctccccgcggcggttcacttaataaggaggaaaacagctccccgggatccggaggtaattgttttaattgc

SEQ ID NO: 130127 - DNA, 665 bp, Arabidopsis thaliana
tttttcaattttgatgaaatactaaataaataaaatcagaaaaaacttctatttcgattctattatagtatagaccaaattttaaattttaatgatagatctaatgataaaaactattgtgtcagccggggaagcaggaaaagggaatgaagtgattccccttttttattctatctttgaaagattaaaaaatactatatgttcataatatactaatttagttaagttcatttttcaaaaacacgataaaaaattgttctgattattagcagttcaacgggaccccctcgaatcagacaaagaaggaagagttgggccccgttgagttcttatgttttcacgtctataactcagctcatccaatttctacagggatgaacctaatcctgaatatgaaccataaaagaaaatacctattaaaccgatcacaagaataccagctacagtacctattacccaaagaggaatccttccagtagtatcagccatttatcccgcttccctccacatttaatcgagtggtcatgctagaaacataaacagtcagagataattattatatataatccatccgaatgggataataaaattactactctttattttttattttattattctacgctcttttcttaattgaagaaataattcgaaaataaaacagc

SEQ ID NO: 130128 - DNA, 582 bp, Arabidopsis thaliana
acccacgcgacccatcacaatataatggtctaataaagaataattctgattagttgataattttgtgaaagattcctgtgaaaaaggttaattaaatctattcctaatttatgtcgagtagaccttgttgttttgttttattgcaagaattctaaattcatgacttgtagggagggacttatgtcaccacaaacagagactaaagcaagtgttgggttcaaagctggtgttaaagagtataaattgacttactatactcctgaatatgaaaccaaggatactgatatcttggcagcattccgagtaactcctcaacctggagttccacctgaagaagcaggggctgcggtagctgctgaatcttctactggtacatggacaactgtgtggaccgatgggcttaccagccttgatcgttacaaaggacgatgctaccacatcgagcccgttccaggagaagaaactcaatttattgcgtatgtagcttatcccttagacccttttgaagaaggttcggttactaacatgtttacctcgattgtgggtaatgtatttgggttcaaagccctggctgctctacgt

SEQ ID NO: 130129 - DNA, 570 bp, Arabidopsis thaliana
  unsure (1)..(570): unsure at all n locations
aaaaaaacatggagacaattgcggcgtgtaggctttctgttttcattcttcacaagaagggccacatggccgtacgatcatgtgactctgtggcccatagtcagagaaaagaaaaaatatgacgccagaaagcttgttagcgtcggcgtcgatcacccgtgcccccgccgtacgttgcactctggctcttctccgtcctcaagaagcagccccgtaacgccgtcgtgtactatgctcgccgcctctccgatcgccaccaccaccgtcctctgtctctacactcatccctttgcctccctcgtttccttccttccgttgcgtggatcccacgcgccttccgtgtccccgaggacgagatcctcagccgccacggccttgatgctctcgtcctcatcaggctcttcaaattcggaattagattcttcctgatgtgttcgttactttggagcatcactacttctttccggtttgattaattacaaatgacgtcagatcttacccacacgatggagagtattcaactggattgcttttcacaattttcaaatatcacacgnggttttaaaaagt

SEQ ID NO: 130130 - DNA, 458 bp, Arabidopsis thaliana
tgatgatgttggaggaagaaatttggatgtgtcttctgtcgaggaaaactgtagaagcaaggacacgaatgttacacctgatgatgatgtgtctgggattcgaagcccgtcagcttttttcaaacagcccactcatctcgtaactccttcagagatattgatgggcgtttcttccactgaagcctccattactactgaagacaagagggatagagatgcaaatattgaggaagtgaataatgatgcaagaggcttagaagttgagttgaaagaagtaggcgaagcacagacttcgcagaatggtgaaattaactatcacgaaacaactgagaatcacacttcagaaagtagagaaaatatcttctgctcacaggcttcaaatctcagcactgagatggcaagagaccgtcatcctattacaaaaggaagtgccattcctggggattctatggcttatg

SEQ ID NO: 130131 - DNA, 421 bp, Arabidopsis thaliana
accatatctctcatgaaggttttcatgacctttcagggctggacaacgcaaccacagacattgtcccgagcgttgagcttgatgtgtctgataatgacaatgacacttccagtggtggtgttaatcatgccgtttgtctgtcatcgactcgtgggaagggttctctgccttggatttcgaccaatacttatcaatcgtcttctgatgctggagagattttccatgatacagttgtagagtctgacgggacactactggaagacaataatccagagtcggaaataaaaatgcataaaagccctctggaagtgtcttcagaaggtctgagtactgaaccagacaacaaggacgtagaaagtattgaatctacaagtcccaaggcatctctggatcaaaggaacagggacacagaaaccaaatc

SEQ ID NO: 130132 - DNA, 694 bp, Arabidopsis thaliana
  unsure (1)..(694): unsure at all n locations
gcttctctagaacctctccatctttctcactatcactcccccccccaagtataaaccctaattgtgaggatcacagtaccaaaaaaaaatggacagccgccgcaccagccaccgccaccaacagcagcaccggaaccaaacatggtggcaccactaatttcacgcaatcggccacccaatgttctcccggatccgtctggcaacaccgtccgatgtcccattcatccacaaactaattcaccaaatggcagtcttcgaacgtctcacgcatctcttctccgccaccgaatcaggtctcgcttcaacactcttcacctctcgtcctttccaatcattcacagtcttcctcttagaagtctctcgttctccatttccagcaaccatcacttcatcaccatctcccgatttcacaccgtttctcaaaacgcataaccttgatctcccgattgatgatccggagagttacaatttctcgccggatatgttgaacgacgtcgttgtagctgggtttgttctggttttcccgaattactctagctttttgtccaagcctggggttttacattgagggatatttgtgagagagccttataggnggnaaaggggtttggtagcatnnttgttnaactnctttgggccaaanaagcggtgaanattgggtantggaannagnggaaatnggttttctttnant

SEQ ID NO: 130133 - DNA, 658 bp, Arabidopsis thaliana
cacgaagagaaaagaagagaagaagaagaagaagaagcagcagaagaagagaagaagaatccaatcatggcggctgctgtatcatctgtttgggcaaagcctggtgcttgggctcttgaagccgaggaacacgaagctgagctcaaacaacaaccctctcccaccaaccagaaatcctctgccggagattcctccgatttcccatccttagccgctgcagcgaccaccaaaacgaagaagaagaagggccaaaccatctctcttgctgaattcgctacctacggtactgctaaggcaaagccggctccacagacggagcgtctcactcaggctgagctggtcgctcttccgaccggtccacgtgaacgctcttgctgaggagcttgatagatctaaagcttggaggtggtttccggagccatggtggtggtcgttatggagatgagtcgtccagctcgaggtggggttcgtctagggtttcggaggatggggaaaggagaggcggtggattcaaccgggatagggaacctagcagggattcgggtccgtcgcgtgcggatgaggatgataactgggccgccgccaagaaaccaattagcggaaacggattcgagagaagagagagaggcagcggcggaggattcttcgaatctcagtc

SEQ ID NO: 130134 - DNA, 557 bp, Arabidopsis thaliana
acgtaccgggcccggaatccccgggattttgtacttctgcatcggtgcgttcttcttagccacctgtagtaaccaaagttacattggtgggtagccaaaatattagccgcggggtgtatggcgtggacatacaaatcaactgcaactaaaccgaaccatgtgttttcatgaatggttagattggtttatatatgtaaatccaaagaaaccgaagcttaagccaaacttaaaccaattaatttgagtataaacgaaccacacgaacttaaattaagaaataatttctatgttaaactatctaagaaaaattagatcgaaccatgttcaatatttcttaaaaataattatagctaagtacatagtagctatgcggatatgttcgttacatcaacctgacccaaatctatcatagttatttatgtcttatatttatttgttattcataaaagaacaaaagtaaatttgacagaaactacatcaacctttccaaaaaattatccaaagaaaaccgaattgattatatacaaattatcttatatttagtattaatcttatat

SEQ ID NO: 130135 - DNA, 419 bp, Arabidopsis thaliana
ctttcgtcacgaaagggcgatatgtattgtttctcagtgcgaagctcgttactctgatgcgattcgatcctcaatcctttcatcaaaccgttttgggactgcggattttcatattaagttttcaaagcagtcaattagggtttgtagactaattcggatttggagacggtagcggttatggacgctcctggaatcgcgagtagtttaaatcaagctcccgttactcaggatcttaagaaatgtggagataattctacaggtaacacaatgtttgatgcatctcaatatgccttttttgggaacgatgttgtcgaggaggttgagctgggtggattggaagaagaagatgagattttgtctttcactggaatagcagaagacttttcatttgataaggaagaggttggagattctagact

SEQ ID NO: 130136 - DNA, 723 bp, Arabidopsis thaliana
  unsure (1)..(723): unsure at all n locations
gttgaccatggaagactaaggctttcaccctggacgtattatgaaactgaaaccgagatcagcgtgctggtccaatggcttcatgatgatgatctgaaagaaagagacctgagagagtctattttgtggtggaaaaggttacgatatggagacgttcaaaaggaaaagaaacaagctcagaatttatctgctccggtatttgctacgggtcttgagaccaaggctgccatgtcaatggagaagagatatggtccatgcatcaaactggagatggaaaccttaaaaaaacgggggaagaagacaaaggttgcagagcgagagaaattgtgtagatgcgaatgcttggaatccattttgccatctatgattcactgcctcatatgccataaaacattcgcaagtgatgatgagtttgaggatcacactgagagtaagtgtattccttattcattagcaactgaagaaggcaaggncatctctgattcttcaaaagccaaagaaagtctgaaatccgattatcttaatgtaaagtctagtgccggcaaagatgtagctgaaatatccaatgtttctgaacttgantctgggttgataaggttatcaaggaggaggatctnttttccccataccntttttgaggngntcctttnccaagttntgnccaaagggttcnacanaggtttggttaaaagngtncggtttgtncagttcaaanngcattcc

SEQ ID NO: 130137 - DNA, 403 bp, Arabidopsis thaliana
aatgaacgagactcattgcttctctctttccctccgtttcttactcattaactactccaaaaaccgaacaaaggccttcagaatttgcgagttcatccaatttcaacattgatttgtgaggggaatttctaaaaatggatattggagaaatcattggtgaagtagctccttctgtgagtatcccaacgaagagtgctatatacgtttggggttacaatcaaagcggacaaactggtaggaatgaacaagagaagcttttgcgtatcccaaaacagcttcctcctgagctttttggttgccccgctggtgccaattcgcgttgcctcgatatttcttgtggtcgggaacatacagctgcggttgcatcagatggttctctctttgcttggggtgctaatgaata

SEQ ID NO: 130138 - DNA, 475 bp, Arabidopsis thaliana
aaaaaatctgttgtcatctgcaaattggttttattctatcagttggtgttgtgggggggtggaagatgtgaatcgcctctactagggttcgattccaacataaaattgtacttttggaagatacagagaaagagatgggcaaatctcagattcttctaaacgctgagagctttacttgttcttctttcaatactttcttcactttatggatcttctttactcttcactcctttccatttcaagctcaagctgctccttctggttccttgattaagcacatgtcatcggttctcaagtggactactggatcatcctctaaattatcccaatcagacactaatgttcttcagtttgagaatggttacttggtcgaaactgttgtggaaggaaacgatattggtgttgttccttacaagattcgagtttctgatgatggagaactttatgctgttgatgaacttaatagcaacatcat

SEQ ID NO: 130139 - DNA, 376 bp, Arabidopsis thaliana
ccagatgctagggatggagaatctggttggagtagtcttcaccgagctgtgcattttggccatctcgcggtagctagcgtattgattgactcaggtgcttcttttactctagaagacataaaactgcgaacaccggttgatttggtctcaggtccagtggctcaggttattggcgagcaacatagttcggtggctacagaggttttcagctggggaaatggtgcaaactaccaacttggaactggcaatcaacatgttcagaaggtaccagggagagttgattcactgcatggttgttttattaagttggtctccgctgcaaagtttcatagtgttgccattagtactcatggagaagtctacacgtggggatttt

SEQ ID NO: 130140 - DNA, 451 bp, Arabidopsis thaliana
  unsure (1)..(451): unsure at all n locations
cggacgcgtgggtttgcatttcgaaatctccctgggtccgacattcatgttgtcatcagggtccgtcaactttcataaagatttgtcttcctgtctgcattgttttgttaatctcatcttctacttcactttcagtcaaatccttctcatccatcaaatctattttcgttatatctttttcaaatgacttcttatctttctcttgtttagactcaacctcctcttgatgcagttgcaagtctttcttcaattggacgaccccaacatcatcacttttctcaaccattatattaccaacagaatggtcctgtagattcttttcagcttcactttctgagttcacctctccaattccttcagacctagacccatcgtggactgaatgatcatcgctctggcttaaattgacttgcgatgagcccccctcaatatcagaacttgnacacttctc

SEQ ID NO: 130141 - DNA, 404 bp, Arabidopsis thaliana
gacttcgccaatgcacccgattaaacaaatgcagacaaacctcctcgcggacaattgttttggggggggtagaataaacaggaaaatcttcagcagcctgacacaggatatttaaatctttagcagctacaaaggtatttatagaataaggttgtgagtactaaacctcggcgtgtaccgcagttggaatgggtggaccgactggtggaacagcaggagagacctttggaatggggtccatctagatgccggaggtcgatgtatttggttcaacatcagatccgagagtggtatcctgaatggagtgatgattagtaataaagtcagcaactaacagcaatatcaggtaactgatagctaagaaaattagacaactaacctcggttatttcagattttggggga

SEQ ID NO: 130142 - DNA, 489 bp, Arabidopsis thaliana
  unsure (1)..(489): unsure at all n locations
gccccagatccgggattcgccgcgcatcggcgcccggcaagcggtcatttctcagtttatgaggaccggacctcccgtttttttgctcctgctccaagacctcgaaagatgcctggactggtagctggtgactccagtttcatggatgacggtgaagactctttggcagagctatccaatacctcattccggaagtttaacattctttgcactggtgatcgtgatgggaacatatgcttcagtatatttggaatatttcagataggaaagattaacatacacgagctgtctcttcctgtgcctcatctcgatgagcatgcctcttgcaaactatttaatgcttccatttacaaggttgctctgtcaaaagacctttgccgtctggtagtaatgtgcacaggagagcttaaagattgtgatatcaagccaagagaggaaaaaataaatgttcaagatctggccgggttacatngcctttgcatggacaca

SEQ ID NO: 130143 - DNA, 660 bp, Arabidopsis thaliana
accgcattccggattaccggtcgtcccacgacgacagagactcgtggattttagcggggtttggtgagacttttatggggtttgagatgaaaccagagaaagaggttttggaattgatttctagtaagaatcaatgcaagtctaatcccaattctgtgaagaagaagaacaaaaacaagaataagaagatgatgatgacgtggcgacggaagaagattgattccccggcggatgggatcacggcggtgcggcggttgtttaatacttgcaaggaagtgttctctaatggtggtcctggtgttattccttctgaagataaaatccaacagctacgagagattctcgacgatatgaaaccagaggatgttcggtttaactccgaccatagccgtatttccgaccaaactcccggagtcgaagcttcggtcttcgccaccaataacgtatctgcatctacaccagtgtgatcaattctcgattgggattttctgtttgccaccttctggtgttattcctcttcataaccatccagggatgacagtttttagtaagcttctctttggtacaatgcacatcaagtcatatgattgggtggttgatgctccaatgagagaatcaaaaaccaggctagcgaaattgaaagggattcaacattcaccg

SEQ ID NO: 130144 - DNA, 375 bp, Arabidopsis thaliana
cttcttaaatccattcccagattcacacttttgatttcgtgatacacgggtacattttaggtgaggtggttgggttgggtgagacttttatggggtttgagatgaaaccagagaaagaggttttggaattgatttctagttagaatcaatgcatgtctaatcccaattctgtgaagaagtagaacaaaaacaagaataagaagatgatgatgacgtggcgacggaagaagattgattccccggcggatgggatcacggcggtgcggcggttgtttaatacttgcaaggaagtgttctctaatggtggtcctggtgttattccttctgaagataaaatccaacagctacgagagattcttgacgatatgaaaccag

SEQ ID NO: 130145 - DNA, 473 bp, Arabidopsis thaliana
gtttgaaggaaactaactttattatataagattaatatcacatctttctacaagccaatggcatcaagaagctgtgaatgcttggaaacaggaactagcgaattcgccacaatcgcgccgctagctgccactgcaggaactccgatcccgggaaaggtcgagtcaccgcaacacaaaagctgcggaatgggagtggaatggccaggaaaagtacctttacctgcctctattgcaggcccatatgttcctctattcctccttagaaacctctgatgcgtcaatggtgttccaaccaaactcacctcgcacttttctcttttgaaccctggccctaatgcccgctcaaccgctctccacatcaccttcaccaaacggtaccaggacattttggttaagatttgttttttcgtattcagagaactgaagattacaaaaatgaataggtacctcggaccgttgggatttgagattct

SEQ ID NO: 130146 - DNA, 470 bp, Arabidopsis thaliana
gtcggaatctgatggaggagaagaagaagaatggcgatgatgaattgaactcgaaaccgccggtaatggcgttgaaccatgtgtcaaggctttgtaaagacgtcaaaaagtctctcgagttctacacaaaggtattagggttcgtggagatagagcgtccagcttctttcgacttcgacggtgcgtggcttttcaactacggcgttgggatccacttggtgcaggccaaggaccaagataagttaccttctgacacggaccatttggacccaatggataaccacatctctttccagtgtgaagatatggaagctttggagaagaggctgaaggaggtgaaggtaaagtacatcaagaggacggtgggtgatgagaaagatgcagctatcgaccagctcttcttcaatgaccctgacggctttattggtgaaatctgtaactgcgagaatctcgaacttgtcccgcgccat

SEQ ID NO: 130147 - DNA, 599 bp, Arabidopsis thaliana
  unsure (1)..(599): unsure at all n locations
agagacaggagctggaactactagagtactttctttaagcgacatactatatagatcagaggccaacagtgacagttcacatgatatgtcgagatccgaaagagaagattctnattatnatgaggaattggagttggatattcaaacttcgttgtctgatgatgaaggacgagatacagactcaaagttctatgcgtggcagtctcaacttacgaattcatagagtaggtgatgataaaccgatggaaaatacagttgacaatgcctcctcaggaactgcatcgtcatctcaaaatgatagaacgtcttatcagccagagggagccattgatatgaaacgtagatatgttggccactgtaacgtaggaactgatattaagcaggccagttttcttggtcagagaggtgaatatattgcaagtggaagcgatgaccgttcggtggtttatatgggagaaacagactggaaggcttatgaaagtgctcgttggcgatgaatcagttttgaactgcattcaatgccatccgtttgatagtgttgagcaacgagtggaattgataacacaataaagatatggagcccaaccgcatcagtccca

SEQ ID NO: 130148 - DNA, 493 bp, Arabidopsis thaliana
gattttcagacaaaagtataatcaatcattctgtaacttaaggtttgatattcagacggacgacaatcaattcgcgattggtctcagaagatgcattcttgttctcatactcacttcgcgtctttcaagcttcctcattgcttcgcgcctaagagttttgtggtgtcttcacggagagaattaagagtgttcgcagtggcaactaccgtcgaggaggcgtccggtaacataccagcggctccgatttctctacctctagggtcatggaaacagatagctggtggagttacagctgctaaagggtttaaagctgctggtatgtatgctggattacgagctgcagggaagaaacctgatctcgctcttgtaacatgtgatgtcgaagctgtagctgcaggtgtgtttactactaatgtggttgctgctgctcctgtagtttactgtaaaaaagttcttgagacttcgaaaacggctcgtgcagtgttgatcaatg

SEQ ID NO: 130149 - DNA, 442 bp, Arabidopsis thaliana
ccacccgtccggtccctttcacaagagataaagaggtttatcaaagatacttgggttcaattgattcgcctccgtgaggcattcaaaatccatgagtgccttccttgtcaagacttattcctcaaccaacaaagcatttcttttgtagtggcctaatgggtaatggcaaccattataggtcccccaaatctcacatctctcctttttttcataatcaagaattttataaagaaacaaacacacacagatttatgaaattgatatacttcacttagcaattaattgtggttggatcgggtagtcatggatcccacaattatgacgtggactccacactctctttgatgaaaagtttcaatgaaaagtttgataaatctgaagaatttttgttaattttatatgaatcttgaaaacaggaaccatatccattttctaattgatc

SEQ ID NO: 130150 - DNA, 402 bp, Arabidopsis thaliana
attgtctgaccagtttgaggttaagagggctcagaacaaggctagccgagagaggaaacatgctcgacgagaggagcgtcttgccaagggtcctggaggagacatacctgccgctgcaccacctgcacaaaccgctgaggtacctgcgaaaaagtctaagaagtgagaagcttgctcggtagtgaattctcttataagcagtgattttgaatggtttatgtgatatagctttgtgaaaactctttatttgtcacaaatatgagaacctttgtcagtagttcgtactgtttcaggagacttaactctatcttcaagtgcttttctctctcacagcaacaacaagaacagaaaaacttgtggagcggggtcgacgcacaagtcatagctcaagcattgaaaatt

SEQ ID NO: 130151 - DNA, 611 bp, Arabidopsis thaliana
  unsure (1)..(611): unsure at all n locations
cgccacgcgtccgatttggcaatgaaatcatacaaactaatatttcttanttactcatctccacgcacacacatgatggactcttcttatcctcttctccattcaatctcttattctcttttccttccttcatataccttaaacagcaacgttctctgttcttcttcttctttttcttcctctggttttctttcacaacttccatgttggactcggacacagacacggactcaggtcctgtggttgcaacaaccaaactcgtcactttcctccagcgtgtgcagcacacggcacttcgatcataccctaaaaaacaaacgcctgatcccaaatcctacattgatctatctctcaaacgtccctacagtctctccaccatcgaatcagccttcgatgatctcacgagcgagtcacatgaccagccagtgccagtggagacgcttgaaaagttcgtcaaggaatattttgacggtgcaggggaggatctgctgcaccacgaaccagtagatttcgtctcagatccctccggctttctctccaacgtggagaacgaagaaatcagagaatgggcgcgtgaggtacacggtctttggagaaatctgagctgcaga

SEQ ID NO: 130152 - DNA, 441 bp, Arabidopsis thaliana
gatcaacgttgaatttcaaaactgtttcatcttcatgctcttatgtctcttctcactccgcggggactctctgctcttcaggaaaccaagctcaagacaaaactcctatgactgtgatctgcctccaagccctccttctatgccaatcatcggccatcttcaccttatcctctcttctcttgtccacaagtcttttcaaaaaatctcctccaagtacggacctctcctccatctccgcatcttcaacgtccccatagtcctcgtctcctctgcgtcagtggcctacgattatcttcagggtgcacgatgtaaacgtctcttctcgcggtccccctccattcgaggagtcactcttgttcggatcttccagcttcatcagcgctcccctccctatggagattactggaagttcatgaagaagctaatggtcacaaagctgct

SEQ ID NO: 130153 - DNA, 605 bp, Arabidopsis thaliana
atgttttaggtgcactatagaagagctatgacgtcgcatgcacgcgtacgtaagctcggaattcggctcgagcacacgtttgcgaatctccgacgtccgtttctcctcgccgtagaatcgccgttcattctttcgccgccttcagtcttccctccattgaccctttttttgaagaagagcgattacaagcgcaagtgtgtataatgacttaaagagagctcctgttactccgagtgatagatagtctacaattatatcttactctgagtgaaagcaatggcgtacggtggtccgtccatgaatccaccggctttgagtggagctgttcccgggtctgctaatctgaagcaagtgaaattggagagagaaagcgagctcaggatcgaagtctctgaagagcctctcagactccgtgtggttaacgggaccgctgagatttttggctctgaactgcctcctgaaatatggcgtaccttccctcctcgcatgaaatttgcggttttcacttggtatggagcgacaattgagatggatggtgtcacggaaactgactatacagcagatgagacgccgatggtcagctacattaatgtgcatgccatact

SEQ ID NO: 130154 - DNA, 421 bp, Arabidopsis thaliana
aaaagtttctctctgtactttttcacgtagttaagtttaaccttcctggtgcaatcttcggcaccggtgccgccgtcaacaggtcctcccaaagcgacagaaaaaagctcacggagccagagaagctctacaaaaaaggagaagaagaaactccaagctatgacgtagcacattaatgttcttgctggactacattccagagaaacaagaacaaaagatctcctaagaaatgttccggtagacaaacttgctgaaaagggaggaggaaagaataattattaagttttataagataaattattttaaaaatatttttattttacttttaagaaactcacttaaaaggaattagacaataaaaactgtaaggactcatcaacaactctaaactttaaaattatcaaaatttagtatcaaacaa

SEQ ID NO: 130155 - DNA, 559 bp, Arabidopsis thaliana
aaaaaactaaacggagaagacaaacaaaacaaaggatgccgaagaagaagccggcgaaacattccggcgttgatgacatcaccattccggtatcaccacaaaccggatcttcgattgatacttggtggtggctaacacataaaggaaccacaacttcatttctctgcatctccctcttcgcattactgatccgatctgctgtaacaatgtatccatactccggcgccggaattcctcctaaattcggcgatttcgaagctcagagacattggatggagataaccacaaatcttccagttatcgattggtatagaaatggcacttacaacgatctcacttactggggattagattatcctcctttaactgcttatcaaagttacatccatggaatcttcctccgattcttcaatcctgaatctgttgctcttctaagctctcgtggtcacgaatcttatcttggaaaattgttgatgagatggacagttttatcgtctgatgctttcatattttttccagcttgttctgttttcgtgtggtgtaccataggaatcgaact

SEQ ID NO: 130156 - DNA, 357 bp, Arabidopsis thaliana
agaagacaatggatgacgtaagccgatgagattctgaagatcctctacgacccgagtccgtgggagatcctaacccggtgacccgtttacctggtttcctctcaccaccaagttttgcttctaaaattttctggtagatctgtgtccacaatcatcagaaatcaactttgtgaattgaaggccgatcactcctttgactttgttcttaggcgttcatctctcaaaggtaatcaatctatatcgattacgcaattttcttaacgaaattgattaacttgcaattacctgaacccccaaaatcgtaaattgtagggttctctggtgatttgatatgccttaaagttatgaattttagat

SEQ ID NO: 130157 - DNA, 466 bp, Arabidopsis thaliana
atttaagtggctttgctctgttcttctcgacccttctctcagaaaaacccaaaaaaggaaggatgttcaagttttcaactgtcaaaatcttgtagtagtaatggaaaatcatcaccgaatatccgccacaaaatacgacggcgaagcagtgtcggacgatgtgggccaggggaagctatattctccaaaccacgcgatcaaaatctctccagaatccgacgaaaacgtgggccaagggaacctctactctcctgaccacgcgatcaaaatcgcaacgaaccctgattccgtggattcctcatcagaggaagaagaaggagagaagcagaggaagacgatcatgttggggctgaagaatcttgcggcggttaaggataaagtgttagaaaaactatcggctgcttcggttccatctgagtcgcttgaaaacgctaaacagtttttggaaagagccattaaggatttc

SEQ ID NO: 130158 - DNA, 707 bp, Arabidopsis thaliana
taagatccacattatcaagtattaagtacaccatcttccccatgggtttttcatccggcttatctgatcttgaggtttcggaagtagactcgagagtctttatcacactactaaaggcttcacgaagcaagttgacaaaatcagatggcttgtcacatcgtttcgcactagaatacccgtttaaagaacacttcctatgtagcaacgactgattcagaatcgactcaaacaagatacggggattgtaacacgtacgacagcttgaataaacaaagggacgattgagatgcctgagcacctgaagaacaacactggtttttcccgtagaagcacctccatagatcattattggaagagtagggcaatctagcggccccataagtcgaataaagtcgaaaatctgagagcgtctgcctggaaaattagatagaacagcatcaattgtgattgattcttccccaaatgtgagatcatcaatggttggtgtgtgggatgcaataggttctgagttctcaacagttacagaagctgatgacctagtgcttcttcgagtgactttcgaactctcctctttaggaggcatgttcttaaaacctgcaagtctccgattcccaatcccaacagaactaaacgagaaaagaagataagcaacacagacaaaggacgttgtcgtgctctgtgtgcgtcagtagtggcgattcactgag

SEQ ID NO: 130159 - DNA, 506 bp, Arabidopsis thaliana
  unsure (1)..(506): unsure at all n locations
aggtgcactatnagaagattatgacgtcgcatgcacgcgtacgtaagctcggaattcggctcgagtgcccaattcttcaatttcttcaaccctaattcttctctctttctcagatctaccaaacttgatctccaatggcttcctcagcaccaccagtcctcccaatctccaatccccaaaccgttccatccgccgctccttcctccgtcgaatctcaaccaccgatcgctactccagctttccgcaatttcatcaatcagatcaccgaaaccgttaaaaacggtctctctaagcgtcgtccttgggctgagctcgcggatcgttccgcattatccaaacctgagtcgatctccgacgctgctgttcgtatccgcaagaattactcgtatttcaaggttaattacctcaccgtcgctacagcgatcgtcggattctctctcgtcactcatacctttctctctcgtcttgctcctctggctcctcgcgtcgtggctgtttctgtactt

SEQ ID NO: 130160 - DNA, 437 bp, Arabidopsis thaliana
cccaaatttcagagaaaggagttttacaaattttgctggatttgagatttgcagctgacgtgcgttctgggggtgatactagcaccaatgtggagacaccaaagagcacaataaatagatcggcttacaggcgaaggcaggagcaacagaaaacaaagttagtcaatagaggtcgcattgatggagtgacctcccaactaacccaaaagttggatcccatagactggcttacgtacgagccttatctttgggagaacgtaaagcagtcgtacctacgccatgctgtactctttggtttctttgtgcaacgtaaccgaatgttcacagatactgcgcagagactatcaatttatatagaatcaaatatcatgccatgttccacagtttcccgcttcaaatacctttccataagcgctccaactctgtcatttagaagt

SEQ ID NO: 130161 - DNA, 753 bp, Arabidopsis thaliana
  unsure (1)..(753): unsure at all n locations
tgctacttcattgttcttctttttctgattgatcagaagaagtacaacgaggctaaagcttgttcttcagcaggcattgctcgtctcaagaacgtcaaccgaaggaccattgatgtgatagcatcaagactctacttttaccattctttgagttatgaacaaaccggtgatcttgctgaaattcgcggtactcttcttgcgttgcatcattctgcaacgctaaggcacgatgagctgggtcaggaaacccttctgaacctgttgctacgtaactatttgcattacaacctctatgatcaggcagagaagctaagatcaaaggcacctcgctttgaggctcattcaaaccaacagttttgtaggtaccttttctatctcgggaagattcgtactattcagctcgaatatacggacgcaaaagagagccttcttcaggcggccaggaaagcccctatagcagctttgggcttcaggatccaatgcaataaatgggcaattctggttcgtctactgctgggtgagataccagagcgttctatcttcactcaaaagggtatggagaaggccctcagaccctacttcgagctaacaaatgcgggttaggattgggggccttcgagttgtttaggccagtccaggtggaggtctttgggccaacatttgctncaaggccagaacggancaattttcaatcgttgngnctcccgccacaattgtcatnanggcntggccttgggancataaaggntntnc

SEQ ID NO: 130162 - DNA, 446 bp, Arabidopsis thaliana
cttccctggaatgttaccttttggagaggaacatggaagctatcttgcagatccggctgaagtagagattgtgaatttcaatacatgtcaaggagctgtggaaaaatatcaacatctggaggattttcattgggctgtgagacctttgcttattgctatgggtctattgacagcgatgaagttagggatctgtgtcaggaagaaaataggaaggtcaaaggatgggaaacaacgcgatggctcgactggacaaggtgactgtaagattccggatggtaagggctctgacaaatctaaatggcttgtgttcttttaggtctgctatgagacacagaccttgtctggtccatatattatactgttctagtcataataacgtttcatgtacataatgacgttttttttttttttgctctttaaaattaccaaaaagctttcacgcacca

SEQ ID NO: 130163 - DNA, 765 bp, Arabidopsis thaliana
gtaatacaactatcaaacaacaatcttacaacctcatcaagaagccgatacatataggttcttccaaccggtttttggccggttacagcggaataacacaagagttacaaatcttagaatacacccaaacaaaaatgccccacgatacagtaggagcctataataataatgaaaagtagatagcatctatgagtgtatttatattatatatattctttcatctaaacagcctctcgctctctggatatatcaatgacccgttgattgcggctgcaaccggaatgagccagacgcatatagagcttgataaaccgggcgaattctcactgccaaaataatgctcagcagggttccaagcccacaaacaccggctagaaccaagaatgttactcggaagcaatctggaccaatgcaggtcatcttcccttgcttatcagcctccctggtcatagatgtatcccgcgaggatggccgagaaaatgggggcaccaagcgggtttcccagcagtatgaagttgaagttgattccaaaatgtctaagaccaaatagctcggagatggttgcgatagataagaactgaaaccccatgcatattcctattagagcagtcgcaacgtaaatggtgtggtcgatagccatggcgaagaggaggaatgtgaacaccataactagctgcgcggctcccatccatagtgttcttggaagcgttcttgacctgagagacaaataggagagtcgtatgaaacagctattttccagagaga

SEQ ID NO: 130164 - DNA, 1109 bp, Arabidopsis thaliana
gaatagattgttagggcacaaatctttttggttcttaaaaagaaacagtttgagaaggttcaatggattcgccctctgaaacaagaagttctaggcctcgagggataatatcaataacttcgcgtccattcgatgcatccactatggttatttcgtatccccccttttcttttcgtaaaattttacttattatccctcctgccgtagcattataaactgtattgttacttttgctaccatcaggataaatctgaccccttcccctgtttccacctacatatataggatattttaagaagtgaacatctttattagtagcagggtctggagcaagaataggaaaggttatttcactatatttttgaccaggaacaggacctatcacaagaatattttttttattgggacgataattctgaaaagaaagatttcctatcttttctttcatctcgggtgaaatacgatcggggggggctaattcaaaaccctccggtaaaataagaacagctcccacattcaaagccccttttttaccattagctagaacttgttttagttgcatatcataaggaattttaacaactgcttcaaatacagtatcaggaagtaccgtttgtggaacctcaatatccacgggcttattagctaaatggcaattggcacatacaatacgcccagtcgcctctcgtggattttcataattctgctgggcaaaaatcggatatgcacttgaaatggatgcccaagttattatatatattatgagtgagacagatatggagcgagtaatctcttcccttatccaagaaaaggtatttctagtttgcatggtccaatcatttatcccgaaaatttctacaataaagttagctaggtcgataatatacttccctagccacaattctgctatttacatttactgaaaaaactcccattttttttgttgaaacatccaaggaatccctcatgggtaaaaaaagtaaagtaaatacgactttgatttggttatgatgtataaggtacgaaagattcactgataaatcactacaagtgacggagatacacgatttaaataacgaaaaatccaatatttaaaaattgtatcaaga

SEQ ID NO: 130165 - DNA, 673 bp, Arabidopsis thaliana
ttttcataattctgctgggcaaaaatcggatatgcacttgaaatggatgcccaagttattatatatattatgagtgagacagatatggagcgagtaatctcttcccttatccaagaaaaggtatttctagtttgcatggtccaatcatttaatcccgaaaatttctacaataaagttagctaggtcgataatatacttccctagccacaattctgctatttacatttactgaaaaaaatcaaattttttttgttgaaatatacaaggaatccctcatgggtaaaaaaagtaaagtaaatacgactttgatttggttatgatgtataaggtacgaaagattaaaattggatcagtgaatctttttttagtcgtttattgcatgataaatcactacaagtgacggagatacacgatttaaataacgaaaaatccaatatttaaaaattgtatcaagaattactggaaaggtagaaactagaccagataaaatttgctcataatgagcaaacccaaaatctttgtaaatataaccaatcattagttcccaaccgtgaggcgaatggaatccgatacataaatcagttaataaaagaatcgaaaaagctttaattgtatcacttaaattatataggaattcttgaacccaagaattcagaataaaaagcttttcctt

SEQ ID NO: 130166 - DNA, 421 bp, Arabidopsis thaliana
caagagcccactaaataaaaacaaataattgaattaagtttgcaaaggattatacattatgaagttgttaatgctaagatgcaacttatagcaagaacaaaagaacgatttgcaatagtaaacgccaatttaatggagataagtataaatagttagcaattgatagatagtggaatcatgcctaaacaatttgcctaatcttttcaagtggtgtatagtcttcttgatatgtaagtatatgtttaattataattcgttatcaagaatatttgtctggatatatcaagtgttgtggccttgcgggacaaggacaacaaatgctcgacaatattgtacatatataagtatttatctttttaaccaaaccaaaaaaaatggtattttaggcagtaaagctatgtgaaatgagttatggaggaga

SEQ ID NO: 130167 - DNA, 517 bp, Arabidopsis thaliana
ggccggccgacgcgtacgcttctccctacgaatttacaacaattcctcttcttcttcctccttcccatcttcaacacctatcctatctccgcctccttccaccgctttctccgtcatcgtacctcgtcggagatgtctcagattggttacttcttgtgtctccaccgttcaaagctccgtcgcaacaaacggttcctctccagctcctgctccggccgctgttgtcgttgagcgtgaccagattcgtcttggtcttcctagtaaaggacgtatggctgctgatgcaatcgatcttctcaaggactgtcaactgtttgttaaacaagtcaatcctaggcaatatgttgcacagattccccagttaccaaacactgaagtctgggttcaacggccaaaagatattgccaggaagttactctcaggagatttggatctaggtatcgttggtcttgacacacttagtgaatatggtcaggaaaatgaagatcttatcattgtccatgaagctttcaacttt

SEQ ID NO: 130168 - DNA, 632 bp, Arabidopsis thaliana
  unsure (1)..(632): unsure at all n locations
gccggggtgggnttgtttccccccccgtcaaccagtacccatgccccncangttccntccattggcggggtggttcccgcaaggccaagtgaggaggaggcatgtgaggttccagttaccgccgtcaagtggtgggatgggctcctcagtgagggaagagctaatggatctgatacgggcgaaagagccgggtgttgcatatataatgggccactcgtatgtgaaatcgaggaaatcctcgtcttggttgaagaagatggcgatagacatcggttattctttcttgaggaagaactgcagagggccagccgtagcactcaacattcctcacatcagcctcattgaagttggcatgatttactatgtttaagccactaatatgagtagcattcataattcatggggggaataatgggaacaatctattcaagtttcaagtgtccccaaggcaaaaattgtatacttaaatattcttctggttgggaatgtagtctgcgaaacattatatcttaatcctgaaatgtgtgcttggaagtgtagcggccgcgaattcgatatcaagcttagcgataccgtcgtagtcgagggggnnnnnnnnnnnnnnnnnnnnnnnnnnnnnnnnnnnnnnnnnn

SEQ ID NO: 130169 - DNA, 620 bp, Arabidopsis thaliana
gggagaatggccgttctaagcagccagaagagtctctctaactcaatcctgacggtttcagaggtagaggagattgattatgctgaccccacgatacaaagcagtaaatccatgactctgcagagttcgcgttcagtgtccgaggatgagtacccgcagggccaagctggggaggacgcatgtgaggttccagtttaccgcgtccaagtggttgggatggggcccccagtgagggaagagctaattggatctgattacgggcgaaaagagccgggtgttgccatatataatgggccactcgtatgtgaaatcgaggaaatcctcgtcttggttgaagaagatggcgatagacatcggttattctttcttgaggaagaactgcagagggccagccgtagcactcaacattcctcacatcagcctcattgaagttggcatgatttactatgtttaagccactaatatgagtagcattcataattcatggggggaataatgggaacaatctattcaagtttcaagtgtccccaaggcaaaaattgtatacttaaatattcttctggttgggaatgtagtctgcgaaacattatatcttaatcctgaaatgtgtgcttggaagt

SEQ ID NO: 130170 - DNA, 467 bp, Arabidopsis thaliana
ggatcttggtccgcgtcgtcgtcgctaaactacacatttccattcgccgagtctctatctctccttttgcttcatcggtgtgatctctgagacgaaagaagaagaagatggtggttattgagcagatcaagaggtttgctgtgtttttagcgacgtgtgattcagagttcgtgaagaagacttacggtggttacttcaatgtcttcgtttcaactttcggcgaagaatgtgagcaatgggatctatgtccgagtcatcgacggacaatttcccgacgagaatgatttagacaagtacgacggtttcggtatcagtggtagtccacatgatgctttcggagacgccgattggattgttaagctttgcgaagtttgtcagaaacttgatcacatgaagaagaaagttctcggcatctgcttcggccaccagataattactagagttaaaggtgggaagataggaagagc

SEQ ID NO: 130171 - DNA, 556 bp, Arabidopsis thaliana
  unsure (1)..(556): unsure at all n locations
gcgtttcagagtcaccatgttttacgacgcgtntntctttttcagccgnttttcttctcgctggttacatcagagcttcggaganantatataactcaacgacgtagctgttgcatttnttnttttngcaatnatcttcatcttcatgaccggataaactcttagagaaagattcaaagtgattatctttgtggatccctccattgctatgtggaatttagcttcaaaatcgatcagagaaggttttatatcgaagggagaagaagctgctacaaaaccaagaagagctactttagatagatcaggagatggaagaaagacaacaaaggaagaaaaattggagtgtcccatttgctgggaatcattcaacgttgttgagaatgtaccttatgtcttatggtgtggtcatacaatctgcaagtactgtctcttagggcttcaacgtgccattgtcatcaaatcctctgctttaccattccagcttcccttcttcgttgcttgcccttggtgcaatattctctctttaaggctggtttgcaatggaaccatcagattt

SEQ ID NO: 130172 - DNA, 401 bp, Arabidopsis thaliana
aaaggattaggaagctgcaggaagaagaggaagctcgcaagcaggaagaagctgagaggctcaagaaggtagaagctgaacgcaaagcaaacttggataaagcttttgagaagcaaaggcagagagagatagagctggaagagaaaagtaggcgggaacgagaagagctgttgagaggaactaatgcaccacctgctcgccttgcagagcctactgttactcctgttggaactaccgcaccagcagcagcaccagcagcaggagcaccagcagcaccttatgttccgaagtggaagcgccagactactgaggtctcaggcccatcagcaccaacatcatcagaaactgaccgactggtcaacccggggccgcctcccggagatgaccactggggaagcaac

SEQ ID NO: 130173 - DNA, 561 bp, Arabidopsis thaliana
gagaaacacaccaatatcgcaacagcgctcttaggacagatcaaggagagatctatggacgcgttcactaagaaagaaagcgacatgatgatgaggggcggaatcgacagaaccgaacttatggctgctctgaaaggcaaagggacaaagatggacaagctccggtttgcaatcatgtacctgatctccacagaaaccataaaccaatcggaagttgaagcagtggaggcagcattgaatgaagctgaggctgatacaagtgcgtttcagtatgtaaagaaaatcaaatcgttaaacgcatcttttgcagctacatcagcgaattcagctagcagaagcaacattgtagactgggccgagaagctttacggacagtctataagcgcagtgactgcaggagtcaagaatctgttatctagtgatcaacaattggcagtgactcgaacagtcgaagctttaacagaaggaaaaccaaacccggagatcgattcttaccgcttcctggacccaagagctccaaagtcgtctagcttccgtggtagccatgtaaaaaggaccgtc

SEQ ID NO: 130174 - DNA, 870 bp, Arabidopsis thaliana
ttgaaaaatatattttaagttatcaagttgaaaatatttaattaaagagatctgattataagttagtaaaggcaaaaacgaataaaaatttgaaattggggtagctgttcctaaggggcccgacgaatttttaattgtaattagagtatttttttttattgattggtttatcacattgtgatgttttacatgattaaatggacccattctaaaacaattagatgatgataaaattaacaaagattgggactccttatttcgatttaagaacatgcgaatagttccgtgattttgtctaagtgattgttgaagaatgccagacttgggcgaaatcgaataaaacggattcatgtgatctgcagagatcaatcccgaatctggcgaattattcctttttcttatatatgaaatatgggatttcactaagccaattcttatgaaatcttgaatcaaaccctttgtacttacttcaacaaagaaagcacggacctcctcgagagaagaatttttgtcccaattcaagactaaacaagttcgaactaattgaatacttgtgtcagaaattcctcgagttggtttgccatttccataaaggatatagttgaaaactcgaagttgaatattatccttttcccgaaagagatcttgtgggaagagtgttgccaaatttatactgtccgctatctcataggtggctacgggccgcaccaaaacaaaaaactttttcttggttggtgtaatccgttggacataaatccaatttttaaattttttggattccttcgagtttgtttttcctcttcctggcggtatcaagatgccactgtgtcgggatattttatctgtcttgtccggaaaatggatatcccc

SEQ ID NO: 130175 - DNA, 870 bp, Arabidopsis thaliana
atttggtacaatgtttgctctcttctgcctctggtttggcatctcagtcccactagtctgcgatgggagcgtatctgggttacaagaagccaccaattgaagatccagtcaaaacaaacaagatccccaggcaagtaccagagcagccgtggtacatgaaaccagttttctctatactaattggaggcatcctcccgtttggagcagtcttcatcgagctcttcttcatctcgacatctatatggctgaaccagttctactacatcttcggggtcccctttatagttctcttgatcttgatcgtcacctgtgcagagatcacagtggtgctctgctacttccagctttgtagcgaagactacaactggtggtggagagcttacttaactgcgggctcatccgctttctaccctctccctctaccccaatcttctccttcttcaccaaagctggagatccacaaagcttagtccccgggaattgctctacttcgggtaccatgatttatcatcctcttacgcattcttcgtccctaactggcacaaatcggtttctatgcttgcttctggttcgtgagaaagatctactcctcagtgaagattgactagaacccaactgatagagatgccaacttttgtcttttaaggttttgtatgtttgggtgattgtatggtacgtagctgtaacaaagtaaaagaaatcaactttaatttgtaccgtttctcttcaacacctgcatatccacagatgttggctgaattaatattacatgcctttttctgatgttcaaaaaaaaaaaaaaagggcggccgctctagaggatccaagcttacgtacgcgtgcatgcgacgtcatagctcgtctatggtg

SEQ ID NO: 130176 - DNA, 414 bp, Arabidopsis thaliana
gaagaagtgactgtgaactccggtgagtcaagagaagagagagaaataaatcgaaaactgcagatgtcggtgtttccgtttggtcaatccatctccggtggaggttttcctcccgctaccgagtcctcgccagctttctccttcaatcaatcctcaaaccctagctcctccgtcgcatttagcttcgaatcgacttctcctacttcctccgcaactccatcatttggattcggaaccgttccttcgtctccatcgaccgctccttctacatccctccttttcggatcctcaccgtccatctttggagccaccggttcgtcaccatccagtcttccatcttctgcttcaaccactactcatgctactagttctgttagtacaacacaaccatctcttggtgtcgcttcgagtagt

SEQ ID NO: 130177 - DNA, 679 bp, Arabidopsis thaliana
  unsure (1)..(679): unsure at all n locations
aacaaaatgggtctctagatttcagatttctgggatctgggtgttagattaatctctttctcttccattattagtagagaaagctcactcctttcactcaaagtttctacctttctgttgtcctgaaaatgggttgcgtttgaaatctcacactttgagatttgggtgtttattttgggatccttcttaccacatttcgaaagtttcagctagggttttcgatttctctacttctcagaggagattttagaggcaaaagatggctccaaggttggatttttcagattggtgggcgaaagacacgaggaaaggaacaccagttgtggtgaaaatggagaatcctaattactctgtagttgaaatcgacggtccagattcggcttttagaccagtggagaagagcagaggcaagaacgctaagcaagtcacttgngttttgcttctcaaagctcatagagctgttggatgtctcacttggctcgccactgtcttttggtctctccttggtgccatcaagaaacggcttagtttcactcacccacttggctctgagaaattaggcagagacagatggcttttcactgccattaagctcttcttagctgtttccttagtgattctcggctttgagattgttgcttattttagaggatggcattactttcaaagccctagtctt

SEQ ID NO: 130178 - DNA, 409 bp, Arabidopsis thaliana
ataaaaagagcataaagaatcgaaagtatggtagagtaaatgtggatgatgatgatagctttgggattccctctcttgttataaaatataaaactttgataaatatgcatgattatatatgatgatggtacttgctttcgtttcgtctattggggtcttaattaaatgcttaattaggatttaattaaaaatatctggcactatagctagggctcaaccttgaataattacttcttttagtttaataacttaaaccaattcactaatcaattggttttgtactataaattaattattgtagattgcagtctactcccacctaggacggaatcaaatggattgttcatattcataaatgtaaaatgacagaaacacaagtggtcggtctaaattataaatattacttacc

SEQ ID NO: 130179 - DNA, 732 bp, Arabidopsis thaliana
  unsure (1)..(732): unsure at all n locations
gaaaaatctgtaattgatttacctaattgtaaacctgatattgcaccttaagacacgcattgaaacagacagataaatattaagcgtactagaaaaggtaatttactcttttttttagcaatacatacaaattgacgtttcaaccaatagtttctcaaagttcataatcataaatcatttgtcaaaccaagtaaaaataaatcagagaaaaaaaacggtttttgttagtcaacgaaaaatgaaccttccatatgataatttctttttcgttctcatagaaattttctatgtaaagcagagagaaagacgaggaaaattgggtaacataaaaactctttgatgacaaagacagtattttaattcggattttacctaataaatccatagcgaagaacggtagctcatgttcctattttatggtgtgcaccatcaatgatgatataattgtctctcgctctatacataaatcttagatcctttaacgcctccagaatcgaccttgtccctgttgtccttgctttcgcttttgatactctatggacctgtcaatgaactcttttggcaatatcttttcccccaaaagaggccagaaccgggnctgatgcctnctgncctggtncgngnaaatatcaagggaggggaccaggcaacnagggtgngcaccaggtccaagttgaanggtngtgnccgaattnctggtaagggtngccaaggnttcggaaaaaaanccnt

SEQ ID NO: 130180 - DNA, 659 bp, Arabidopsis thaliana
gatgacaaagacagtattttaattcggattttacctaataaatccatagcgaagaacggtagctcatgtccctattttatggggggccccatcaatgatgatataattggctcctcgctctatacataaaatcttagatcctttaacgcctccagaatcgaccttgtcccagttgtccttgctttcgcttttgatactctatggacctgtcaatgaactctttggcaatatcttttctctcaaaagaggccagaaccggtctgatgtctgctggactgttacgtgcaacatattcaaggaagggtatcaggtcaactagggctgtgtcatcagcttctagtttgtaaggcttgattggcacgctattttctggctgaagggttgattcaaaggcatttgcgctaacaaacagaatcttcttcggatctctgttcagctttgacagatccctatagtgctttccattttcatatttagtagcgcctcttgctagcttataacgtatgtagccatttgggtctaatttctcacagaccgggagtacatacatctccatctggtcagaatacacgacaatctcatagaatttcccaagatgctccaagaatgcatcgacacctggtcttttgaatgtcctccaccctctttcccgcttccag

SEQ ID NO: 130181 - DNA, 427 bp, Arabidopsis thaliana
ctcgcattcttggactaactcagattctaccaataacttcgaaagagtggtttcggattttgtcatagtgatatgagccaaagcttttgctcttgcttttgtaaatggaccctctgttatctcagtaatgattgaattgcaaagaagtgctcaagcttaaagaacaaagagatttaaagcaagcttcctcttaacccaagtctctcttagaggctaattgttggaagttgtgttttcattagcataaaaatcctttatataagccatgaaatcttaaaaataaaaaggaaaaacatcaaaacccaattatcatatcacacagattgtactattgtggtattgcttgcacataactctatatataactagattatgaacatcttaaaatgtgagatttttctctatttttatcactttctttacaaaa

SEQ ID NO: 130182 - DNA, 744 bp, Arabidopsis thaliana
ccccccctcgaggtcgacggtatcgataagcttgatatcgaaccgaatcgtttttagcctccaagagagagagagagagagagatctgcatatagagaatgatagaaccgtcgatggagagagagaatggtgctttaacggcggcgacaacaacgacgacggcggtgacttctcctcctccgatggcttcttcaccgcgtcaagctttagttgagagattgaaagattatggacaagaagatattttctctctttgggatgaactttcaccagacgagaaagattttctcgttagagatattgagaatttggatcttccaagaatagatcggatcattagatgttcacttcactctcaaggtttaccggttgcggcgattgaaccggtaccggagaattgggtttcgacagtagatggtagaacaatggaagatagagagaaatggtggaaaatgggattaaaaactatctatgaaggcaaattaggtgttgtgcttttatctggtggacagggaacaaggcttggaagctcagatccaaaaggatgtttcaatatcggattaccatcagggaaatcgctctttcagattcaggcagagagaatcttgtgtgttcaaagacttgctgctcaagtagtgagtgaaggtccaattcgtccagttacaatacattggtatattatgactagtccatttactgatgaagcgacacgaaaatatttctcgagtcacaagtactttggtc

SEQ ID NO: 130183 - DNA, 568 bp, Arabidopsis thaliana
  unsure (1)..(568): unsure at all n locations
ctccctccaggtctactatctttctatggtctcacagagccactggacagaagatggcatgtcttgggtttaggttacgatgtgaacatcgataaccgtctgatcgaaacagcagctgtgattcactataatggtaacatgaagccttggctaaagctggctattggtaggtataaacctttctggttaaagtttttgaactcgagccatccttatttacaagattgtgtcacagcttaaagcaaaagacgttgagagttgaggctaatcaatatcagaagattcttgatttcttatacactttgaagattcttttttttttggaatattgtagatcaaattcagatttccttctgaagactgttttttgttttttttgggtcggaagagaaaacttataatcacacacacattagaggttgaatatattacttacagggataatttggtgaaaaaaggttctacgttttttnnnnnnnnnnnnnnnnnnnnnnnnnnnnnnnnnnnnnnnnnnnnnnnnnnnnnnnnnnnnnnnnnnnnnnnnnnnnnnnntagctggcagtatcat

SEQ ID NO: 130184 - DNA, 341 bp, Arabidopsis thaliana
gtaatttgaaaaatgaacaattctttttgtaaggaaaacttttatatagtagacgtttactatatagaaactagttgaactaacttcgtgcaattgcataataatggtgtgaaatagagggtgcaaaactcaataaacatttcgacgtaccaagagttcgaaacaataagcaaaatagatttttttgcttcagactaatttgtacaatgaatggttaataaaccattgaagcttttattaattcaaatcatgggatgggaggaaaaagcaatcgaagtgcagagataaaggataagatgaaagctagtccaatgaaagttggagcaaatggacaaaagaat

SEQ ID NO: 130185 - DNA, 799 bp, Arabidopsis thaliana
catcacgtcgcatgcacgcgtacgtaagcttggatcctctagagcggccgccctttttttttttttttttttccagaaaacacaatactttcgtcattgttttaataatttacacaaaccaagcatcattccaacaattcccattgcatccatcataaacgcaagaacaaatcttttccttttgtgccctaaatttagaatccagattccaatttccaacctcatttcttagccttagagaatctaagacaccgatatttctcaccactcacagtaatttccagagcaccatcttgattatcctgattcgacgcagtccccataagaacactcttctccttctccagattctctctctccatcttcaacctcgcttcctgtctagcgatctccgtctcacggcgagagagctcaactttccaggcagcttctcgctcagcgacttcacgctcacgctcttctatataactctgcatctctctctccttcatgatccgatcttgtatatcagcgtcaagtgcttgcttaagctcctccacaaacttatccaccactaatttaattctcagcgacatcgtcttcgaagcaaattctaactatatacaaaatctcctccttcctcacactaaacgctgctacacataaatacaatctcctccttcttctggttttccgtcttttacttacggcggcgctttaccgacggcgagattccgatcttttctcgttgaagcttgcgtgagaactgaggaagaaagggacagagacattcacgaccttttgttttttttccgctttc

SEQ ID NO: 130186 - DNA, 687 bp, Arabidopsis thaliana
  unsure (1)..(687): unsure at all n locations
cacacataccgtgatctaaaaacctgaatttcaacatgtcacacagcaatcaacagaagtttgaatagagcaagaaagcaccttgaggcttgaagtgatcagacaaactctctttccagaaaacacaatagctttcttcattgaattaataatttacacaaaccaagcatcattccaacaattcccattgcatccatcataaacgcaagaacaaatcttttccttttgtgccctaaatttagaatccagattccaatttccaacctcatttcttagccttagagaatctaagacaccgatatttctcaccactcacagtaatttccagagcaccatcttgattatcctgattcgacgcagtccccataagaacactcttctccttctccagattctctctctccatcttcaacctcgcttcctgtctagcgatctccgtctcacggcgacacagctcaactttccaggcagcttctcgctcagcgacttcacgctcacgctcttctatataactctgcatctctctctccttcatgatccgatcttgtatatcagcgtcaagtgcttgcttaagctcctccccttctgtcgtcttctcgagccgtacgcacgcgtggnnnnnnnnnnnnnnnnnnnnnnnnnnnnnnnnnnnnnnnnnnnnnnnnnnnnnnnnnnnnnnnnnnnnnn

SEQ ID NO: 130187 - DNA, 356 bp, Arabidopsis thaliana
gtggggtcagtttgggataacgtcaaacatatagattctaaagaaaagatagggtgtagaattcttagaaacagaaaaataaaataaaagttctaataggatacattgtatagtagtgaatgtaattagataagtttatctaaaaacttgagaacatacgaaaatgtattgatttttttttttttgggacaaacgcgaaaatgtattgatttgattgtaattataggaacatttacgaaactaaaatatcatgaattttttttgtcatcattcaattgcaagtgacgaaaaataaataaaaatttcaagtatgaaattttcatggatgcgggatagtagattttaattttttattt

SEQ ID NO: 130188 - DNA, 488 bp, Arabidopsis thaliana
ggcccaccaccactgggagcaaaaggttcaaatgcaccaccaccacctcctcctgcaggaagggggagagcttccttgggacttggaagaggccgaggtgtgagtgttcctactgctgcacctaagaaaaccgcgttaaaacctttgcattggtctaaagttactcgggcagcaaaaggtagtttgtgggctgatactcagaaacaggaaaatcaaccacgggccccagaaatagatatatcagagctcgagagtcttttttctgcagtttcagataccacagctaagaagagcacaggtcgccggggttctagtatcagcaaacctgagaaagttcaattggttgacctgcgaagagcagataactgtgaaataatgctcacgaaaataaagattcctttgccagatatgcttagtgcagtgctagccttggattcattagctctggacattgaccaggttgaaaatctcatcaaattttgtccgac

SEQ ID NO: 130189 - DNA, 405 bp, Arabidopsis thaliana
gttcaaatactattaaaatttgacaatttcggtttttggactacaaggatttaaagctcatatttggagttgtaattacaggtgagtatgagatgggcttatgaacaaggagtgagcatggtagtgaagagctttaccaaagagagattagaagagaatctcaagatatttgattggtctttgacagaggatgagacacagagaatttcaactgagattcctcagttcagaaacgtccacggagaggtttatacctctaagaaaggtcccataaaatctgtcgccgagatgtgggacggggagatctgatcactttgtgtgaaaatagcctagtgaaaacggcacaattatcattcgtcacaatgattttcctgtcattctctctaataatgaataatgaataat

SEQ ID NO: 130190 - DNA, 404 bp, Arabidopsis thaliana
cggcaagacaggaagcagaaaggtacccaaccaacgacgtaaaaccttaatcaatatgaatttcaatagagttacttcttaaccaataattaatttctcagttctctatatgaatcatgatggtttacgccttacggtttatgtgcagttctcccggttatcgtggatgtcattgtaaaccttccggatgaaacggaggctattttgaaggtctgtgtgtgttttattttctagcatcattttcgaatttatgtaaaattttcatatttcttgcgtgtttacaactgttttttttttggtaccgatattttctctgaattttgttatatcccttttatgcaattaactaatttatataacattagtttcagtattgaacttatagcatattgatgaaagtttat

SEQ ID NO: 130191 - DNA, 395 bp, Arabidopsis thaliana
ctatttctctttctctttctactatttctctcctgtggagaaactcaggagatagagagagagagagagaagagaagagagcatgtatgtttggttttataatctctctactcataccaaagatttgtctcagacccaccacttggacagagagaacccaagctcctttctctctttttctcgatctactccttcttaatctccttttttgaaacttgaagccactttcaacatcatccttaaacttttgttcccttattcacaatctcctgccacctctcatttctctagctacatatatgggttctattagaggaaacattgaagagcctatatctcagtcattaacgaggcagaactctctctatagcttaaagctccatgaggttcaaacc

SEQ ID NO: 130192 - DNA, 660 bp, Arabidopsis thaliana
  unsure (1)..(660): unsure at all n locations
aagtccaggatccgttatagaactaatacctataattataaaacccatatgagatacagaagaataggctattctcttttttaaattacgttgaccgggagatgttgaagctgcataaattatttggattgtaccgactaccaacaaccaaggagaaaacatagaatgagcgtggggtaataattccatattgattcgaaccaacccataggctcccatttttaataagattccagcgagaagcatacaggtactgtaatgtgcctcaccgtgggtgtcaggtaaccaagtatgtaaaggtataatcggtgatttgacggcaaaagcaataagaaatccaatataaaatagtatttcaagtgtaacaggataggatttattagctaagagttctaaatttaatgttggttcgttcgaaccatataaacttatacctaaaactcctattaactaaaacaaatagaatcttcctgccgctgtacanaaataaattattgtagccgaatacagacgttnntcttttccaccccacactcgccataaaacgtagaataaacggccacattcaattctaattccnncacatgatgaaaaaaaaaagtagaagactcccgagaagnnaaaataatcccctattcggacngcgtgggtcgcacccgg

SEQ ID NO: 130193 - DNA, 517 bp, Arabidopsis thaliana
ggtgatttgacggcaaaagtcattatgattcccaatataaaatagtatttcaagggtgtctggaggggatttattagctgccagttctaaatttaatgttggttcgttcggcccatataaacttatacctgccactcctattaataaaaaaatagaacttcctgccgtgctctacacaaattttgtagccgaagacagacgtttctttccaccccacatggatgaaagtagataaacgggaagtaattctaattcccacatgatgttggaaagtagaagatcccgagaagaaaatgatcctatttgaccgctgtacattgctaacatcaggaaatgaaaaaatcgggaatcccgagtaactggaaaagccgctaaagtggctaaagtagtaataaaatcccgtcagtaaaatagttcctatagaaagtccatctattcccattctccagtaaaaatcaaaaaaatcgatccatttataatcttcggacagttgaattaatggatcgtccattttaaa

SEQ ID NO: 130194 - DNA, 402 bp, Arabidopsis thaliana
agttaagagatccagccatggataagagctccctcgtctctgatttcctctcctttctcaatgcttctcccaccgcttttcatgccgtcgacgagtcaaagagaccgcttttgaaggctgggtatgaacagatttcagagagagatgattggaaactcgaagccggcaaaaaatacttcttcaccagagattactccactattgttgcctttgccattggtcacaaatacgtagctggaaacgggttccatattattggagctcatactgatagtccgtgcctcaaattgaaacctgtatccaagataactaaaggtggatgcttggaggttggtgttcaaacatatggaggtggactgtggtacacctggtttgatcgtgacttgacttgtgcaagacgtg

SEQ ID NO: 130195 - DNA, 751 bp, Arabidopsis thaliana
  unsure (1)..(751): unsure at all n locations
ttttgccccccaaaagnaaaaaaaanccaggatnnccctttccngggnnnaaaacccnagaatttnggnnccnncccggatgaacgggggcccggtctttaaaanccggggagcttttganacccttttattgncccaattcaaanaannaacatcctcaanccaaaaatgccttcaccgtaaaagcccttttgataacaaagagcaaccttctttgggaagcctctgcgcttgcccttcatgcaaaaggattcaatcccattaaggaaacccatctgcgcaggagctcctgcttcttcttgcatcatcatcaaggccaagagatatttcttcttcttgatcacctcttttgcgaatcccttgcctgtgcctccaaagagggcagagaataaggcgtccattttctcctgggggtttgctgagtttgaagctagggctgttttgagttgggtaggagatgaaccactgctcagaagctcctttatctcattcacaagcttttcatgagcattttcagggatcttgctattgccattctcatgcacttgttctggtgccttcttcacctcagctactggctttttttcttcaactgtagacagcatcaccatttcagctgttaccgcgctgagctgttctttcatacgtttctcagcagcctccctggaagtatctgtttgccactggacatcgtcatcatcttcttcactgtctgcttggtcattttcatcagacaggcttcgaggtggag

SEQ ID NO: 130196 - DNA, 692 bp, Arabidopsis thaliana
cgggactttgcaatatttgattgatcacaattcggtaaattccgtttactataggagttccaagggaattcattaaaggaatgtttccaataaaaattctttgttcttgcatattcctactggttttccaaattaatcccgcggatacatataattcagaagaatatgtaagtgattcatagacagcatctcgttcttttatcagaggttctaccaattgatatgtttccacaaataattgaaattcaatttcgtgatctatatcttcaatttttggaaacttagcaagttcttctattaaaccctgatcaataaaccgataaaacccttcaaattgtatctgattaaatccgggtattgcagatgttccctctttttcatccccaagcatcttttttgaatttcccatttatccgtttattgaaaaaatcccatcccatttctcattcttcaccgaatcatatccatagaattcgatctagcaataatggaatttctattctgtttactgaatcacatgaaattttatccaactccaagatatatggaatgtattaaatacgtatgaagggagactatattcaattggaattttttataagaaatagatccaaatggaacagaattgagaaataccgctggaacttacggagttttgtaaagactagaaaaaaaagtaatttcattttcac

SEQ ID NO: 130197 - DNA, 694 bp, Arabidopsis thaliana
  unsure (1)..(694): unsure at all n locations
gtaagcctcaaaagattctgcaaacagagaggaacaatcgccacgaaagaagcttaagagactttttggtttcatttgtttagtgggcaaccaaaaagtcaagaccttttgctttccagttcgaagaatctggcgtgttcaggtggattgattcttgcgatctgacccttctcatgattagtttccgatcttcgaatagaccaactgcgagattctcatctataactccgntttcctattcgatttcttatctctttctaccatccaacgtgttcttcatacattacttcaattgctctcgatttcgcctcaaaatctgatcctctagtagcttgaagcaacccaaagtctcgtcctttacgttcaattaggtcattttgaaaccctgttcttagaattaggaagggaagaaatggctgatcgaaactgtttgatttcgttcgaggatcttccttctcatttgatcttggaggtgttgacctctgggaggcttagtgcggttgatctacttagcttggaattgacttctaaggttttcggagggagccatggattctatcctttgaaattcaggtccattagctgattatgcggcggctcagctttgccctatgcaccctgtctacgtgggaatgggtttgactacacagaaagagctctttgccaattgtgagggaaactggaagcggctttt

SEQ ID NO: 130198 - DNA, 408 bp, Arabidopsis thaliana
  unsure (1)..(408): unsure at all n locations
atctcgcagaaaagattcatcccatctttaacccttgttgctttacagtgaccattaatgagtgtattaaacgttgagcagctcttggatacctttctcgcctgagctagtttgttctgcttgcagagtccatggatcattgagttataggttatagtatcggggactagacctctacggatcatctctgcatataatttttcagccctacctaacgagctgaatctgatcatcatattgtaagtttgaacatcaggttgcaatccactgatgaggagattagtgaatatattccctgcttcgtcaaacttaccagccttgcacagtccatggatgatgatgttataaccagctgtatccatatccatgttactctcccgcatgaccttaaacatnttcaaagccttt

SEQ ID NO: 130199 - DNA, 548 bp, Arabidopsis thaliana
gtttgattagatatacccgttttactgttttctttgtccgagtgaaagtctgaagctttatatcttatgatgcttatggagagctctttgttctgttgtgtgctctattcctgataaaaccatgtgatgcttgctggttgatagcttcaattgattgggcctttccgttaattcgggatgttagcaactagcacagtaattgcaggtgaaggtggtgtcatggagttgatgttaatgagtgctttgccaagtcacttcttcaagataagagaacttctatcctttgttgaatcaggctctgggtgttattttcttcattttcttggcatggttgatattagtacaagaacacgctgaatctgacagacatattttcatggctagctagcttctcgccgctcatcatgtgtgcccaagttacactttatgaatcattctcaaagaaaaaaccgaacttgctgtcttgtatcttaagaggccgtagaagttagtatcttatgtgttgataagctgaatacttatgagtcatatatctatatattaatgcc

SEQ ID NO: 130200 - DNA, 725 bp, Arabidopsis thaliana
tagataaaaccgccatggccaccggtttaggcttctttaagctctccttcctccttagcctcctctccggtggatcagacctattaggtcccgatgccgaatccggagtcgcccaaattgggaagttcccgccgtcgtgtaacagaatcgaatgcccgagctacgagctggttcactccggaaatggatacgaaattcgccggtacaacaacaccgtctgggtttccactgaaccgattccagatatctctctcgttgatgctaccagaaccgctttcttccaattgtttgcatacattcaggggaagaacgagtatcatcagaagatagaaatgactgctccggttatctctcaagtctcaccaagcgacggtccattctgtgaatcttccttcactgtatcattctacgttcctaaaaagaaccagcctgatccagctccgtcggagaatctccacattcagaaatggaactctaggtacgtggccgtgagacaattcagtggattcgtgtctgatgatagcataggagaacaagcggcggcgctagactcgagcctcaaaggtacggcttgggctaatgcaatagcgaaaagcaaagaagacggtggtgttgggtcggattcagcttacacggtcgctcagtataactcacccttcgagttctccggtcgggtcaatgagatttggttaccgttcgagctcgatgtttaagctctgcttagt

SEQ ID NO: 130201 - DNA, 514 bp, Arabidopsis thaliana
catcagtcatcactacgaatggatcttacgtttgatcatagttttgtgaaggttaatggaatcactatgcacgtcgccgagaaaagcccctccgtcgccgggaacggagctatccgacctccggtgatactattcctccacggatttccagaactttggtacacgtggcggcatcagatggtggcactatcttcgttaggttaccggactatagcgccggaccttcgtggttacggagacaccgacgcgccggagagtgtggacgcgtacacaagtctccacgtggttggagatctgattggattgatcgacgccgtggttggagatcgggaaaaggtgttcgtagtgggacatgattggggcgctattatcgcttggcatctttgtctttttcgaccggattgggtttaagctttggttaacatgagtgtggtgtttgatccttggaattctaaacggaaaccaaccttgacgtttaaaggctttttatggagatgactactacatctgcaga

SEQ ID NO: 130202 - DNA, 1330 bp, Arabidopsis thaliana
ggagtccaaaagaggagaagaaggaagcttgttctttgaggagattcaaaggatcgtgttgctttctgtatttaaaaaccctagagttcatcatcatcttcctctcattattgattgctctaatcaggttccgacgagactaataatcctttctcagatcgataacaatgtctcactctgctgtttctcaggctggtgctgtctcagtttcaattgaaaaccaacgttctcttagaagatccgtcttcaagcagaacaatagcataagcttcaacagcaagtcatggtcatcttctttagcattgaaccagaagacaacaagcataagagatgggaaacggtacccgagcacgacaatatgtatgtcggttcaacaaacaagtagttccaaggttactgtctctcctatagagttggaagaccctaaggatcctcctttgaacttgtacaaacccaaggagtcttacaccgctaagattgtctctgtggagcgagtagttggcccgaaagcccctggagaaacttgtcatatcgtcatcgatcatgatggtaaccttccttactgggaaggacagagttacggtgtgattcctccaggtgagaacccgaagaaaccgggagcgccacacaatgtgcgcctttactcaattgcatcaacaaggtacggagatttctttgacggtaaaacagcgagtttgtgtgtacgtagagctgtttattacgaccctgagactggaaaagaagatccttcaaagaacggagtctgcagcaacttcctatgtgattcaaagcccggtgacaagattcaaatcaccggtccatctgggaaggtaatgctattacccgagagtgatccaaacgcgacacacataatgatagccacgggaacaggagtggctccatacagaggctacttacgtcgaatgttcatggaaaacgtcccaaacaagacatttagcggcttagcttggctcttcttaggcgtggccaacaccgatagccttctctatgacgaagagtttaccaagtacctaaaagaccatccagacaactttaggttcgacaaggcattgagcagagaggagaagaacaagaaaggtggaaagatgtacgtgcaggacaagattgaagattatagtgatgagatcttcaagctttttggacaattggagctcatatttactttctgtgggccttaaagggatgattgcctgggattccagggacccctttgagagttgcagaagagagaggtgagagctgggacttgaagctttctcagctcaggaagaacaagcagtggcacgttgaagtctattgagctctttat

SEQ ID NO: 130203 - DNA, 440 bp, Arabidopsis thaliana
aaaattggttatctataataatcatacatcaaaaattactgtgtttcataatctaatgtttagtacaattcaataaatttggttagaattgagaaatggtgatgcatatctctagttatttagaaaatttatattcggagcgaaatcgagctagattgtgaacagtataactagacctcataactagaataaatagataatgttgaaatatactttgaaacgaattagatgtgaaatgaaatgttccattgaagactttttattataagctacaaacttcacgtgaataatcttcaacatgtcagtcagacacacatgagacaacacaaaagtaccaccaaattcgtaattactccatggaagatggaacaaattcttcctttcatacatacacacaacatagggtacatagccaaagttactcatcatttattcttttt

SEQ ID NO: 130204 - DNA, 529 bp, Arabidopsis thaliana
gaacaacacgcgccagatcctttagttgtaaatccccatttttattttcttaaacccaaagaaagaaaaaaaaagaagagaaacggccgaatcttcataaattccgccatctgttaagctcaatcgccgcctaaactccggcgactctctcgaagatatttggtgattgaggtgactcggaagagagtgagagagagagatggatgatagaggaggatcgttcgtagcagtgagaaggatttcacaaggtctagaacgaggaagtgtttatcattcttcttctgctgaggttgtagctggatcggcagcgtggttaggccgtggcctttcctgtgtttgtgttcagggtagagacggtgaccctcgtccttcatttgatctaacgcctgctcaggaggaatgcctgcagaggttgcaaagccgcattgatgttgcctatgacagctcaatacctcagcatcaggaagctctaaaggatctttggaaacttgcatttcctgaagaagagctacacggaattgtatctgat

SEQ ID NO: 130205 - DNA, 507 bp, Arabidopsis thaliana
  unsure (1)..(507): unsure at all n locations
cggaaagagtctgttgaatcaaccaagaaagagagaaaacggaagaagcctaaacacgacgaagaagaagtcccgaatgagactgagaaacccgagaagaagaagaaaaagaagagagagggaaagtctaaaaagaaagaaactgagacggaattttcaggagctgagctatatgttacatttggtcctggttcaagtttgcctaaaaaggaagatctgattgaaatatatgaaaaatttggagctttggacaaagagagaactgatacggtcgacaacaacttctctgcccatgtggctttcttggatgtagctgatggagaaaaagcctttgaatcctcactagagaaatgtccgtttacttctaattcgacggtgaaattcagactcaagtatccaaatgagagaacagaggagaagaaaactgaagctgaagttgcagagacgacaatggaggtggaatatctgaagaaaaagctggatgagatgaaattgtactngatggat

SEQ ID NO: 130206 - DNA, 420 bp, Arabidopsis thaliana
atttttcataagcataatcactcaaccaaatactgatattctaatttctaagttaatctgtttccaaagaattttatattcgtctcccaccaagtatagcatttgcttttattttctgtgagagaaaaatacccttaaacacccctaaaccggcacctttattatcagattactttgcacaactttagtttcccgttcgaactataactccaacccagaatggcaaccgtccaaaagttacccaaaaaaggttataaaagatttcatttcctaatatatggtctagggagaaagaaacaattagataccaaagagggctcgtaaggagaaaaacaaaacgtgtgttagcacagcatggaaattgtctgacctttttaatattttgcagtaaactattagttccattgctctgcatcatat

SEQ ID NO: 130207 - DNA, 407 bp, Arabidopsis thaliana
gttagtaccagtttataattgaaaatcagccaataatgtaaaagaaaagcatctcaaacagaggagaagaagacaaggctataaaaaaagagaccaagttgtgggactttggagctaaaatgggtcatcgaaagatagcaacttgtattgattcgtgggtccagtgacagtgtaaattgaaggaaggttcgtagtagcccaccacagcttaaaataatttttttaaaagattgtgcacttaatggttatggtacatccctctcacgtcctactcaactacacacacttgtcacgtgacagtgtcacggtgacactctgtaatctgtacaattaagtagactgacgcgtgtggctttcaagcgtaagtaaaagtatctcttctggggccaacccaaatcctgctacaa

SEQ ID NO: 130208 - DNA, 369 bp, Arabidopsis thaliana
atctctacaacttcaagatttttggttccacattgatatcttggtccctgaagctgtcaaagtgggcacctggtccgcttggtcctgagctcagatggatctgcatccaccaggtggttcaaaaaagacatctgtagttgttgtcaccttagacactggtgaagtctatgtcattgcaagtttgttatctaaggctgatactcaagttatctatatcgatcctacgactggtatcctgcggtacaatgggaagcctggtcctgataattttaagtcagagcgtgaagccttagattatattacgaatggatcaagaggaggtgttagaagctctgtttatgccagggcaatactcggttatgctgtctt

SEQ ID NO: 130209 - DNA, 372 bp, Arabidopsis thaliana
ggaagcatcctttctgtcttcagtttatcctcaggtttttcttcatcccatttcaattatcggtggaagcatgcctaggcattaacttattttcttgttccttaaggtttaccttgatttcggcttggcggttccaaagcttagtgtccatggtatggtttcttcagttaaagagctccttgacttagcatcaataaagaaggtaaaatgtattttacttgcattatctttgttattgttcatgagtaaccataagatattattgcaggttatgttcagctctgatggggatgcatctcctgagaccttctattttaggttagctctagtttctacctcttttctataggttgtaacttatcttatttttgt

SEQ ID NO: 130210 - DNA, 399 bp, Arabidopsis thaliana
aaacaaacacattcacattcttctttcttctcaaaaaaaaaaaaaaaaacacttgttcatttacatcaaaatgatcactgcagctctacacgaacctcagattcacaaaccaaccgatacatccgtcgtctccgatgatgtgcttcctcattctcctcctacgcctcgcattttccggtcaaagcttccggacattgacatccctaaccacctccctctccacacttactgcttcgaaaaactctcatctgtttccgacaagccttgtctcatcgttggctccaccgggaaaagctacacctacggcgaaacacacctaatctgtcggagagtcgcttccggggtatacaagttaggtatcagaaaaggtgacgtcatcatgatccttctccaaaactc

SEQ ID NO: 130211 - DNA, 693 bp, Arabidopsis thaliana
cgcctgcacgtaccggtctctccattcccggcccaacccacccaagaagagactctttgtgataaaactaagtaagaaatagcataaaagtaaaagggaatgtcgagtgaggagttgaggctggtttcgccgacgatagacaacgatgggaagttgccgagaaagtatacgatggcaggtcaaggtgttaagaaagacatctctcctcctcttgaatggtacaacgttccagaaggtacaaaaacgctagctttggtggtggaagacatcgatgcgcctgatcctagtggcccgctggtgccatggacggtgtgggttgtcgtcgacataccaccagacatcgaagggcctaccggaaggatattccggcaatgaggatcagactaccggtattcgggaagggaacaacgatcacaagattccgggatggcgtggacctctcttacctagtcacggtcaccgttttcagttcaagctttttgctctcgatgataaacccaagattggtcacacggtgacgaaagagagattgctgatcgcaattgaagggcacgtgctaggagaagccatcttgactgtgtttggcctaaaatatgtcgttcgtcgttatagtcataacaccgttggatatgtatcatagttaataattccatatatcgtattgaggattatcaatgaaataattctagtttc

SEQ ID NO: 130212 - DNA, 562 bp, Arabidopsis thaliana
  unsure (1)..(562): unsure at all n locations
gtccgttcggaataaccccccttttgctggattattaccaatataatcataaaaagctaattgtgcaggaattttcgcccaagcttctgataaactttgattttcagccagtccagcactaactcttcgatatatttcttgttgaaaggatccctgatcccattgataacgagtaggaccaaataattcgatgggagtagttgcagaaccataccacatagttccagcaacaacaaaagctgcaaaaaagacagcagcaatactactggaaaggacggtttcaatattgcccatacgtaatcctttgtatagacgttgaggcggacgaacactaagatggaataggcccgctaatatacccaacgtccctgctgcaatatgattagaggctattcctcccggaanaaaaagggttaaaaccctccaacgccccacgccgggtttacgggttgtacctttccggttagtccatnagggtnggatacccatattccaggaccatataatcctgttacattaaatgcgcaaaaaccgangcaagccactccttaaaggnatnaat

SEQ ID NO: 130213 - DNA, 486 bp, Arabidopsis thaliana
tgcggttgagtcagaaatggaggtcctctcacggttaagacgtgatgcagaagagaagctggaggatttgatgagtaacaaggcagagataacctttgagaaagagagggttttcaatcttcgaaaagaagctgaagaagagagccagcggatttcaaagttgcagtatgaattggaagttgaacgaaaagccttgtccatggccagatcgtgggccgaggaggaagcaaagaaagctagagaacaagggagggccttagaagaagctagaaagcgatgggaaacaaatggactgagagttgttattgacaaagaccttcaagagacgagcagcagagagacagaacaaagcatagtactaaacgagatggagagatcctcagttgaagaaactgagaggagagccaaaaccctgatggataagctgaaggagatggctggaaccgtgagtggaaagtcccgggaagtgatcttccctgtgatgga

SEQ ID NO: 130214 - DNA, 389 bp, Arabidopsis thaliana
cgtccgaaacgatttttatgttgcagtccttgaacagttggctctcttttcaagaatcgtggccggggacctccgtgcctgggcgatcaacttcccattcttttaaatgacgagagattcatcaaggaacagctcattaaagccatggcctcgaaagaattttctttttccttctgttgtgattgtcattgttgggataatcgtggcgtttacttatcagtccaagttgaaaccacctccgccgaagctatgtggctcctccggtggtccaccgatcacagcgccgcggataaagcttcaagatgggaggtatttggcttacaaagagcatggacttccaagagagaaagctaaccgcatattcgtattcatccatggatcccgattgt

SEQ ID NO: 130215 - DNA, 374 bp, Arabidopsis thaliana
ggcaaattacatttgtgtcacttaataattagacgaagttgtttttgtaggcataggcttctcttcagcttactcagatgcagggaggagtaacgtcatagacaaaaactaaccacgtgcatgtcatagtaccatgaaatctaacaaacatgcatttttatgaaaaatatgcattcagatctcgcttcatgtagtttgtctatcaacaatcgcattgtaaatgatttccacttaagctaaataattgaccgtcacagtcatacacaaatgttatgacaacagggttttaccaatggaaagaggagatttatatgaaatacgatgatatcagaagtttcaagaaaattattttttttctctattcaaggaaaatc

SEQ ID NO: 130216 - DNA, 344 bp, Arabidopsis thaliana
  unsure (1)..(344): unsure at all n locations
aaaactgggaacactgttttaaatgtctacnacctcaggaatcggcttatagcatatagcattgtcgttgataaagtctccaacttgctctgcgaatggggaaacataatacttataaaggctgacaaatccttattgtgcattaccgagaaggatatggaaagcaagttagatatgctgttcaagaaaaacctggacacagtagctattaatcttgtccagagtcaacatgccgatgctgctgctactgccaatgtgatgaggaagtatggggatcatttatatgggcaaccaggcctttgacggggctttgttccagtccattatcacaattggtttttttg

SEQ ID NO: 130217 - DNA, 247 bp, Arabidopsis thaliana
tttcagtagttattgttggtaccatggcctgtggcgtaggcttagcggttttagaaccatcaatgattggtgaacctgcggatccttttgcaactcctttggaaatattacctgaatggtatttctttcctgtatttcaaatacttcgtacagtgcctaacaaattattgggtgttcttttaatggtttcagtaccagcgggactgtttcccggtccccttttggaaaatgttaataaggttcaaaa

SEQ ID NO: 130218 - DNA, 375 bp, Arabidopsis thaliana
gttccattgattcattgtactatatatggtaacttaaagtaataaatttgcagtcttggacttgatgtggttagttaaaatataatatggtaactatttttatatcctatcagaatcaaaataaatttagattctttgactaatctgacgggaaaggttaaaaaaaaacagatagagagttttggcgtaaattacaccggagtcaaactttgttccaatttaaaacgaacttaactaatttaattctatccaaaagatatgtgtatcttgcttaagtatagaagataattcacctaaattttagcatttggtagtttttaactttctgttaatgttaaaaaaaaaaataaaaaaatagtgcttcttttttactgt

SEQ ID NO: 130219 - DNA, 406 bp, Arabidopsis thaliana
ctttcctgattttctcgctcattttcccggaaagttatgaagaaaaaaacatcttctttttaacaatttttggagtcttataaacgacaagccaaaaagactggagcttttcgagatatgctcttgagacgtctcaaaggaagatactttgatgggatgtcttcttaattttattataattattcactcatactcataatattattctctgatgaatctctacaaacagacaagatagtgcgagaaaatgatgggtctctgttctccttctccttcttctcacgattgttcttcatcttctccaaggaactcggagaagaagcagaatgtgattgttgcatcaccttcaagattctctacctacactaaaccgagtttatcaattgagaagagattacttacttac

SEQ ID NO: 130220 - DNA, 1346 bp, Arabidopsis thaliana
  unsure (1)..(1346): unsure at all n locations
ggtgcggtctctctctccttttcatcttctttaacgcttctcttttccagaacttgctctctctctctctttctgtcatctcctcaccgcttcctagatctctatagcggtcttccttccctcctttgtttccgggctgttccttaatcactatctctttctctttcttctgccatcgccaaaccttatctgggttttgcttcttatttgaagatttatatgggctgtactaggaatttcatgggagttgtggaggatactgaacctcctttgaaacgtgctaagaggcttgctgacgaaccgaacggcttctccgcgaactcgtctgttagaggtagtagtgtgaacagcaactctttgggagacctgatggcaaggcctctgccctcccaaggggatgacgaaactatcggctccaaaggggtcattagaaaatctgaattcgttaggattatcactagggctctttattctcttggatatgataaaaccggggctatgttggaggaagaatccggtatctctctgcacaattccaccattaagctgtttctgcagcaggttaaggacggcaaatgggatcaaagtgttaaaacattgcacagaatcggtttccctgatgagaaggctgtcaaggctgcgtctttcttgctcctagagcaaaagttcttggagtttctcaaagttgaaaagatagctgatgcgctacgcaccttaaggaatgagatggcgcctcttcgtattaatacaaagcgtgttcatgagctcgcttcctcccttatatcaccttcaagctttatatcacataccacttcgactccaggtaaagaaagtgtgaattcaaggtctaaggttttggaggaactgcaaaccttgcttcctgcttctgtnataatcccagaaaagaggttggagtgtttagttgagaattcacttcattattcaagcggggttcttgtgttttcccataatacttttggatagtgattttgtctttggaattctgatccatcaatgcgggaagcaccaaattccttctcagactgctcagatcttggagtcacataccgatgaagtttggttcttgcaattttnacataatggcaaatatttggcttcatcttccaaggatcaaaccgcaattatatgggggatcagccgcagatgggcacatttcattgaagcatacactttgttggccaccacaaaacccgtggtttgcnatcttatggggtcccgatgatccgcaagttcttncatgtggggcagaagggggtttnagccgctgggnttttgttnaggggcctttttcnaatgntnnaaaagggggnttnagcccntttttt

SEQ ID NO: 130221 - DNA, 585 bp, Arabidopsis thaliana
  unsure (1)..(585): unsure at all n locations
aatacgactcactttagggaaagctcgtacgcctgcaggtaccggtccggaattcccgggtcgacccacgcgtccgtacggctgcgagaagacgacagaagggaaccaaaaaaaaaaaaaaacgaaagcgcaaagactaaggagaaaagaaattcttcgcttcttctccggtgtaatcatgacaacctcaaaaagactagcagacaggaagattgagaaattcgacaagaacgtattgaaaagaggatttgttcctgagaccaccaccaagaagggtaaggattaccctgttggtcccatcctcctcggcttctttgtctttgttgtcattggatcatctctcttccagatcatcaggaccgcaactagtggaggaatggcttaaacccaatcacattcaagctggaagattgcaattctcaaattgatgaatcatcactttcttctcttctgacttggctctttttttcccttatactggagaatgtgactactttctgttgacctacatgtaatggnaagaattttggagncttttcccaaaaaanggnnaaaaaaagggggggccgccctagagggnccaag

SEQ ID NO: 130222 - DNA, 498 bp, Arabidopsis thaliana
aggcgccacagactcaagaaaaaaaacccaaaaaaaaaagagagaggtgaaattgattttctgctcgcgatcgtcatttcaatttctaattagctttcctggtgtttcttctccggcgtaatcatgacaacctcaaaaagactagcagacaggaagattgagaaattcgacaaaaacattttaaagagaggatttgttcctgagaccaccaccaagaagggcaaggattatcccgttggtcccatccttcttggcttctttgtctttgttgtcattggatcatctctctttcagatcattaggactgcaactagcggaggcatggcataaaccaaaacacagtcaagctagaagaagcagttttcaaaatgtagaatcttcttctgtctcctttctttttctctccttatactgtagaatgtgtcaactttctgtttactatatcatgtaatgaagattatttgagttttttataatccaagtatccaacgcttaagt

SEQ ID NO: 130223 - DNA, 430 bp, Arabidopsis thaliana
ctcacttccttttttctttgtgagtttcgagaatatccctattcataggtctgagatccacatctatgaattgaaaggtccgaacgatcaactctgcagtcagttgttagaatcaataggtcttcaaatcgttcatttgaaaaagttgaaaccctttttattggatgatcataatacttctcaaaaatcgaaattcttgatcaatggaggaacaatatcaccatttttgttcaataaaataccaaagtggatgattgactcattccatactagaaagaatcgcaggaaatcttttgataacacggattcagcctatttctcaatcgtatcccacgatcaagacaattggctgaatcccgtgaaaccatttcagagaagttcattgatatcttctttttctaaagcaaatcgacttcgattcttgaataat

SEQ ID NO: 130224 - DNA, 449 bp, Arabidopsis thaliana
ctttcctctcaaacatttcctaattccatcctaataattttcaaagctttaattctaagaaataatatctacaagaaaatattatctcatgtatttcttcttcctccttgatttttaatctgatttttaacctttggatttggaaaattatatcttcttctgtcccaaatctatttttaggtttgtcaaaacgattattttgtttaataatcgtaataggtatggagactaccggagaagttgttaaaacaaccaccgggagcgacggaggcgttacggtggtgagatccaacgcgccgtcagacttccacatggctccgaggtcagaaacttcaaacacacctcccaactccgtcgctcctcctcctcctccaccgccgcaaaactcctttactccgtcggcggctatggatggtttctcaagcggaccgataaagaagagacgtggg

SEQ ID NO: 130225 - DNA, 458 bp, Arabidopsis thaliana
ggaggaatagcggctgatttaccttatggttggatagataaatgcttggatttttgtgattattgtgtgtgacagaggttgttgaatatcaaaaactcattacacgaaatcctatttttttagaacgggttgaaggagttgggattattggtggggaagaagcaataaattggggtttatccggaccaatgctacgcgcatccggaataccatgggatcttcgtaaaattgatcgttatgagtcttacgatgaatttgaatgggaaattcaatggcaaaaacaaggagattcattagctcgttatttagtacgacttagcgaaatgacagaatccataaaaattattcaacaggctctggaaggacttccagggggtccctatgagaatttagaaagcaggggctttgatagaaaaaggaatccagaatggaatgattttgaatatcgattcattagt

SEQ ID NO: 130226 - DNA, 720 bp, Arabidopsis thaliana
atttctcataacatacgtaaacgatattataaacatgggttgtgattcaaaagtcacctaagagataacgccaagaacgccaaaagaaaccttacctgcgttacactcgttaggagtagtagtctcgcttaaaactctaatctttgcaaaacccgtcgttgaccgaaccaggactaaccatcctgatctcggtcacgtaatcatggaccgcacttcctttaccccacaatgagctaccgtgagcaccggtccccatcataccacccacggttactccccaccaatacggtgcataaggcaacgccaatccaactttagctgcttcagcgattaattgcctaagcgtcacgccactctcaaccgtcaaagtcatggccttcgcatcggcttgcaccgtgtggtttagaaactttgtgctaatgaacaatccgtcgtttccatcagtgcacgtgagcttagggatgctatgggaatatcgagtggttacacgcattttccgtccggctttagtagctgcagcgacgatagatacaagctcggcttcagttgttgggtaagccacgttggcggctctacacgtggagcggtctgggaaggctcctaatgaattggtgactatacagttcgtgtttcctgacacacatttaacaggatcttcgggtggtgttgagattaccgtgtgcacaagtgttaataaacaatataacccggaagggtgcg

SEQ ID NO: 130227 - DNA, 302 bp, Arabidopsis thaliana
tatgaatccaataaccccaaatttatgaagattttagattaccttttataaatcttaaatgaataacacaaaactttaacatactttaaaaaaatcttgattgcataacaagagatttacatgacactttaagtaactaaaactcttttcaaatcataaacaaataacaccacctaaatcttttacaaggattctattatctcggcaattatttgatatattttacccaaataatcaaccctgactaaaaataaatacaagccaaattctcttcgttgtttttttatcacacgcctctaaaa

SEQ ID NO: 130228 - DNA, 619 bp, Arabidopsis thaliana
  unsure (1)..(619): unsure at all n locations
aacccacnnncccccaaaagggtggnaaccccccggnaccangncttggcccaagttttgggaccanaatgggnccncaaggggaacccccaacctcctccgngagggtgtnccaagtggcntggagnccaaaagggccttaancccataccagcaccncttggtgaaaactggcctccggtncaacagtttgtccacaaggcaccaaggagaggatgggacaagaaggttgtggatcccgctcgggatgttgcgaaagtcgagttaccgccttatcgcaaccatcttgatgtagtggtggcttgtgaggatgaagatgacaatgacgtcgatattcctctcgtctctatctacttcaggtgaaaagtttcgagagaatgaagaaagatgaaactcttgagagcaaatttgtgtgttttgtctctgcatctgccctacgttattatcttttggatgcttgtgggtgagataactgatttttacttgagggggatagagactcattttatctctctcgttctattttagtctttctttctatgtacaattgctgaatgtgtggtttacacacccggcggccgcgattcgatatccatattttcganacctagtacttgtg

SEQ ID NO: 130229 - DNA, 697 bp, Arabidopsis thaliana
  unsure (1)..(697): unsure at all n locations
gccnnaccccaacngctgccagttgccaatgntccaagnacccacttctcgtgaggtgtccaatgctggaggccaagggctacccaacggcatccttgtggaagctgcttcggtcaaccagtatgttcacaaggcacaaggagaggatggacaagaaggttgtggatctcgctcgggatgttgcgaaagtcgagttaccgccttatcgcaaccatcttgatgtagtggtggcttgtgaggatgaagatgacaatgacgtcgatattcctctcgtctctatctacttcaggtgaaaagtttcgagagaatgaagaaagatgaaactcttgagagcaaatttgtgtgttttgtctctgcatctgccctacgttattatcttttggatgcttgtgggtgagatgactgatttttacttgagggggatagagacccattttatctctctcgttctattttagtctttctttctatgtacaattgctgaatgtgtggtttacacacccgttaccttctaaacatgttctatcaaacaaatcttcgagtttttcggtttcttccatgtcttcttgcaggtggtgtttcgcgataagaatccgaaagatataatctaccttaaataatatccactctgtgaatctatttacagagaacaaattgaagcaaagaactaaagatataatctagggtcaagtctcga

SEQ ID NO: 130230 - DNA, 652 bp, Arabidopsis thaliana
  unsure (1)..(652): unsure at all n locations
aactgcgacgacagaaggggaaacacagagagtgacgagagagagagtgaaaatggagaagtactttggaaatgcgtacaggggagatccaggagtgccacatgcagatgcagatcgtttcgtgaatatatggattggttctgctgctttctccgttcttacctgggttaatccttacatgtggcagctctctaaccagttcaattaccatgacaagtggatgctgtttgagcagtaccactggaaaaaagcaagggcaaagaagcaaccttatgaattcaagtggaataagatacccaaagaagtcagggactcgtactattacaactggccagtctacttcccatagaagtgtctctgtgttgctgtgaatcagaagagaaaccaaacacttgtggaacttctatggaatctatctctatctcttcttgatctgttattcgtagcacttttggattttaagttttttcttttgtaatgatcaatctctcaactcttcactgtttcatctcctctagttgactctcttatggaaatattgaatctctttgcaggggaaaaaaaaaaaaaaaaaaaaaaacccaaannnnnnnnnnnnnnnnnnnnnnnnnnnnnnnnnnnnnnnnnnnnnnnnnnnnnnnnnnnnnnnnnc

SEQ ID NO: 130231 - DNA, 574 bp, Arabidopsis thaliana
gtcgtccggattcgcgtcgcccacgcgtccgcggacgcgtgggtggatttgtagttggccatgagatattcgtttccactccgcattaaccacataagtaatgaattattcttcttctcgtcatatgggctaatatcattcaaattcttgcgaatgtaagatgtatagaaaaaaccgcccactatagaaatcatcaaaatctatgaaaatgattttgtcgcggaagttgaactgagtcattacaatttggacccagcgtcattgagcaaaaacctatttaatcgagggtacagaaagttagcgtagggactattgatagattgatagaacagaacagtacctaacaagatttacataaatgatcgatgtcccctctcttatacaacaatgaagtattgaacaatcacttccaacatgattgtggtccgtggtttaactatccaaaacttatataagagtcacttgaaataatatttgttaatcacaaaaataagaatcataaaaataaataaacggtgcaaagcaataaagccaatgcagggtttaatgcaggctttctgcatcattttttttt

SEQ ID NO: 130232 - DNA, 407 bp, Arabidopsis thaliana
gcagcgagctagctgcacaacgcagaattcgtcgccctttctcagttactgaagtagaggcactggttcgttgccgttgagaaactcccaaccggaagggggagagatgtgaaggttcgtgctttcgaggacgcagaccatcgtacctatgttgatctcaaggataagtggaagacgctggtccacacggcaaggatatctccacaacagcggagaggagagccggtgccacaggaacttctggaccgtgttttgaaggcacacgcttactggtcacaacacctaatgcatcaactgcagactgagccaccatccactcaggtagaggctctctaatctgaacaggttcttggtctaaagaacctttgtggattattatgatgatccatattggaagattctgacat

SEQ ID NO: 130233 - DNA, 431 bp, Arabidopsis thaliana
  unsure (1)..(431): unsure at all n locations
aaaacagggccgcccaacgcgnccggggaaggacagggacaacagggacaacaagggggtagaagttcaaccacgggaaggaccggggcggcagggacaacaaggacgacagggacaacaaggccaaccatgggaaggacagggacagcagggacaacaagggggccgcgacacgcaccagaagggggaacacgcgagacgcggagacgncnnngccaacacgccaggcaccgcccaccggancaacaacacaggagaacagccacncgccaccagcgcgcaacgcgacagcgccaacnaccaaaaccaacncgaccgcaacccaagagggggccaaaaggccggaaacaaccagcagggaggcnnnggcggnncacagcaacaacaagaacagaaaaacccggggagcgggngcgacgcacaggncacag

SEQ ID NO: 130234 - DNA, 503 bp, Arabidopsis thaliana
gaaatagagtgtagtgaccttcttttttatttgaatttagatatatatcgattatatcgatcgctttgggaattttacatatagtatttttaaacggccgaatcagcatattttttgaagccccgtaactcttcctcagccaggcttgggcagaatagcggagcaagtattagtagcatagcaaaaatgcgttcctcatcattaagtcattaaattcatatgtttgctcgcggtaattgtgaactctcgggagaatcgatgactgcatcaaagatgcacttgttagtacatctgaaaattctgaattggctagttgtaaatagccccaggactatagaataaaggattatcccgaacctacaccgaggtattgacggtgattctcaaatatcacagaacagaatgtgatacgatgagatagaatgcaatagaaacaaagacacagggaacgggttaccgactcttaacggtcaaagcgaacccgttcattcttacattctgaa

SEQ ID NO: 130235 - DNA, 379 bp, Arabidopsis thaliana
atctatatctcgatacttgtattacagtttacagcagttattaaacggactccacatcatacgtcactgtgcaagtatcatttagaggctttctctgtttattgacaggaaagaactcaaaaacaactaaatcagcccagatatcggggtcatttccttcatcggtatctggacgcacgttgacatcaaagaagacaaacgtatgatccctttcaatagctttccctaaagcccaacaatgcaaatttatttctctcctatgagagcggccttcctcgtttttccatttgcaaacacaactaatgccaaaatcagtatcatcacagtaaccctcggaaaatgcgacttgcaccagcatagcaaagcccacaagtgtgtt

SEQ ID NO: 130236 - DNA, 358 bp, Arabidopsis thaliana
  unsure (1)..(358): unsure at all n locations
aagatacaaaatggctcgaggcncncaaactgggttggctttctccnnaacacnnnnganccggggccatggctacgcggctcaacaggcccacgcacggccagcaggnnccgaacgagggccagcncgaccagcncaacgcgcncgagccgncacacgnaccgaagagcgaggcaggncgcaacgaggggggggaccaccacgcaccacagcnccgangcncaggagacncccaagcacgnnacaacaacgagacaaaggggcacaacccgcccaccaacgagaacaccgcgaagcncnccnncgnggcnaaaggacgaggncnnangggaaaagggancccnggangcgccgaaac

SEQ ID NO: 130237 - DNA, 291 bp, Arabidopsis thaliana
  unsure (1)..(291): unsure at all n locations
ggagtatgttatgctcagngccacacgnggtangnnttttggcaangcganggngcnggcggggnacaacaggaacgcnaacgagcacctccacngcacnggaggacaaggaagganccaagnggncaacgacaacggacagaacgngnnggaccaacaggngcagaagggacagcncgnggncancccacaagggancgcaaacgccgnccagncccacggaaacaagnncgagnggancgcnnncaaaacgaacgaaaacgcaaggancagcacnnncggcgggagaac

SEQ ID NO: 130238 - DNA, 576 bp, Arabidopsis thaliana
  unsure (1)..(576): unsure at all n locations
gcaaagaaaaaaaaagaaagatgaagaatgtgaatcgagtcttcttctgcaaatnactatctctngtcttcctcgttccttctttcactcgtnctcatctccgattcacttactccgccgccggtgcttcttctcctaatcgagctattcactgcatggcttccgattcccctcaatccggagatggttccgtctcttctcctcctaatgtcgcggctgttccctcttcttcttcttcttcttcgtccgcttcttccgccattgatttcctctctctctgtactcgtctcaagacaactccaagagctggatggattaagagagatgtgaaagatccagaatctatagcggatcacatgtatcggatgggtcttatggctctaatttcttcagatatccccggtgttaacagagacaaatgcatgaaaatggcgattgttcatgatattgcagaagccattgtaggagacattacacctttctggtgggatatctaaagaagagaaaaaccgaagagaaagcgaagcacttgagcacatgtgcaaactcttgggtggaggcgaaagagcaaaagaa

SEQ ID NO: 130239 - DNA, 434 bp, Arabidopsis thaliana
ccaacttatagccctccagtaaagccaccaccagtacaattgcctccaaccccaacttatagccctcccgtaggaccaccaccagtacaagtgcctccaaccccaacttatagccctcccgtaaaaccaccaccagtacaagtacctccaacaccaacttatagccctcccataaaaccaccaccggtacaagtgcctccaacaccaaacttactccatcacctccccaaggtggatacggtactcctcctccatatgcatatctatcgcatcctatagacataaggaactaggtaaacaagatacagtacatatatttcctcaaggatcgccaaataggctttctagcacaagagagatgtatgttaaagctacatatggtactgcatattatgtggtaaaataaataaagttctataaatggttgttcacat

SEQ ID NO: 130240 - DNA, 431 bp, Arabidopsis thaliana
  unsure (1)..(431): unsure at all n locations
cgctcttctcgacatcgccaacnaccaatacctactctaccgcaaccctagagnngggcatgtggccggaaacaaccagcaggcaggctaaggcggnncacagcaacaacaagaacagaaaaacnngnggagcgggnncgacgcacaggncanagcncaagcanngaaaattgacgttcagnnggcncagcagcttcagatccaacaagacagcagaggaaacaggcgggcgtgttaaggggacccccccaggccgcgaggccaccnccaagacagcccnacgagagcgaggagnggagacacccacgnagcccacagggcaacggccnngaggagaccancngcagcangaggncccacgagaacanngacgacccngcncgngccgacgngnacaagcccagccaaggncgcgngaccagcgncaacag

SEQ ID NO: 130241 - DNA, 384 bp, Arabidopsis thaliana
  unsure (1)..(384): unsure at all n locations
gacccacgcgnccgggaagaaaaaggggtcgagncncaaccaccnattttcaatttctctttgacacncaanganccacggcaggggctacactgcccaacaggggcgccaaccagagccagctcgaccaacncaangcgctcgaaccancccaaancancaagagcgagggnggncgcancgaggncngggaccaccangcaccccagcnccggggcnccggcanggcccccgagcganncgacanagagccccagggncnanacnggcccacanncnngaacgccggcaaacacacganggaggggcacggaaggggaccaacgggaagagggaanccgggaagcgccgagacgcncanggagncaccggnaannggagaag

SEQ ID NO: 130242 - DNA, 502 bp, Arabidopsis thaliana
  unsure (1)..(502): unsure at all n locations
aaagaacgtaaaagccccnaaacggataagtacatatttcttacgccnnaccanggcgggacgctactactgagttaaaagggccccctcggtttaattcctgactgagccggtagtaaataaaatctatatatatatatatattaaatatatatacaatagacgcatagtggttagtagctcatttgggaactagaaatgagaatttgaattgacttcaaatttacttaacggggtattttttgcttttttaatattggatttgataaatatccatgcaatgaatttttttttaatagcctaccgcatcgaacgaaattaatttgatttatacatgtactcagcaagttgacatacacccaagatattttatcttgacatgtgatgaagagatacggattatcctctgaacaataattttctaaaaaaaaaaaaagcaaatttttgataacttaacttataaatccacctttttccctaattagaagatggattctggctg

SEQ ID NO: 130243 - DNA, 590 bp, Arabidopsis thaliana
  unsure (1)..(590): unsure at all n locations
cgaaatccccggtccgccccacccttccgtttttatcctcacaacattgtttaactcatctttctaagttggtttcgattcaagaatatcacaatgactaatgttcgccttcctattctcgtctcctcggtcttgttccttgtctttatttcatcgtccctcttgttccctacacctagttttgctgctagagtaagtcattctctggtgcaagaagaggtcaaaaaggttccagaatacacagaacctgaggagccggaagttccagaagagccggagctgccctcaccggaggagcctgagattccagaagagcctgagattccagaagagcctgaggttcctggagaacccgaagttcctgaagagcccgaagaaccagaagagccagaagggtcaacatttgaatttccatcatgggtttccgagctttcctattcccggtgttaatggcggtttgccaagactgaaaagccaaaacctcattaacagttaaggggtaacgttttacaagagcntggtnattggnagacgcaaatgtnttaactttttgaataaggttggtttgttggtaagtngggtaatttttc

SEQ ID NO: 130244 - DNA, 398 bp, Arabidopsis thaliana
  unsure (1)..(398): unsure at all n locations
gaaaaaccggggcgggccacgcgtccgcaaacgagcaagaanacaaanacaaataaattanaanttttgcaaacaagcncnnccacggccgcgcaacttggggccncggcgcgccccccaccaacgcnnccancnaccgcaccggggncgagnncgacgaagangacgccagcaaccccangggcccaagacagaaangncagaaggaggggcagcaancacagcaccnaagagcnggccagaaanggacgcgcangcaaaagaggcaaggccgnggaggnnggcccacccacgacgaagagnncgacccggaagacgacancgagaacccacaaggcccccagcagggacacccagaccccccagcagggcngcagcgagcnncgccaggaagagcc

SEQ ID NO: 130245 - DNA, 841 bp, Arabidopsis thaliana
cggggcgaccggcgcgtccgcttgtttcttggttttgtgttttagttttgagagtatatgggacagattccgaggttgcggtggtggatgaatatgttgggccgctcgttggccatcaacttcagcttgattctaaagattttgaagggtgatagagaacgaggagattcatgggacagaacagcgtatgttagcatatggcccgtggtatccaccacggcttcagaatcttcttcgttgtcttcagcatcttgcaactatagcaagattgaagaagacgatgatagaattatcaatctcaaatttggtgatccaacggtgtatgagagatattggcaggaaaatggagaggtgacaacaatggtgatacctggatggcaatctcttagctatttttcagatgaaaacaacctctgttggtttcttgagccagagcttgccaaagagattgtgagggtgcataaggttgttgggaatgctgtaacgcaagaccgcttcattgttgttggcactggctcaacacaattgtatcaggctgctctctatgctctctccccacatgatgactccggtcccattaatgtcgtgtcagccacaccctattatagtacatacccgttgattacagactgcctcaaatcaggtttatatcgatggggtggagatgcaaagacgtacaaagaagatggtccatacattgaacttgttacatctccaaacaaccctgatgggttcttgagagaatcagtagtgaacagtactgaaggtatattgatccatgatttggcttactattggccacagtatacaccgataacattaccagctgatcacgatgtta

SEQ ID NO: 130246 - DNA, 427 bp, Arabidopsis thaliana
  unsure (1)..(427): unsure at all n locations
aagtagagctcaaagacaagcttcatgttgttttgttcaatgaagaactaggaacaagagattctctatgttgcgtctgtttggnagaattcgagttaaaggaagagttggtggaaatgcctttatgtaaacacatatttcatctcgattgtattcacctttggctttattctcacaacacttgtcctctttgtcgatcctctgtctccatctcctccaccaaaacctctgttgatgacgacaacgaccatccagattctcctcaaacgtcaccggtttgattcaaacccccgaaggaaataagcaaatacacaagttttgttagtgaatagatcgatacaagatgtaaatcttaattttgctgatacaagatatcaaaatgtaatccatcacattatatatattggttacacagattcattcatat

SEQ ID NO: 130247 - DNA, 547 bp, Arabidopsis thaliana
agctacttgaagatatagctaatttttctaagctgtaagggtgatgacaagtggtcaaatgcttaaccgaatgaagaaatcgattagagtaccaattgttcctttgtttcatgtgcttcctgaaaaatatgcatttgtttcctatataaatgaaaaagccaaaaaaaaaaggcagagaaatttgcctgaaccatttttggtcctgggtttcttaattcagcctttgaggggccccttatcattggggctttagaatgggagaaagaggcttctacgcaaatggattggtctctcccatgaccaggttggaaataaagcccctccagaccaaggtctctttatctctctcctgcttgctttgctcccactttgtgtaactgcactgcatcctctcagttcttaatttggttttttatgtatatgcactgcttttgtttcaatgacctcttgttatccaaaaaaaaaaaaaaaggccggccgctatagaggatccaagcttacgtacgcgtgcatgggacgtcatagtaattctatagttcgcctaaat

SEQ ID NO: 130248 - DNA, 239 bp, Arabidopsis thaliana
ctccagcattgaccggttaggatcgtaatattcctacagtttatcatagaaagaaaacgctttggtgagatcagattcggaatcaagataagccatcaaaaattatgagaagatccacagagcaccaatttatgatagataaacaagtggaggaacacgtttagaaaaacaagccgcgttcttaccttacaagttaaggacatgtcggcatacacgctcagaaggttacttctgcaaaa

SEQ ID NO: 130249 - DNA, 920 bp, Arabidopsis thaliana
  unsure (1)..(920): unsure at all n locations
cgggcgcccagctccggagaaagggtcggtttcgaccattcatttagttttgacccgaggtggcacgagggggattcgtggcaggtttatgatccttgcaccgtgctaactgttggagtcttcgacaattggaggatgttctctgacgcctccgatgatagacctgacacacggattgggaagatacggatccgggtgtcgacgttagagagcaacaaagtgtacaccaattcatatcctctgttggttttgttacctagcggtatgaaaaaaatgggtgaaattgaagtggcagtccggtttgcatgcccgtctctgctgcctgatgtttgtgcagcttatggacagccgcttctgcctcggatgcactacataaggcctctaggtgtagcacaacaagatgcattaagaggggccgccacgaaaatggtagcagcttggctggctcgagcagaaccaccattgggaccagaggtagttcgatatatgttagatgcagattcgcatgcatggagcatgaggaaaagcaaagcgaattggtacagaattgttggtgttttagcttgggcagtgggtttagctaagtggttggataatatcaggcggtggaggaatccagtgacgacggtgctagtccatattctatatctggttcttgtttggtaccctgatttggtagtcccgactgcattcttgtacgtggtgatgatcggagtttggtactaccggtttagacccaagataccggctggtatggatatccgcttatcacaagctgaaaccgtcgatcctgatgagctagatgaagaattcgacaccataccaagttaaggcggccagaaggnaatccgagnntaggtacgncccgttaaggttttnagcaattaggntttannccctttaggggttttnnaccaagg

SEQ ID NO: 130250 - DNA, 597 bp, Arabidopsis thaliana
gctttgtcggtccggcggtggaccagcctgtccgaggcctcgcccgacgatgcgctcggcgcggtcacccaatcctatctggctggcgacgcccatggcgagggacagatgagcggctgcatgatggcagcattggcgccggatatcgcgcggcgcggcggtcccgtccgttcgcgtttcaccgagggcaccaaggcgcttctcgatattctcgtcaacgccgtgaccggccgcagcaaagcccggcagcgtgaaaaggccattgccatcatggcggggctggtgggcaccgtggtcctggcgcgcgccgtggatgatcctgatttcgcccgggagatcaaacgggtcggtgcggctgtgttcggcaaagacgcggagtagggaggggatttacacccccctctgccctgccgggcatctcccccttgtgggggagatcagctttcagaacctttcagccaatcttcggcatctgaaataacgcgcaaccatagatgccgacgttggtactaccggtttagacccaagataccggctggtatggatatccgcttatcacaagctgaaaccgtcgatcctgatgagctagatgaagaa

SEQ ID NO: 130251 - DNA, 1081 bp, Arabidopsis thaliana
  unsure (1)..(1081): unsure at all n locations
nnnnnnnnnnnnnnnnnnnnnnnnnnnnnnnnnnnnnnnnnnnnnnnnnnnnnnnnnnnnnnnnnnnnnnggtccacccacgcgtccggctgcgaaaacgacagaagggggggataagttttctaaaaaatcgaagaaagatcgatggctctagatatctgcgtgaaggttgccgtcggtgctcctgatgttctcggcgactgtccgtttagccaacgtgttcttctgacacttgaggagaagaagcttccctacaagacccatctgattaacgtctccgacaaaccccaatggttcttagacattagtccagaggggaaagttccggtggtgaagcttgatggcaaatgggtggctgattctgacgtaattgttggacttcttgaagagaaatatccagagccttctctcaagactcctcctgaatttgcttctgtaggatccaaaatctttggtgcttttgtgactttcttgaagagcaaagacgctaatgacggatccgagaaggctttggttgatgagttagaacgtttggagaatcacttgaagacacattctggtccttttgtagctggagagaagattactgcagtggatttgagtttagcaccaaagctttaccatcttgaggttgctcttggtcattacaagaactggtctgtccctgagagcttgaccagtgttcgtaactacgccaaggctttgttctctagggagtcgtttgagaacaccaaggctaagaaagagattgtggttgcgggttgggaatcgaaggtgaatgcgtgatgtggatccatgcttctctagttaatgttgctttagaactattcttccctgaataataagaatgcacgagtatgtgtgtgttcttgtttttgttagagttggttatcaataatgatgcgataaagcagcatatctttttttgataatatacccctcttattcaatttggtattacagtcccatggtcctnnnnnnnnnnnnnnnnnnnnnnnnnnnnnnnnnnnnnnnnnnnnnnnnnnnnnnnnnnnnnnnnnnnnnnnnnnnnnnnnnnnnnnnnnnnnnnnnnnnnnnnnnn

SEQ ID NO: 130252 - DNA, 980 bp, Arabidopsis thaliana
  unsure (1)..(980): unsure at all n locations
gcctatttcattcatattttgcttttaaaacgagaattataattctccgactccgtgggataagttttctaaaaaatcgaagaaagatcgatggctctagatatctgcgtgaaggttgccgtcggtgctcctgatgttctcggcgactgtccgtttagccaacgtgttcttctgacacttgaggagaagaagcttccctacaagacccatctgattaacgtctccgacaaaccccaatggttcttagacattagtccagaggggaaagttccggtggtgaagcttgatggcaaatgggtggctgattctnacgtaattgttggacttcttgaagaggaatatccagagccttctctcaagactcctcctgaattttgcttctgtagggtcccaaaatcttttgggtgcttttgtgactttctttgaagggcaaagacgctaataacggatccgggaaggcttttggtttatgagttagaagcggttggaggatcacttgaagacacattctggccctttttggctggaggaagttcactgcagtggatttgagtttagcaccaaagctttaccatcttgaggttgctcttggtcattacaagaactggtctgtccctgagagcttgaccagtgttcgtaactacgccaaggctttgttctctagggagtcgtttgagaacaccaaggctaagaaagagattgtggttgcgggttgggaatcgaaggtgaatgcgttaagtggatcccagcctctttaagtaaaggtgccttaaaaccaattttcccttaaatattaaaaagccccgaggaaggggggggttctggttttggtaaaagtgggtaaccaataataatccaataaaccagccaattctttttttgataaaaaaaaaaaaaaagnnnnnnnnnnnnnnnnnnnnnnnnnnnnnnnnnnnnnnnnnnnnnnnnnnnnnnnnnnnnnnnnnnnnnnaaaaatcaat

SEQ ID NO: 130253 - DNA, 556 bp, Arabidopsis thaliana
  unsure (1)..(556): unsure at all n locations
ctagaaaaccacatttctgagcactcttgagtctgtatcctttgctggcctaatcaggctagaattgtgaagtgtgaaagtaagcatattgacaatggctactcccacagacctaggttcctcttcacctgtatggtggtggtgacgactctgaccattaccctgcacagaagcgtacttcaaaacgtactgcttccgaaacagcaacagacgaagaaacgaagatgaagaaaaagaagaatacgaagcacaacacaaatatggcttttcctaccagcatccggatctggaacgaagaagacgagctctctatcttaaagggatatggtggattttcgagctaaaacaggactcgaatccaatattgtttgggatgcgttttattgttacgtcaaaggttccattcatgtgaaagtttccaagtgccagcttatgagtaagaccaggaagttgaagaagaagttcctttgatcaaatggagnaaatcgntcaagggaatgatnccncattttanttagggcttngtggaacntgaaggtttttnggtattnccntg

SEQ ID NO: 130254 - DNA, 549 bp, Arabidopsis thaliana
  unsure (1)..(549): unsure at all n locations
cggntccacttncccatgggggntttacccggtccccccgggtggcccccttgcccgcccccagtccggttgggaagcttcccccgccagcccttcgcgacccaaccgaaggtatggcatgtcccagtacgtgctgttcgtagttccaggggtgctacttggggttgggctaccggttgcattcgtgatgctttccaagggagagaatgggaccaaccctggcaaatggtgtcattcccttagctggtttccccaactttctaaatggacctgctaatcatcatcatcatcatcatactcatatagtaaaagcttttatatgtgttcttgttagcatttaatctctttgatctctctagcctttgattacttatatatgtgtacatcacccaattcgtcttgtgtaaaaggccatagaaataaaagagtgtattatttggtcatttgaacgccatatttctcaaactgtctttaagtacataaatagtaaacaattttattaatgtaaaacataagctgtaattggaaataaattcctttaatttggtt

SEQ ID NO: 130255 - DNA, 1135 bp, Arabidopsis thaliana
  unsure (1)..(1135): unsure at all n locations
ctaaatctctctctgattactgatactctgtctcaatctcttctttcttctaatcctttatttcttgtaagctacttctcctgaatttcgtatttgatccgtttaatccaagtttcgattttatataacaaccacatagatcctgaggttttgtgataagaaacagagagagagagaaacagagtaatggcgaacagagatgtggagagagtagggaagaaaaacagaggagctaataacaattatttctacgatgagtcttctggtgaaactcattggacttcatggctgattccggcgattgtagtggcgaatctcgctgtctttatcgctgttatgttcgttaatgattgtcctaagaaaatcaccggacctaacaaagagtgtgttgctagattcctcggaagattctcggttcaaccacttaaagagaatcctctctttggtccttcttcttcaacattggagaaaatgggagcattggaatggaggaaagtagtacatgaacatcatggatggagacttctctcttgtatgtggcttcacgctggtatcattcatcttcttacaaacatgttgagtttgatcttcattggtatccgccttgagcagcaatttggcttcataagagtcgggttgatatacttaatatcgggtctcggtggaagcatactttcgtcgcttttccttcaagaaagtatctctgttggtgcttcgggtgctctctttggacttcttggagcaatgttatctgaacttcttaccaattggactatctatgccaacaaggcggctgctctgatcacacttctgttcatcatcgcaatcaacttagcattaggcatgcttcctcgggttgacaactttgcacacattggaggggtttttaaccgggattctgcctcgggtttgtcctccttgtccgacctcagtacggttgggaagcttcccggaccaacacttcgcgaacaaacgaaagnatagcatgaccagacgtntggttgagcccagtggggaacttgtggtgggaacggtcatnagaangttcaaagggaatggncaaatnnaatgggaaactacngccactcaatgctgacacacacacacnaacaangaacgtaatggcntganatac

SEQ ID NO: 130256 - DNA, 796 bp, Arabidopsis thaliana
  unsure (1)..(796): unsure at all n locations
gaaaactctgnagatcggaatcaatggagtctacaatatcgttgaaggtcaacaaaggaaaaggcaaaggatcaaagggagcttcctcttccgatgacaagtccaagtttgatgtcgttaaggaatggaccaattggtcattgaagaaggctaaagtcgtcactcactatggcttcatccctctggtcatcttcgtcggcatgaactccgatcccaaacctcatctcttccagctccttagccctgtctgatccatccaatttcatcatcaacctaaatcaatcgaatcggtcttcctctggtttggcttcttcatatctttacgcgtgttcttagattcgccgaatcttcttttatgcttttttcattagctagtttttgaatactttctctatggtactgtattgaataactttagcttatgatataatgtgaaatcgaattttatgttttgaaaatctgggaattgctttaaagattgaagtttgttggaatgtcttgtatcaattttacaatgtgtgttatatgaggtcgatcttgaggttttaaggcaacacaagccaaacctatttgcaacatctcaaccaactcttcttctatacccatttgcatcattagctcattatcgaatacttctcctgtccactctttcgacaccactgaccttatccagctcgccaagtccatgttttcgtctagtgatagcggactcgcgggtgatttccctgttagaagctcgagtaacaccaccccgaagctgtatacatcagagaactgtgtggactttcttgtatct

SEQ ID NO: 130257 - DNA, 451 bp, Arabidopsis thaliana
aaaccacactcatggcgacacttctctcaccttcttcaagctaagttttcattttgttcactgccacagatctatggccatggatatatctctgttcttcattttcctggtcatttacgcgccgttagtctcatacgccgatgaatctcaagccgagattgatgctctcacggcgtttaaactcaacctccatgaccctctcggtgctttaacttcatgggatccttcaacaccagcagctccatgtgactggcgtggcgttggctgtactaaccaccgtgtcactgagatccgtcttcctcgtctccaactctccggacgaatctccgatcgtatctccggtctacgcatgctacggaagctcagtctccggtctaactctttcaacggtactatccctacttcactcgcttactgcacgcgcctactcttcgtctttcttcagtacaac

SEQ ID NO: 130258 - DNA, 562 bp, Arabidopsis thaliana
  unsure (1)..(562): unsure at all n locations
cctaaacctaagagcaaagcaaatcgacggcgacgggaaaatagaaccgcagatctctgtctcctctctctctcgtaactgtttgttcgatggcaccgaagaaggcggaggaagtggtcgaaagccctcctgtttccagtgaagaagaagaatctggctcatctggagaagaatctgaatcttctgctgaagttccgaagaaagtcgagtcttcgcaaaagcctgaatctgactctgaaggcgaatctgaatcggagtccagttctgggcccgagcccgagtccgagcctgctaagacgatcaagctgaagcctgttgggactaaaccaattccagagacgtctggatctgccgcgactgtacctgagagttcaacggctaagcgtcctttgaaggaagctgctcctgaagctattaaggagcagaagacatcggacactgagcatnttaaggagcccntaactaattattgggtaaagaagnttnttnaagggggtctaagaagntnttnaanagtttttnaagttaacgggttnaatcngtttcttaaggnttntttntc

SEQ ID NO: 130259 - DNA, 645 bp, Arabidopsis thaliana
tctctccttgttttctttccacttcctctcatatcgtcctcctcatcgtcgtcgtcatcatcatcttcatcatcgtactcatacaactctctactcctgacgcccctcttacccgacccagaacctggacccgactgataattatggtatggaacaacacttgtttgcccagagacgtggtgcctaggtcccaacggcccgcctaagatgctccgaaccggtaggagaaagtagaactctttgtctccgatctgcaaaaggtcttgtgaatcgagcttgacgttaggattcccagggagatgaagaacaccttcaacgaggcagccatttttgccaaggacctcgagagagaagcgtcgtctagtgaagtcatagaagatccgagcgtggttgcgcgagatgttcatcccaccgccgagggatgagagatcaacgtcgacggtggctttcttagaattccggccgagtataatggagtaagactgcatatagtactcgaaatcctcaccttgaagcttcgcaaatccaacctccacatcgcttccgccaccaacagccgtagccatgccgtgaaattcccccatttgatcgaaagaggacccgggacttccaaattagggattgcaatcgtaacccacgcgtccg

SEQ ID NO: 130260 - DNA, 435 bp, Arabidopsis thaliana
caattttctcccatgaacgatttgtgtcaatggatttgttcgatccaaaacttgagataatgggtgtaatccgaaaaaggattcataagtagttgttaacggagttgaagttaccaaattctgaggagtaggtatcaatttatgcctaattgctccggagatagttcccttaactacattttctaaacgagccagagccaacccgagctggtcttgtaaaagatccgctacagagcgaatacgtttatttttcaaatgattcatatcatcaagtgtacccattccaaatttcatcccaatcaaatgatcggcagctgctaacacatctcgtggtaacaaaaatatattgttctgaggtatattaagattcagtctccaattaatattttggcgaccaatccttcctaattcacacctttggtgaaagaatttttt

SEQ ID NO: 130261 - DNA, 516 bp, Arabidopsis thaliana
cagaagagaaaaccctagctagaaacgacgttccaaagatgacgcagaagagcaatcagttcaagggccaacagaagaggaagactattgctcctaatcgccatggcaaatccattcaaactcgcaaagggaagagaaatgtgaaaccaacaaagatgacgaaagagatggacactgatcgggagcttacgaaattcataaaccattgcaatgaagtgaaagcaactaatgcagcttgtaaagaaggtggtcaactcaatatcatcaaagctgaatctcaacctgagccatccaagaaatccgccaaatagacaacaaacccttctttttttgtttccagtgtttcaacttttgtagctcttacacaatccaatcggttttgtctttaaatcaatcatttataatgctattgttaccaatttcgtcacttacaaacacgtttattgttactttacgagagattgaacttccatacacttatgcatttaccattgtgagccgttaccaaaaaaaaaa

SEQ ID NO: 130262 - DNA, 430 bp, Arabidopsis thaliana
tctcacttcccagctacttctctctctcgcgctctctctttctttttgggcaatggctactggatcaacaaccgattccgccaggtctccttcctcaggtgttctccaaaagctgttattactattctctgtctgtatagctgcttcaacttataaagcaatccagcctcctccatcaaagctatgtggctctcctgatggtccatccatcacaggaccaaggattaagctaagagacggaaggcgtttagcttacaaagagcatggagttccaagagatgaagctaaccataagatcatcgttgtccatggatctgatagttgcagacacgataatgctttcgcagctctactatcaccggatattaaggatggactaggtgtatatatggtttcatttgatagaccttgttatgcagagagtgatcct

SEQ ID NO: 130263 - DNA, 775 bp, Arabidopsis thaliana
gttgatatcagtaaagaagatttggaactcggagatgaagatgaagtaaaggacagggaagcgaaacaagagtttaaccttctctgtgactggataaaacagcagctcggtgacaaagttgcaaaagtccaagtctcaaaccgtttgagctcttctccttgtgtgcttgtctctggcaaattcgggtggtcagctaatatggaaaggctaatgaaggcacaggctcttggagacacttcaagcctggagttcatgagaggtaggagaatactagagatcaatccagatcatcccatcatcaaagacttgaacgctgcttgtaagaatgcaccagagagcactgaagcaacaagagtggtcgatctcttgtatgacactgctataatatcaagtggattcactcctgatagcccggccgagctcgggaacaagatatatgagatgatggcaatggcggttggaggaagatggggcagagttgaagaagaagaagaaagctcgactgtgaatgaaggagatgacaaaagcggagaaacagaggtagttgaaccatctgaagtgagggcagagagtgatccttggcaagattgatccttttttaccttcttttgtttgcagtgatttttttttttgacagaacgctttatctttccattagcagtatcatgggcctaatgaaagcccataattaaatcacgcgtgaacgagatttatccaatacagtatttgtagtttttttttgataattaaaataattttagagaatttacacaaa

SEQ ID NO: 130264 - DNA, 566 bp, Arabidopsis thaliana
acccacgcatgcgcttctctctgtctatctctttctcttgcacgaagaaagagagagagataacaaaaccccccaaaaaaaaacaccaaaaaaaaaaaaaaaaaaaggatgaagaagaagaagaagacaaccttgtctgtttttttttcgaaaggcaaaatgtttgatgggctgttcaaacccaagttttatacgaaatgcaagtcgttggtcaagataacgaagacaagagtagacacggtgaagaggaagaaaaactcggtttgcaaatatctcaagaacgacattgtcgatcttctcaagaacagcctcgattacaatgcatatggcagggcagaagggcttatagaggagaaaaggaggctggcttgttatgagtttttggagcaattctgcaactgcgttgcatccaatgtctctctattacagaaatccatccggtgccctgatgagtgccgcgaggccatttcctcccttgtatatgcagccgctagagtctctgaagtccctgagctacgcgacctcagatctttaatttgctgggagatacggaaacacacttggat

SEQ ID NO: 130265 - DNA, 468 bp, Arabidopsis thaliana
  unsure (1)..(468): unsure at all n locations
tgcagatgcaaagacgttgtggacatggtatgaaccatacattaaagatgatgaggagttttcaccaggntcaaatggacggatgacgacaatgggtggtctgtactactttgatactttgtttcctcgtatacctgttcctgtcatgcgccagattgtatcaaaccttgagaagatgaatttaccaactaaaccttctggttcaaccggagacatgacccgtggctcagaagacactgcccgtcgtccaccatcagtaaaagcatccctctctgtttcattttggtcagcgtgcacctcatcgtgcttccacccagaggcttttcttctgttcgccgttctccaccgactggttatgacagatatggaggcgatgaattacaacagcggttctcacgtagaagccagagccgagactatatttcttactgagtctcatattgacaacgggaaagagcgagggtgtat

SEQ ID NO: 130266 - DNA, 743 bp, Arabidopsis thaliana
  unsure (1)..(743): unsure at all n locations
cgagtacctccactgaccacaagcctcacatatctctacattcacctcattttcaagcgtgcagaatttgcaagaccagactttgtgcttcatctccctttcctttggctttgcggcagtgcatagctcacatattggagccaatgacgggttcaataaggtgcattctgcacactcccacattgtggattcttctctgctttggtttgcattgtaactcgtcgatggcaaaggaatcgatgacttcatgacaccagcgttcggtacatctttggcacaagaaggaccctgatcacctgggctgcgatttcttttagtacatcttatttcaaaagattcttcagtcaaatcaatgacatctgatccctgttgatgactggaagatggaggacaagcaatgggcattggaccagccattacatcgttttactgactttccattcacgctcgtacaagtttccctgatggaaacaggttccttatatgtgtcactatcattctcttcatcttctaaagcatctgtggattgggaaccacaccaaatatcatcaagtaaacgcctttctgcagccattgcagcagcctgaattggactaagatctgacataatgctgntatcaccaccaagacgttgaggtcctgaaggtaaaagagttcccgcacgcactcttttttctgctgcttgagctgcagttgctctgagaaatgatagagaaggctgacgagaaagtccacccaaacgc

SEQ ID NO: 130267 - DNA, 436 bp, Arabidopsis thaliana
gaattatctctgttcaaagcttttgttttgttcccaattctgaagttttgaatcaacaaatcttcaataaagttttctcctttcactatctttccatattcttcttcttagtaaaactttgcattaatggcttacccaaatttgtaagctctttgtttcctcccttcttcttattctcttcttcattctccaaatttgtttctaggtttcttcagtttgagcgatgaagaagtctaaactcgataattcttcttcacagattcgattcgggcttgttcagttcttattagctgttctgcttttttacttcctctgcatgagcttcgagatcccattcatcttcagaaccgggtctgggtccgggtctgatgatgtttcatcttcttcttttgctgacgcattaccgagaccaatggttgttggtggtggtagtagg

SEQ ID NO: 130268 - DNA, 514 bp, Arabidopsis thaliana
aaacagaagaacgtaaaccagtcaagtctgtaaatggcgaaaaaagaaggttcaaagatgaacatcgccattatacatccagatcttggaataggcggagcagagagattgattgttgatgcggccgttgagcttgcctcgcacggtcataaagttcatatcttcacctctcaccacgacaaatccagatgcttcgaggaaactctttccggtatctttcaagttacggtgtatggatctttcctgccacggcatattttctaccgactacacgcagtgtgtgcatatttgcggtgcttgtttgttgctctctgtgttcttttgggttggtcttcattcgatgttgtactagcagaccaagtttcagtcgtagtcccattgctgaaactcaaaaggtcatctaaggttgttttctactgccatgtcccggatctcttgctagctaagcatacaacaacacttagacggatgtatcgtaaacccattgatttcattgaagaacaaacaacaggga

SEQ ID NO: 130269 - DNA, 501 bp, Arabidopsis thaliana
gaaatttctgatatttacttttcctctgagttattatagatcaattatcttatttaatatatatgcgggtttatttttttcatatattaaaattcaccatatttcaaactctataaataaagacttgttttatttgatttggatacaaaaaaatacatctatttttactaattatccatttaaaacataaaaaaaagaaaaatgaaataaaaatagtgggtagagtgttgaattttattaagcaaaccattgtagagtataaaatttaagtgggtattgaattattatgtggaagagagaagaaatgatgtggaaaaaaagaagatgacgtggagggtgttgaatgaaaaaaccattgttgatagcctgatgactgattagaaatcaacatgtcatctattttaacgaatattaaaaattaaatttagcaaccatccaaagtaatacaagattcacatgatttatacatatttctttgaaaaacttgtttataaacttcac

SEQ ID NO: 130270 - DNA, 470 bp, Arabidopsis thaliana
ccacgcgtccgtgcattggctggaacctacaactttgatgacatggcgaaagtggctgcgagtgcctccatgtgcgtccaccaagaggtctcacacagaccattcatgggtgaagttgtgcaggcactaaaacttatatccaacgatgcagatgagacctgtggtgattattgcagccaaaaggactcatcagtaccagactctgctgacttcaaaggcgatctggctccttcggatagcagctggtggaatttgacacctcggttaaggtatggtcaagcttcgtcgttcataacaatggattatagctcaggaccactagaggacatgggaaaccggccttactttgcttctagcattccaagagtaggaggtctaattctaccaaacagatcaggtccgttaagacccatgcgtagtagaagaaactttttagactgagaggagcatgagcgaacacggtggaccgt

SEQ ID NO: 130271 - DNA, 472 bp, Arabidopsis thaliana
aaattatatacccaacatattctttgtatgtatattttttaacataagtagtgagcattaatgttggcgacgaaaatttcattgttaggtaggggccataatgatatggaagtgatcttctgcttaattaattgtagttttaaagtccatgaccagttcttttcattgagaaataaattcctctccaatctaaatctagttttagatttttgtttaccatttttttatttgaatttccatcaaccgaaagagcttttcttttggtttgctttatttcttttttcatgctctttcaaccgtcaaagtaacgtctctagtctctttgtctacttcagttaacagtcttctactctctctctttcttttatcttttctctttttgtttgaacctcttgccttgaggaacaaagtgttgaaacataaattaagagatgcaatttgtaagaattcatacacacaaaagatatagtcg

SEQ ID NO: 130272 - DNA, 423 bp, Arabidopsis thaliana
cttctgcctgctactcttatcatggagaaaaatgttgtcggcattacaattgcacttgtaagagatgatttcagaatcgtttggtatctactattcaattcagcccccgcccctttagtcaacttgccaaatttcttagtcacaaaccacactagcgccctgactttacaggtgctaggaaacgccaaaggagcagtagcagtggtggtctctattctaatcttcaagaatccggtgtcagtgaccggaatgctgggttactccctcaccgtctgtggagttatcctgtacagcgaagcaaagaaacgaaacaaaaattagaacactaaacacacacaaagcttttacttcttcttcatcattcccccctatatatatgttatatattttctcccctatggatatacaagcaaagagtctctt

SEQ ID NO: 130273 - DNA, 1484 bp, Arabidopsis thaliana
ggcaggttcttacgcgttacttacccgtccgccactggaaacaccacttgccgtccgacttgcatgtggtaagcatgccgccagcgttcatcctgagccaggatcgaactctccatgagattcatagttgcattacttatagcttccttcttcgtagacaaagctgattcggaattgtctttcattccaagtcataacttgtatccatgcgcttcatattcgcatggagttcgctcccagaaatatagctacccctaccccctcacgtcaatcccacgagcctcttatccattcttattcgatcacagcgagggagcaagtcaaaatagaaaaactcacattcattgggtttagggataatcaggctcgaactgatgacttccaccacgtcaaggtgacactctaccgctgagttatatcccttcccccatcaagaaatagaactgactaatcctaagtcagagggtcgagaaactcaaggccactattcttgaacaacttggattggagccgggctttcctttcgcactttatacgggtatgaaatgaaaataatggaaaaagttggattcaattgtcaactactcctatcggaaataggattgactacggattcgagccatagcacatggtttcataaaaccgtacgattctcccgatctaaatcaagccggttttacatgaagaagatttgactcggcatgttctattcgatacgggtaggagaaacggtattcttttcttaaacttaaaaaaatagagaaataagaaccaagtcaagatgatacggattaatcctttattcttgcgccaaagatcttcctatttccaaaggaactggagttacatctcttttccatttccattcaagagttcttatgtgtttccacgcccctttaagaccccgaaaaatcgacaaattcccttttcttaggaccacatgcgagataacgaaaaaaaaaaagagagaatggtaaccccacgattaactattttatttatgaatttcatagtaatagaaatacatgtcctaccgaaacagaatttgtaacttgctatcctatcatcttgcctagcaggcaaagatttcactccgcgaaaaagatgattcattcggatcaacatgaaagcccaactacattgccagaatttatatattggaaagaggtttacctccgtgcttctatggtacaatcctcttcccgcggagcctcctttcttctcggtccgcagagacaaaatgtaggactggtgccaacagttaatcacggaagaaaggactcactgcgccaagatcactaactaatctaatagaatagaaaatcctaatataatagaaaagaaaagaactgtcttttctgtatacttatgtatactttccccggttccgttgctactgcgggctttacgcaattgatcggatcgtctagagatcccttcggcgcaacataggtcatcgaaacaatctcggagacccgccaaag

SEQ ID NO: 130274 - DNA, 350 bp, Arabidopsis thaliana
ctcaaataatcctaattaaaattattgctgcgccgaacccaatgcatagcgcactgaaaacaatggctccagcaaagttggaacgactatgtgttctctcattctttcttttttgtgcaacagtttttggaacagaatcattggagtcattgcctgaggataaactgatactgagagggttgaaattttatggtttccatggagtgcttccagaagagagggaattgggtggtctgtttatcgttgacattaatttgtggttgagtctgaaaaaggccattgtatcagacaacttagcagatacagttagctttgctgattcttttaggcttgtgaagaaaattgttgat

SEQ ID NO: 130275 - DNA, 479 bp, Arabidopsis thaliana
tatatcgttatgtttataatacccgcaaccccataaatatcatacccgcaaccctattttttatcatgcatagtttattaattttccgatcatctgagcatagatagtaatataaccctaaacaaaaagacttaaattacaattttatgagggattatttgatcaaggattataatctatatctatgttttaagatttagagactactttttttttctttctaaatttccatgtttaatttgtgtggatttcatatttttttactataattttttttgtttctttagtaatataatcaaatctgtttcaattcatttcattgtaaagaccaacattggattatgttcgaatttatattggcactaatatccatgattcaatagtacctagacagtgaagatatttaatgaatttgagctaaatattggctttttagcgacagtgatagtgaggtattaaattatttaatttattaattt

SEQ ID NO: 130276 - DNA, 457 bp, Arabidopsis thaliana
tggtatccaagagagcccacaatgcttgtagcgatacctgaacgatccagcttctgcataagcatagccctagattgtgcatttaaagccagtccacccccttcatcatcatcaaaatcagcagattttggagcagaatcttgtgtaccaatatgatcagagacggaagaaaccttgattgtcctaccagcaatctccagctttccatttaaggcaatttgtgctgcctttgaatgttcaagttgaacaaactgaataaatccaaatcctttgcactgcccagtttcaggatcaagtggtagctgaacaagctcaacgggaccaaatgcctcaaaaatctgtctaagctgcagttccgacatgccccaatccaggttacccacacagagtttcctatctgcagggcctggaccaccaaccgtagtgctgttagaatgggccagaatctcggaagggt

SEQ ID NO: 130277 - DNA, 387 bp, Arabidopsis thaliana
ttcagagatcacttagaattctctactctcttactttcatgttttcaaactttgcgacttgtattgggaatcttgtatcttgtattttcaatccaatcaattaagtaagtttaatcatctaatttttcttactcttttcaatccaatcaataaagtaagtttaatcatctaagttttcttactactctactacttacagaatttttatgattttatctttgaattattgataagttttcttactactctactactcaaatagtaggtctggtggtgagggtcttggattatatggttttttagattgctgaaagtttcttttaattcgatttatttatattttttttcatcagtttccgtccgaatattttcatcaatattatttat

SEQ ID NO: 130278 - DNA, 419 bp, Arabidopsis thaliana
gatcatcagagacgatgaatttggtatttctcttcacaaacccactatcagctaccactgaagtgcaagacttggaagtctttggatcaataggattcaaagtaacaactttttgcccttcaccaagcacagataattcaaaacttctggaaaatttgcaaatagaataagggtgacgaaaatagggaattaaacattcatatgctggtgaagggcaactggcaatatcaaggagattcttactgcaagtatagtaacttggaataaaacaattgtaagccaaatgtcttctatacccacatcagcacaaattctttacacatccgataatggtattgtcttcgaagaacgaagacgccgactcgagaggcagaacaagaaaagtgagaagagaatcaatgaagtcttcactgcacttc

SEQ ID NO: 130279 - DNA, 530 bp, Arabidopsis thaliana
caagaaatagaaagttgacaaaaacaagaaatataaatcttctaaagctggctttatataaactgataaaatcctcctttttgggcattgacaagttcatctgtctctcttgtcgtagtgaaagagaaaaagaaacaagtttttttctgttgggtaattttctactcgtcattggtttcatcgacattgaactagaaccagaatggctactgctacgtctcaccaatcagtcgtttcatttgcttctctccggtcttctccttcttctacaatctctcaatgtggattcaagatcgattcttcactgagctttacatcgaaaaagacaaacttttgcaagattaaagcaatggcatcatcagtttcttttaacaacactctcttgtctccttccaagacaatccctgacaattctcaaaagaaatcaaatgaagcagctttgatattgattaggcatggagaatctttatggaacgagaagaatcttttactggttgtgttgatgtgccattgactgagaaaggtgttga

SEQ ID NO: 130280 - DNA, 806 bp, Arabidopsis thaliana
  unsure (1)..(806): unsure at all n locations
aaacaaaaaaaaaatatatccaagaagctttgaagaaccatggcgatgtctcatgtccagcctgtgcttttcttcctcgcatcactcttcttcttactggctttgtgcagcgccaacgattttgaatattgcaccaaaaatggacatgattatggtgtcgtctcttggatcgaggtctttcgggttgggcctcaggaaaacccaaccctcactataaatgtatttggtactgcgacgaaagaaatatccgcgggaacccttgtatatgtagcctatagatctggggattttacaggccttttaaaaacttacgacctatgtgatgtgagtttggcatgtaacattgattctgagattgaagctggcgacgtgtttgacttcagtcttaaagacgttctttatgttggttttgatgagggaatcaagtattccgtatctttgcgtcaaaaaaccgcagaggaggaggatcccataataaaaatgtgtatccggcttcaaaagtacctgcctcagcttctgcaatttgcctctttttagccacgttggctgatgaaaagatgtttccaactctttcattatatgactctttctcgcttgcatttttccttttttatgtgttgtccaacaaataaatcaaatccttgaaccgatatcgctatagatattgctttgttgtaattttggcctgattaatatgaaccaacatgcctttccttgaaaaaaaaaaaaaaaaaagnnnnnnnnnnnnnnnnnnnnnnnnnnnnnnnnnnnnnnnnnnnnnnnnnnnnnnnnnnnnnnnnnnnnnn

SEQ ID NO: 130281 - DNA, 524 bp, Arabidopsis thaliana
  unsure (1)..(524): unsure at all n locations
gaacagtatccaccgccgattaagaagtatcctccgccaattaagaagtatcctccgccagaagagtatccaccaccgatcaagacttatcctcatccccctgtgaagtttccaccgcctccgtacaagacttaccctcatccgccgatcaaaacttatcctcctccgaaagaatgtcctcctccgcctgaacattacccttggccctcccggaaagaggaaatatcccacccaccggcttgagtatcccgccgcccgcccataataagggaatatcctccgggctgatcccatagtaacctcaaaacccaaacaagggccgtgtttgcctataagtatatgtctagttaaaaaactgttctggtctttctgttatgttctttctttttcttatgactttctgttatgatgcatcaaataaagaataaactgttctgttttgaatttgttaaataggagagtgcaagntcaaggacaaggtgtttcananataanngaaatatattttctaannnngggaaagg

SEQ ID NO: 130282 - DNA, 664 bp, Arabidopsis thaliana
  unsure (1)..(664): unsure at all n locations
caatcctctgctgctcaatctctcatcatcggcatcgctctctctattactctctcagatggatcccgacgctgtatctaaggccttcgtcgaacattactattccaccttcgacaccaaccgtgtcggtctcgctggtctctatcaggaagcttctatgctcaccttcgaaggtcaaaagatccaaggagtccagagcatcgtcgctaagctcacctctcttcctttccagcagtgcaagcatcacatctccaccgttgattgtcagccttctggtcctgcttccggtatgctcgttttcgtctccggtaatctccagctcgccggagaagaacacgctctcaagttcagccagatgtttcatttgatgccgacgccacaaggaagcttttacgtgttcaacgatatattcaggttgaactatgcctgaacagaaatcagattgttgttagcatacatcattgttgcatttctatacctatttgagcaaatccttctatcaatttttcttggccttttcttngtaattcccagatgntttnccctttgggacagagggatattngnttccaanaaggatttgggtttggtttttaggcccgngaaagggttcactttaaanttgganaatttnnaaaaggtnaanttggccaccngaaaannc

SEQ ID NO: 130283 - DNA, 514 bp, Arabidopsis thaliana
cgaatttccgggggggaccaacgcgtccgggcttgataccaacaaaagcaaaggtagtagtcatctcactgatttgggctattctggtgttggaaagtgcaacagtgtcaagtgcagtagaagatttggtggtggaacagtgcaagcacaactgtaaacatgatatccacaacaagaagaaagagtgtgaagataagtgcaatgaactgttgatgatggagatagagaaagagacaagtggacgacaagaagaagaacacaatcccttctgtgaggcattttgcaacccctttgaaggactctttcaacattgcatggccgtttgccctcgcaccaagtccaaaccagagatgatggtcataggaggagaaggtgttgctaatgagggtttgcagacaaaatgcaacagaaaatgcctgtcttacaccgaaccagaggcctataaaaaatgcatatccggatgcttcatgctccaacgaggaagtctgtgagacatcgtgcagtattcttcaag

SEQ ID NO: 130284 - DNA, 564 bp, Arabidopsis thaliana
ccctttctttttttttttttttaataccaaattaatgacttatcaatttagtattgtaatcacaatcgtgaagagaaacacaatatgttgaaagttgaataaaatctcaaatcataaagaaaatagtgtcttctagattcaataatgttcactaatttctgtttacttgttactacaccatttctttggcctcgccgtgaaaataaccaatatgttaaataaaatctcaaatcgtcaagaaatacttggactggtcagaaaaaatgagagtgatataactcatgacagtaagctttgcttggcggactctcttgtcaaaatgaaatcaactgcttcctcgacggtgtcaacgacctgaagaagttaaacagtttcacatgaacataaactcacgggaataataataatcttcttctcaaggctaagtgatgatgttgatgcttaccagatcagcaagaaactcggcatggttatcttttcctttgaatactccggttctcgttaatattgaaaaccaaggagtcccagcctgtcacacagatttacttttaatagactattaat

SEQ ID NO: 130285 - DNA, 1263 bp, Arabidopsis thaliana
atttaaatattccgtgtgatgtagaagatgaagcctctcgaagagattaatagggagaaattacagagtctattgcccctaaagagagcgaacctgttgacggaagtaaggacagtatggatggggtaattgcatcagatgaacatacaaaattttcatcaccatctaggcctaatgatgatgcagctgctacaaatgacaaggattgccaatctggttatgactcccagtttgaggatggagagttgagggaaccatacccttggtgagaaaatgaagaggttgaacagttggattacggttctgagccagaggatgagagattctactctacgggttctgagaaaggaatcttgacaaacgagaatttaagacatgttaagtgtgaatctggtgatgcactgagaattgggcaggctaatgaaggaagtgacatagagaagcaagctgttgtaaacatgagcgattcacatcctaagaagggctcttcttctccttcaaggagtttcggttcaaaaccatacaaggaggtgccttcaaatgatgccatacagagaagaaggccttatacttatgaagaggtgagcacgggtccagataggtttgttgggagagacgacaggtcagggatgcgtatgcgtaataggagtcctcggagagggtatattagtggttgggattccaaacgacacttcttcccacctaattacaaagatggttcttatagttctgggcgtccatggcataaaagaatggcagatgatcgaggtatggtgaacggctttgatgagtcagggtcaggacaaggaccaggaccagaaccagagggttatgtacgtaggcaattctcaaatggtggatacagaggtcggtttaagagattcccagatggtggggatcgtaaattcagggccccacacagtgatacaaaccaatttcctggtcggatgcacaaccggatgagtggtaataggagagagagaggtggctctccggttgtcaggagattgcaccacccgcaatcagagtcaagatccagaagccgttctccagtctcgtggaatggccgtaacagatcatctcctcctcctcccaggtggggttagacgcagatgtgaggacgacggaaaaggagtgaggcttgccttttccagaaacgggtttcctgtcagactcagggtgggttgggttaccatgtcaaccctccgggaaccagaatgtcgtcaccgaggttctttgaagggaggaataatgatggtggag

SEQ ID NO: 130286 - DNA, 843 bp, Arabidopsis thaliana
  unsure (1)..(843): unsure at all n locations
aannnnnnnnnnnnnnnnnnnnnnnnnnnnnnnnnnnnnnnnnnncgtctgcggtaccggtccggaattcccgggtcgacccacgcgtcccacaagcaagaacctcaccgacgattccataccaaacaaattcccgatctggaaacaactgacctgtgaaggtgaagtgtatcgctggaaatggcggtggccttccgtggaggccggggaggcgtcggatccggccaatctaccggacttcgtagtttcttctcctaccggatctttatctccgctttgttctcttttctcttcctcgccactttctccgtcgttcttaactcctctcgtcatcagcctcatcaggatcatacattgccgagtatgggcaacgcatatatgcagaggacgtttttggctttgcaatcggatccattgaaaactaggttggatctgatacacaagcaagccattgatcatttgacactggtgaatgcgtatgctgcttacgctaggaagctaaagcttgatgcttctaagcagcttaagctcttcgaagatttggctatcaacttctcggatttgcagtcgaaacctggtttgaaatctgctgtgtctgataatggtaatgctcttgaggaggattcgtttaggcagcttgagaaagaagtgaaggataaggtgatgacagcgaggatgatgatccgtgagtctaaagagagttatgatacacagccttaaaatccaagaagttgaaagataccaatctttgctgtccaagaacagttggccaaagggctaagaaaaaacggggcgggttgcttaccttgatttccgcccaaggtcgggctcctaaaaagtttt

SEQ ID NO: 130287 - DNA, 459 bp, Arabidopsis thaliana
  unsure (1)..(459): unsure at all n locations
gttttctcaacatttcangaaatcagtttgatggttcagtgacaggtgtgttcaaggagactttagaagtggctgatctcagcaaaaaccggtttcaaggtcatatctcatctcaggtagactccaactggtttagtttggtttatcttgacttgtctgagaatgagctcagtggagttatcaagaatctgacactactaaagaagctcaagcacttaaatctagcttggaatagattcaacagaggaatgtttccgaggattgaaatgctttctggtttagagtatcttaacttgtcaaacacaaatctttctggtcacatacctagagagatctcaaagctgagtgatttgagtacactcgatgtttctggaaaccatcttgcaggacatatcccgattttaagtatcaagaaccttntgggctatcggtgtgtcgggggaccaatttnncgggggg

SEQ ID NO: 130288 - DNA, 406 bp, Arabidopsis thaliana
accgaagatagaagctgaatggtttgctcgatatatctaggttgctccagcggaactagaaggtcttctggtatcacatcctgatatactagatgctgtcgttatcccgtgagtcatatattcagataaataccgagttgattccacgtccgaacacattaacatttgtgtatgttgtaggttccctgatgaagaagcaggtgaagttccaattgcgtttgttgttcgatcaccaaatagctcaataacagagcaagatattcaaaagttcatagccaaacaggttaataacttatgacccaagtcgtttgaatcaatcggaccgatatcatcttgttttctaaggctcaaaaccatttcatcaggtcgctccttacaaaagattacgacgagtgagcttcatcag

SEQ ID NO: 130289 - DNA, 532 bp, Arabidopsis thaliana
aatcaaacccagacttacgcaaaaacgactttgattttactgaacttcgggggggggccaaagatgatgatgggcgtccaagtagaagtgatgaagtcaatcacgctccaacaattcctggttctagtaacacctctttgcctactcaaagcaatgcacccagaccgcttgtacctcctggttttgcaagcacaattttggaaaaaaagcaaggggaaaaacctcaaattgaaagttctcaatatgagcggagtcctttaaattccaaaggcattaatgtggtgaatggaacatcagttaataatggggggaaaccgttgggaattaagataggttcaagtgagatgctaatagaaggtgaagatgttcgtgtctcctccactgatgcaaatgaacgggctgttaatatctcttcacttctaggaatatctacagatacagttagtaaggataaaagttttgaaaagctttcctcgatctcgactcctactgaaacttaggggtatcctagaaaatgtgtgcaagctacaat

SEQ ID NO: 130290 - DNA, 498 bp, Arabidopsis thaliana
aggaattatcaggttttatatctaatagcaaaagaaatgcatctgctcctgatgcagatgcagcccatgatggctggttactaccccagcaatgttacctctgatcatatccaacagtacttggacgaaaacaaatcgttgattctgaagattgttgagtctcaaaactctggaaagcttagcgaatgcgccgagaatcaagcaaggcttcaacgcaacctaatgtacctagctgcaatagcagattctcagcctcagccaccaagtgtgcatagccagtatggatctgctggtggtgggatgattcagggagaaggagggtcacactatttgcagcagcaacaagcgactcatcagcaacagatgactcagcagtctctaatggcggctcgatcttcaatgttgtatgctcagcaacagcagcagcagcagcagccttacgcgacgcttcagcatcagcaattgcaccatagccagcttggaatgagctcgagcagc

SEQ ID NO: 130291 - DNA, 1321 bp, Arabidopsis thaliana
ttctggctttggggtaaggaggaaaatcctatccttaaagctcctgatttcggtttgtccgccttcatcgaagaaggaaaagtttaccgggatatagttgggagtgcttactacgttgctccagaagtattaaggcgaagttacggaaaagaaatcgacatttggagtgcaggtgtcattttatacatcctactcagcggtgtacctcctttttgggccgaaaatgagaaaggaatattcgttgtggtcataaaaggcgaaattgattttgggagtgagccatggccttctatatctggaagcgcgaaagatcttgttaggaagatgctaaccaaagacccgaagagacgaatcacggctgcacaggttcttgaacatccttggatcaaagggggagaagcaccagacaagcctattgatagcgctgtgttatcccgcatgaagcaattccgagcaatgaacaagcttaagaagctagctctaaaggttatcgcggagagtctatcagaagaggagattaaaggtcttaaaaccatgtttgcgaatatagataccgacaaaagcgggacaatcacttatgaagaactcaaaactggggctaactagacttgggtctagactctcggaaactgaagttaagcaactcatggaagccgctgacgtcgatggtaatggaacaatcgactactacgagtttatctctgcgacaatgcatagatacaaattagatcgagatgagcatgtatacaaagcattccaacactttgataaagacaacagcgggcacataactagagatgagttggaaagtgccatgaaggaatatggaatgggagatgaagctagcatcaaagaagttatatccgaagttgataccgacaatgatggaagaataaactttgaagaattttgcgcgatgatgagaagtggcagcacgcagccacaggggaaactgcttccattccattgatcaagtcggcataaatcccaacggtttatcaaccgaaagcgattcttgaacccagagtagaagagctaaaccgggggtaaaccgaggtgagcatagttgatatactgtctcaaaatgttgttctatcttctctgtgtttgaacagatttatttatccttctccttagttagtctgaaactgattttgagagactgtcatgtcttagctccttgtaacagtaacatatccacttacgtttttttgaaactttcttgagaacaaaaaaaaaaaaaaagggcggccgctctagaggatccaagcttacgtacgcgtgcatgcgacgtcataagatttttctatagtgtcaccta

SEQ ID NO: 130292 - DNA, 470 bp, Arabidopsis thaliana
tagaaagcatgaagcttgatataacagcgttggagcaagcactctttgacgctatgaaaatccaagaagaaagcatccaagaaaaagatcaattaaaaggaataatcgaagagtcccagtttcagtctcaaagggcaaaagagaatgtcaagtacatcgaaaagcaaaacgaagacctgagggagaaatttactgcctctgaaaagagtatcaaagatttctttcaaagtactaaagaacggttagaaagtgaagatgaacagcctctaaatgcaatgtgcttcttcgctgaactgagccatgtgcttccagtgtctaatgaagttcgcaattgttttgatgctatcatgaagaaactagaactttctcagaatgtgaatttgattgataaagtggagggtatggggaaacagatacatcagcacgaagatgttgtaaagcaactcaaagaagaactgaaacaggagaaa

SEQ ID NO: 130293 - DNA, 509 bp, Arabidopsis thaliana
gttcataagcctcgtcccattttctttgagtactttgactatcacccaaatacaaatcttcatgcagtcgtacagccgtctgatgcaggtcaaggtcaaagatctgatgatcgacaagcggcggctggtcgaagttcctgataatgccactctaggggacgccttgaacactatggtaaaccacggctaaataattgttatttttttggttggagtcaaccgttttaagtatcaagaattactaacaagactattcttggtatcaaaccggtggcaaaccgagttagagctgtaccggtggctgccaaaccaggccaatggctgggagccgggggatcaatgatagtagagttggacaaacagagcggaagtgcaagaaaacagtacataggaatggtgaccatgctcgacgttgtggctcacatcgccggcgatgacggcgagagtgggcttgataagaaaatggctgcccctgtctcttctatcattggtcattgccctgagggtct

SEQ ID NO: 130294 - DNA, 523 bp, Arabidopsis thaliana
gtccgagattcacgggtcgaccgacgcgtccggaggaagacgacagaagggggagttgaaggaaaacgagagaagaagaacattggaagagattttgtatgcattggtggttcaaaagttcatggaagctaacgtatcacttgtaccttcagtaagcccatcttcagatccgtctggtcgggttgatacttggccgaccaaagtggagaaactcgagcggcttcactcgcccgagatgtacgagatgattcacaaccatcttgccttgattcttggaagcagaatgggtgatctgaactctgttgcacagataagcaagctcagagttggccaagtttacgctgcttctgtgatgtatggatatttcttgaagagggtggaccaaaggtttcagcttgagaagacgatgaagattcctccgggtgggtcggatgacagtcgaacacgccttgtgcaagccgaggggacggcaacatatcaggcggctgtatcgtctcacccagaggttggtgcatttgcgggc

SEQ ID NO: 130295 - DNA, 762 bp, Arabidopsis thaliana
  unsure (1)..(762): unsure at all n locations
caaattcctcaacagagtctgctgcaaggaaccatctaacatctagacaacaaacttcttctcctggattgagctcttccagtggagcaagtcgaagaccttcatcatctggaggacctggatcaagacctgccacacccactggaagatcatcaacactgacggcaaattcaaaatcctcaaggccttcaacacccacttcgcgagccactgtctcctcagctactcgaccttctttgactaactcgaggtccacagtatctgcaacgactaagcccacgcctatgagtaggtcaacaagtttatcttcatctaggctcacacctactgcagcgaagccgacgacctcttctgcttgatctgctcgttcagtaactagatctacccctagcaccaccacaaaatctgcaggtccttcaaggtccaccacacctctgtcaagatctactgccagatcttcaacaccaacttcaagacccacacttcctccatctaaaaccatatcaaggtcatctacaccaactcgccgtccaattgcttctgcaagtgctgcaactactacagcaaatcccacaatatcccaaatcaagccttcttctccagcgccagcaaagcctatgccaacaccatctaagaaccctgctttatctggtgcagcatctcctacagtgaggtcaaggcccatgggaggcggttaananatgcctnggtttttnnattttggaaaantcctttccaaaattttanggggnaaatttttcc

SEQ ID NO: 130296 - DNA, 1093 bp, Arabidopsis thaliana
gcggtttctcaccgtctcctcaggccggcgacgacgacgataaagaatactttttcttctctctttattaggtctctctcttcttcttcgtctgggtcctcgctagaccccaaaatcgatctggaggaggctgcggctcagctcgggaagtcttcgtctacgtcaacgtctccatacaaaggcagaaatttccactgggtgtttcttggatgtcctggtgttggtaaaggaacctatgcctctcgtctctcttctctcctcggcgttcctcatattgccactggtgatctcgttcgtgaagagctctcctcctctggcctcctctcctctcagctcaaggagcttgttaaccatggaaaactagttcctgatgaatttcataataagtttgttatcaaagcggctccaagctggcaaagacaagggtgaatctggatacattcttgatggttttccacgcaccgtgactcaagcggaaatactggagggagtaactaatatcgatctggtgattaacctgaagctacgagaagaggcattgcttgcgaaatgtttaggaagaagaatttgcagcgagtgtggtggaaactataacgttgcctgcattgatatcaaaggtgatgatgatactcccagaatgtatatgcctcctcttcttcctccgccaaactgtgaatcgaagcttataagccgagctgatgacactgaagaagttgtcaaggaaagactcaggatttacaacaaaatgactcaaccagtggaggaattctacaagaaacgcgggaagctgttggaatttgaattgcccggtggaatcccagagtcatgggcaaggctccttagggcattacaccttgaaggcgataaacagtctgcaattagcctaatcctctctctgcattttatggattgaatcaaccaacttgtcctacattctttgctcgagtaatcctcctcgtgcatatatgcttaaggtggtcaataaaagagatacatgtcccactaaaaaaaaaaaaaaagggcggccgctctagaggatccaagcttacgtacgcgtgcatgcgaagtcatagctgttctataagagacgata

SEQ ID NO: 130297 - DNA, 601 bp, Arabidopsis thaliana
acccacgcgtccgcgaaaaacgagaaagttgactggtattcgtctgcaaaaagcttcaatttaatatggtaagaagaagacaacacgaggtggctactcggggcatggtaagtgtactaatccattggcaatggatgatcttatgtttgtgaaggatccaagaagtctttcggggaagaagaataagaagaaagaggtggctaagtttccccagtcttggccttcacgggcaccaaagagcaagaattcccgtagttttcctggtgagaacaagaaacaccgcaaagaatacattgctttgaagcgccgtgagagaatgctgcagcgtggtgttgatcttgctgatattaattctcagttagagaattttgttctggagaacgtggacatgcactgtttccaacgtatgcataatcgagattgctctcaggtaagacgattagcagatgtctaccgcttatcaagtagctgcaatggttctggaaaggaaagctttgtgacggtgactcgaacatatcagacatgtatgccatctgccagcgataaacttcgcattgagaagctaataagagctggagatgaggattgtgattttgctgtc

SEQ ID NO: 130298 - DNA, 536 bp, Arabidopsis thaliana
acccttccgcggacgcgtgggcaaaagtcttacaagctgttcaagagtcttgtggttgtcggagaatacggtgttgggaagacagcattatgccagcagatcttcaatgattatgatgtgaggaatgcttatgccccgaggatttgggtatctatgcatagcaatgaatctaaggagggacttgatgggaagatatgtgtgttgaagacgatcttgaagggtcttggagttgaagagtcaatgttcgaatccatccatagagaagtagtagaagaagtttcaaacaggcaggaagctggagaaattgatggagagacggctaaagagaaggagatctctgctctgctctatgcacttcacttgaatctgaggtggaagaagtatctgattgtgtttgatgatgtccaggagatcgataactgtgacgagaaactcgatgcgaaactcaacgagggtgaaaaatggggaaagtatctttcagatggattccctaaagggtctggtgggagggtcatatacacgaccagagatgagaa

SEQ ID NO: 130299 - DNA, 683 bp, Arabidopsis thaliana
gagatccagtgccagtatctttgctcatgtccccaaacaatattcaaggccctcgctgccatcatgtagcacttgttgccactctttctctccagcgaaaagctcaaaagagtgccgttgataagaagagggttatcgacgagggagaagaagagttgcttcctggtgggaagaccagcaggtgccgcaaagccggcggggaaatcagccggtaagaaatgattccagacatcgtcggagccggcggcggatctgaagatactggagaccgccgataaacggcaaacgtcgagaggagttgtcaaggaaaggatcttggcgatgcaatcttctgggagattattcattgcttcctccgattgattgcttatttgcttgattgattattttggggtttaaaagatcttttcctctttctcgattatatagatacgacttgttcgatcgagcaaagtatcgctcacatttaatgagttttatactagtagtcaaaaaaagagagacgtggaagtcgtgcattgattagttaagtaaaaacggatacttagggatgaagccacacgtgtctattccttactcgtttttttcagattactttcctcatgactgactactagagtaagcaacacccacctgtcccctgttttttactaattttatccagaaaatcatttttttttttt

SEQ ID NO: 130300 - DNA, 617 bp, Arabidopsis thaliana
gataataatcaatacaaaataatggcttggttcatgcataaatggccatccccggtacaagagaaggttccatcggaacaaaattttattttagtttggggtgcccccctttttaagtgtgaaaagaaatgacaaaaagatattggaacatcgatttggaagagatgatgagagcaggagttcattttggacatggtacgaggaaatggaatcctagaatggcaccttatatttctgcaaagcgtaaaggtattcatattataaatctgactagaactgctcgttttttatcagaagcttgtgatttagtttttgatgcggcaagtaggggaaaacaattcttaattgttgggacaaaaaataaagcagctgatttagtgtcgcgggctgcaatacgggctcggtgtcattatgttaataaaaaatggctcggcggcatgttaacaaattggtccactaccgaaaaaagacttcataagtttagggacttgagaactgaaccaaaaggcagagggattcaaccgtcttccgaaaagggatgcagctgtgttgaagagacaattatctcgcttggaaacatatctaggcgggattaaatatatgacgggattgcctga

SEQ ID NO: 130301 - DNA, 921 bp, Arabidopsis thaliana
  unsure (1)..(921): unsure at all n locations
cttctcctatgaattggagagactntttcacttgttatattgctccagatcntccaaatcctgaggaaatccctctagcttgcaggagtgcggtgatcgaatacacgaagcacgtaatggaattaggagctgtgctcttccaacttctctcagaagctttaggtttagactctgagacacttaagaggattgattgtcttaagggtttgtttatgctctgccattactatccaccttgcccacaacctgacctaactttgggcataagtaaacacaccgacaactcttttctcacgcttcttcttcaagaccaaatcggtggtcttcaaggttcttcatgaaggttattggggtcgatgtccctccctatacctggagctctttgttgtcaacattggtgatttcatgcagctgataacggacgataagttctttgagcgtggagcatagggtacggaccgaacaaagatagaccgcggatttcagttgcgtgcttctttagctcgagtctttctccaaattccacggtttatggaccgattaaagatcttttgtctgatgaaaaccctgctaagtacaaagatatccccataccagagtacactgcaggatttcttgcgagcatctttgatgaaaagtcgtatttgtctaattacatgatatgaagaaaagacttgtccgtgtgcaaaatatatatttgtgcgttttgcatatgttacgctactttttctttgttcccgctctagagttcctcaaccattgtaccaataagaaaaaatgttttttacttcatgcttaaaacagcattctaggcttgtagctaacaagtcaaactaaaaaaaaaaaaaaaaaaaaaaaaaaaaagggcggccgctctagaggatccaagcttacgtacgcgtgcatgcgacgtcatagctc

SEQ ID NO: 130302 - DNA, 462 bp, Arabidopsis thaliana
gtccagttgatgcattcttttaactaaaaaaacagattctttaccaatgaatttgagacattttgtttggcagctgataacgaacgataagttcttgagcgtggagcatagggtacgaccgaacaaagatagaccgcggatttcagttgcgtgcttctttagctcgagtctttctccaaattccacggtttatggaccgattaaagatcttttgtctgatgaaaaccctgctaagtacaaagatatcaccataccagagtacactgcaggatttcttgcgagcatctttgatgaaaagtcgtatttgactaattacatgatatgaagaaaatacttgtccgagtgcaagatatatatttgtgcgttttgcatatgttacgctacattttctttgttcccgctatagagttcctcaaccattgtaccaataagaaaaaatgttttctacttcatgcttaaaac

SEQ ID NO: 130303 - DNA, 425 bp, Arabidopsis thaliana
caggcaccgatccgaattccgacctacgacgccacgcagtctctattgttgtcgtttcgaaacaatttccttatctcgatctcataggggcaggaagagacatgggtgatagctgtgccgtctgcgctgacaatctcgagatgggttgcctatggatcttgtggtcaccgagaggtttgctccacatgcgtcgttcgtctccgattcgtcctcgacgatcctcgctgctgtatctgcaagaccgagtctcctatcgtttttgtcaccaaggcatcgggttgtttatacaaggacgatcaatgatttctccaccttcccatcagcaccaagggaaggtcgagtcggagctctctggtatcatgaagacactcaggctttctttgatgacttggatcagtacaggatgatcaaagctatgtgtagac

SEQ ID NO: 130304 - DNA, 385 bp, Arabidopsis thaliana
atcctctagttccacaagaatccttagtcggaatgggattccagcgctgcaccttttgtgattgggagaagagccgccctttggagagcacagtacgatgaaagttgtaagctgtgttcgggggggagttcttgtctatcgttggcctctatggtagaatcagtcaggggcctgataggcggtggtttaccctgtggcggatgtcagcggttcgagtccgcttatctccaactcgtgaacttagccgatacaaagctatatgatagcacccaatttttccgattcggcagttcgatctatgattcttcattcatggacgttgataagatctttacatttagcagcaccttaagatggcatagccttaaagttaaaggcgaagttc

SEQ ID NO: 130305 - DNA, 744 bp, Arabidopsis thaliana
  unsure (1)..(744): unsure at all n locations
ggtggatctgtatcttacgagaatgttgatgaagctcgattctgtgttggggtgtacatgcatcttcagaaaactctgaagtcgttgggtgcgggtaaagtctctgtgggagtaataaccccgtacaaactgcagctgaaatgccttaagcacgagtttggcaatgctttgggccaagatgaactgaaagagatttatattaatacagtagacgcgtttcagggtcaagaacgtgatgttataatcatgtcatgtgtgcgtgcttctggtcacggggttggcttcgttgctgatatccggcggatgaatgttgctctcacccgtgcgagaagggctctgtgggtgatgggaaatgcatctgctctgatgaagtccgaggattgggcagcgttgatctctgacgccagagccaggaactggtttatggagatggactctcttcccctggatttcccggtccctaaggtacctagctttaatcccatgagcacctaatgctagaggtttcaaatcaggtgggccaaggaccagatccatcgntattgcaccctgaattccaggtcaagggacaaccattcagaagncggcaaaggaagctngggcacaacaaacattttccaaggaattggnatttttncgaaggggggacntcagtttgtgntttttnanccccccnggggggtaggntttgggggggnttttgnaanaggggtcccaaaggggganaantttttggcggctttt

SEQ ID NO: 130306 - DNA, 670 bp, Arabidopsis thaliana
atgagtacttacggtatcatatccactcgagattggaggattctaagctgaaagatggttacttggttgacatggggataggagttctcactggtgggcttggaggcatagctgtaggaatctatatagtgtgtttcataaattccatcataaaaaatgttgctattttatatgaatattacttctgcttctatgatgcagtgctggtcagctgttttgccttttgatgtagcaaaaaccataatccagacctcttcagagaaagctacagagagaaatccttttaaagtgttgagctcggtcagtcagccatcttccctctatgaatctaattaccgatacaaaagagtatatgaaatattggttttgactttaaatcatctctgcagattcacaagagggcaggactcaagggatgctatgccaggtttgggtccaacccattgtgagagcattccctgctaatgcagcagcaattgttgcttgggagttctcaatgaaaatgttgggaatcaaacgtgactaggattagtcttccaatctaatttatttggttcgatttacagatctttaaaccacaaggagcttgcatttgcttcagattttgatgagctttcatgtaacagaactacatatagcacgaatcaaaagtgtctcccagattattatt

SEQ ID NO: 130307 - DNA, 968 bp, Arabidopsis thaliana
atctgtaatcttttgatttttttcgtcaaattaaaccacaaaaacctctccatcgattcggataatccacaacactctgcgatgaaacccgacccgaccagacgcagaaacagagccttatcttcttcttctccatcaaagacccgacccgaactatcttccgggtctcccaaccggaataccggtgaagcccgtggtggaaaggtgaaaacttcggccactttactcgaccgggaggagatgggtcttttacccgggccgggttacggtgacccgaatccagaacctaggagttttccttatagtgtgaagcagcaatgttgggaaaaagcagagaagattaaaggaagagatcctgagcgttggaggagagatcatttagggaacattgtgtttaggaagcttgttggttgtcctggatgcttgtgtcatgattatgatcacattgttccttactccaagggcggcaagagcactctggaaaactgtcaggttttgcaggcaaaggtaaaccgatcaaagggtaataaaaccgatatttctcgatccgagcttatccaaaggagttcttactgtcgagttgctggccgagatatggatctgattgagctaacagcttacgggaatgtacagcgtgcacctacgtccagcggatgcagaattcagtgatctgttgaagatctattgatggaattgaaaatgttgggtttctcaatatttacttggtcaagagtctgtaaacttgcagttcttctccgagttacttgtgtactcattagtcattatctttcctatattgtggacatgtaagtaagttgtaagttgtaacattagtcatttagtgctcatgcttcttctatattctattaagttctactctttttattaaaaaaaaaaaaaaaaaaagggcggccgctttaaaggatcccagcttacggaaggggtccatgcaacgtcaagctgttcat

SEQ ID NO: 130308 - DNA, 614 bp, Arabidopsis thaliana
tgaatcgtcgttatcaaggtgatttctttctctgcctcaaacatcgcttaccctcttgattgattcctccaagcttcgtcgtgtggtttcacaggttttacttatggttaatgcaatcaaaggagtgttcgtctcttgcgatattccgatgacacaattcatagtgaacatgaacaattcgatgcctccgtctcagaaattcataattcatgtacttgatagtactcacttgttcgtgcaaccacatgtagagcagatgatccgcagcgccatttctgattttagagatcaaaactcttacgagaagcccacttcttagatcacatcacatcacacttgcttcttggtttttctttcatttgattcaaatgaataaaaacttcattgagatcgtgagattgggttgatatggctcatgctttaatagagttaaagtgaactttgttgacaaataatctctctgtaccggtttagtatcagtcggttttctctggttgtgttgattactttgtcactcttttgttgaataaacacgtttgtttggttattgttcaattacttgtagtagataataaacagattaaagaattcggaagttccaaatttcattttac

SEQ ID NO: 130309 - DNA, 1100 bp, Arabidopsis thaliana
gtaattaatattgacataatagaagtaagtgtttttataaagtaaccgaactcaaaagaagacgcattatttatggtccaagaccggacatttggatgaatgcaacttagaaaaattggttgaatagatagatagattgaaaagatcataactatacttaacaaaaaaatactaagaaaagtccacatgcggcgaaggttttttgttgctgtcggaaaaaggagaagtccaactcctagtaaaataggtactggaagtggaatgaaagggatgatccatgaatattgatatgtatgttccataaaataaaaaatcctttttattttattcttaattttattttttcttattcactggtttgtatatatatatttttttttcaaaggggacaataaaaaagcacgcgatttcaaacctaaatagaaatgttttcgaattaatataatccttcataaatctttgaaaagcaatatatattcaaataaaaaaattagaaatgattaaaaaatattactaagttactgtcaaaagattttatttgtctttttttattactactaaataaaattttattgtgattttatgcaaatacagaaaaagtgaattataattccatattacaataatttatatacatatattaagaatagaacaaagatttccacgacaaaaaaaaacttaatattaattatataaaaaaagcttgacctaaaacaaagttatttgagtttgattatttaggattgttaaggaatggattttcatcgtggaatttagtgattgtctttcagtacactaagtgagctttttttatttatattttttaagaaagattactataatcatatgttttttttacatatgatgtgaagaaatattataatttttttataatataagctatcagtatagattatttaaatgagtactctcatacggatttcaaacgttaaaaaaaaaagttgggtttgaaacttttgaatgtcttttttgttttggaaattatttataattaaatttgacagaaaaacacaaaaacggcgtacgaaacaataaaataataaatgtctttgacatccaattataccactgaaattttt

SEQ ID NO: 130310 - DNA, 755 bp, Arabidopsis thaliana
  unsure (1)..(755): unsure at all n locations
caaaacttcaaacaaaaggtcaaaagctaatttcttttatttgntaagaaaaactaatttcttcctcttcgacctctcaagcatcattagataaacaaatcctattcccgtcatggcagcaatgaccgcggcagcagttccagcaactggatctttccagaaacaagacgaggagtggcgtgcggttctgtctcctgagcagtctagggcttctcagactaaaaggcacagataaacgaggcaaaggagagtttacaaagaagttcgaggaagggacttatagttccacccgctgcggcccggccctttataaatcagaccactaaagttcgactccggttgcggttggcctgcgttcttcgacgccatccccggtgctattaaacaaactccagaagcaggtggaagaagaatggagataaccatgtgcagtgtgtgatgggcatttaggccatgttttcaaaggcggaggttactctactccaacccgtcaacgtcactgcgttaaacagtgtctctctcaaattcttcttcttgctgggtcctcccaataatcatatcattgatcggaccactttatctcatgaaatcaagaatctattctatgatctgtgtgagcttgcnaggtttctttcccatacgcatgtaatatnatgattcccatgtgtgtggttttcncgactttccaataaatggtattggattccacntcgtcgnatggancncnctgnaaananatggaaaaaacnttggga

SEQ ID NO: 130311 - DNA, 467 bp, Arabidopsis thaliana
aacctaacggaaataattattttactaaccggttaatgtcttgattaaaacattttatgatatgccactaagagagttagagacgtatggatcacaaaacatgaagctttcttagatggtatcctaaaactaaagttaggtacaagtttggaatttaggtcaaatgcttaagttgcattaatttgaacaaaatctatgcattgaataaaaaaaagatatggattattttataaagtatagtccttgtaatcctaggacttgttgtctaatcttgtcttatgcgtgcaaatctttttgatgtcaatatataatccttggttattagagtcaagctctttcattagtcaactactcaaatatactccaaagtttagaatatagtcttctgactaattagaatcttacaaccgataaacgttacaatttggttatcattttaaaaaacaagattggtcataatatacgat

SEQ ID NO: 130312 - DNA, 530 bp, Arabidopsis thaliana
cggacgcgtgggcggacgcgtgggcggacgcgtgggcggacgcgtgggtaagaatcagacagaagttgcagagaaaagagaattaattgattggtgtaatggagaaggcagttcatttatccaccaaaaatggacccaaggttccaggagagccaacgaagaccggaacctccatggttgacacggcagcttcagccgtacaaagcttcgctccgattaaccaaatccaccaacatctctgcgcgtttcatttctatgcatatgacatgacccgacaagtggaggcacaccatttctgtggtcacatcaacgaagacatgcgccagtgtctgatctacgacggtcctgatgccaacgctcgtctgatcggtctggagtacattgtgacagagaagctctttatgacattgcctgacgatgagaagaagctttggcacactcacgagtgggaagttaaaggaggcttcttgttcatgcccggtgttcccgaagctattcaacggcaagatctcgaaaaagtcgccaagact

SEQ ID NO: 130313 - DNA, 747 bp, Arabidopsis thaliana
  unsure (1)..(747): unsure at all n locations
tttccccacgtgtgtggcctacaatctctatcgattccacagcacaaaaatcttttgcgcttttgagatttttccagaattcaatctttcgagtgttgttgaattcagaaatggaggtttcgtcttcactcaagctctcatcggcgttatctccttccatcatcaaacttcagggttcttcatcaagtattgatataaaattctctaagtacacttcacttcctaaaccgtttcttcaacttgatgataaaagccgacgtcttcgtgaccaacaagtttcacattctctcgagctaaggtcttacagaaaacgggtcactgcgaaatcaggttctcaaggttgggactttggtagattcgtcaaaacattgtactttttcaatggaccaccatctcctctaaagtttgtttcatcggtgtttgagaaacttactaacggagcaacggaggaaccggttgctgaaatgggaacttctggaatcatacttgtggctggagcctcctgggggtgtaaggaagaaggattgttgatatcttgaggaaaagagggttgcctgttaaagcattggttagaaatgaagagaaggctcggaagatgttaggacctnagattgacttgattgttgcagatattccaaaggggatacattggttccngaaagttcaaaggngtttnggnaagtgatcaatgctgtttctgttattgttggnccnaaggagggggtcncctgngggcaaaatntattg

SEQ ID NO: 130314 - DNA, 439 bp, Arabidopsis thaliana
  unsure (1)..(439): unsure at all n locations
aaaaagtacaaancttactcttttatctgcttgattttactaatcactcgccaaggacaaccaatggccggtcgatcaaccggtcacttgaaaaacgtagtgcagaggttaagaacttacacgacggcgacaaccgcaccaagatccaaagcgtattctacggcggcaacagagtatggtggccagagaaccgccaccacagcggcagcaacaaaaggtgacttcacaccagtttacgtctccataggattgatttcattgtcagtaacatgtggtgtctacactgcgtatcttcatctacatgaaaaccctggcgtacgtgtcaacaagaagatgagagagaccgctcccgagatcgaagatccagatagagctctaaacgaagcggaccgcgtcgctaacaggtcttgggttaggaaaatagctaacgttcaagagt

SEQ ID NO: 130315 - DNA, 574 bp, Arabidopsis thaliana
  unsure (1)..(574): unsure at all n locations
gacggcacattggaatccacatttcaatantattcctgtctggnctcaggtccggatggttgaggatgatctcatgtacaacactttccttgaggtgtatgagaatcactgtgcacgcaatgaccgagaggcagatcttccaattacccactttaaggagcaactcaatcaagctatatcagggcaaatatcagcagaggcaataggagatcttcgtctgcaggcatatattgacatcacaaaaaccttggtcaatgacagtatcttttctcagtacatgtacaagacgttgatgagcggaagccatatgtgggctttcaagaaacaatttgcagtccagctagcagtctccagtttcatgtccttcatgctacaaattggtgggaggtccccgaacaaggtcttgtttgcaaaaaacaccgggaaaatgttccagacagattttcaccctgcttatgacgccaatgggatgattgaatttaacgaacctgtgcctttccgcctcacaaggaacatgcaagctttcttttttcagtttggagttgaaggtctccttatgtcatccatgtgttca

SEQ ID NO: 130316 - DNA, 504 bp, Arabidopsis thaliana
cactcacacaaaattggtcctaaacgagtctccttcagtcgtaatttgcagcagagcaacgatggcagcgactccaatggaaggcaaatgggttcagcttaaacagaaaggaaccggaccaggagcaagaagctctcatgctatagctcttgtgggaaacaaaatgtatgcctttggtggcgagtttcaaccacgtgttcctgttgacaaccagctctacgttttcgacctcgaaactcagacatggtctatccaggaagcttctggggatgctcctcctcctagagtaggtgtagccatggctgcagtcggacccatcatctatttcttttggtggccggggctcgactcaccagggagctcaaacgaggttatccttgttttgaacacttttgaccaacccagtgggaaccttactctctttcaggggaaacccggtccccagacccggagcttaccactctattactgcggattctcaaaacgtgtatgtgtttggtggat

SEQ ID NO: 130317 - DNA, 439 bp, Arabidopsis thaliana
tttatcatctccttctctcgagcccaccttcgcttcttcttctccctccttctcctcgccgccctaacctcaccttaatccgccgtatcccagctcatcctcgcctcggaaactcgaccagcttgctttcttcttcgtcaccggtaattcggaaaattctggttcgtagcactctccgggaagaccaacccatcgcctctgactccgagagtagtcctactctactgatcggtgaagattctgctgcttttgaattagggaaacagaagcttgtttcctgggtttatttcggtgttgtccttggagttgttctctttatcctcaatgttgtttggatcgataattccaccggtttcggaaaatcattcatcgacgccgtctctaacatctccggctcaccggaggttgctatgttaatgcttatccttatatttgcaat

SEQ ID NO: 130318 - DNA, 475 bp, Arabidopsis thaliana
cgaacacaatctgcttcaagatttatgtgtttgatcagacacaaaaagtatctctctccgtagttttgtgtcaaggttatgcaagaagcggcactaggtatgatgggagccaccgtaggcggagacggagacaccgcggtcgtggcggagcagaatagacagttgaaaggtgagatagcgacacatccgatgtatgagcaattattagccgcacacgtggcgtgtttaagagtagctactccaatagatcaacttccgatcattgaagctcagctttctcaatctcatcatcttctccgttcttacgcttccacggccgttggataccatcatgatcgtcacgagctcgataatttcttggcacaatatgtaatggtgttgtgtagcttcaaagaacagctgcaacagcacgtgagggttcatgccgtcgaagctgttatggcttgccgtgaaattgagaacaaccttcattctt

SEQ ID NO: 130319 - DNA, 425 bp, Arabidopsis thaliana
gcgggcaaaaaggtcattatctgatgatgccggtgaaccccgtgcgtaacatgacggagtgtggaactcttgcgtacgcgcttcgaagattcaagaaaagacgttgaagatgacaaagaaagcggcgtttatgttcctgacgagagggaagcttcctttggctaaactgtgggagagatttttcaaaggccatgaaggtcttttctctatttacattcatacgagtgaccctttttactttgacgatcatacgcccgaaacttcgccgttttatcgccggaggattccaagcaaggtcagtagtcaatttcctcattaattcccctcagattatataattgatataggcgaattcttcatagataaacttaattagcctagataatcttgatatagatatttaaagatatatttgcgatattcgg

SEQ ID NO: 130320 - DNA, 886 bp, Arabidopsis thaliana
  unsure (1)..(886): unsure at all n locations
nnnnnnnnnnnnnnnnnnnnnnnnnnnnnnnnnnnnnnnnnnnnnnnnnnnnnnnnnnnnnnccacgcgtccgcccacgcgtccgtcggctgnagaagccacagaaggggggagattaaattttccagagataaaaccctagagagattctcatcttcttttcttcaatctctctgagaatttctaggttttcgttaccgattgggtcaatctggtgaaactcaaggttgagatcagataatttaattggaagattttaggttatggagaacagaggccagaaacgaatggaggttgtggaagagctacctgctgataagagagcttgtaactctcaggattttagaccaagcacattcggatcatctgttcaagctcaagctaatgatacgaatccaggacatgaaaacgttgacgctgatatggatacttcttcatctgcttcgccttcgagtcgatcagatgaagaagaacaggaagagcaggataaggaggattcggactatggatcttgcgattctgatgaggaagatccgaggcagagggtgcttcaggattaccagaggcagagatcatctggtgatcatgggaaattgaagtctcttttgttgaatttgactggagaaactgatccttctggacagttatccaggctcactgagttatgtgaagtgttgtcattttctactgaagaatcgctgtccagtgttatggccaacatgctatcaccggtgcttgtaaagttagctaagcatgagaacaatgcagatattatgctcctcgccnnnnnnnnnnnnnnnnnnnnnnnnnnnnnnnnnnnnnnnnnnnnnnnnnnnnnnnnnnnnnnnnnnnnnnnnnnnnnnnnnnnnnnnnnnnnnnnnnnnnn

SEQ ID NO: 130321 - DNA, 487 bp, Arabidopsis thaliana
ctttaattcataagagtgatgattatcgctgttggttcttaaaaaagtaaggaacaaacatctgtttcgtaagtttcagcaatgtacagtggaactgtgaagagggtatcaccactgcaagatattaaactgcgtgtgcagattacagtttctttggaaatggaggataatgatccgaataaagaatatttgtatgctaaaggcttaagtgattttgttacttggctaaatgctgataagaaaccgcttcacgatgtgctgggatttagaaaagagataaatggtaccaccataaacatcgcgcttcaatggtgcgtagatggatattcaaacaaaattctgggatacgccaatggcatccgcaccatggatggtggaacatacatagatggtgtgaaagcgtcaataacaagaaccctgaacagccttttggagaagtctaagcttgttgaggacaaggatattatctttactgaggagcatgtta

SEQ ID NO: 130322 - DNA, 1104 bp, Arabidopsis thaliana
ggcggtggaagctgagacatgcaacaatggcgttcgtgtcattctcttcttctccttctctctctcttacactcgcgattcaacattaatttcgttcttcttcatacacatctatagatagcgtcttcagtgtccaaccatgaccggtggggaaatcctccacaagatgaaggaatccgtcaaggagaaagttgggcttggtgcatctgcttcatctgcagattcagggaaaggtaagagcaagatgtcgaagcagatcacacatggttttcatttggtgaaagggaaagcttttcacgagatggaagattatgtggttgccaaattcaaggaagttgatgataatgagcttggtctgtttgctatcttcgatggccatcttagccacgagattccggactacttgtgctcccatttgtttgagaacatcttgaaagagccgaatttctggcaagaacctgagaaagcgataaagaaagcttactatataacggatacaacgattctagacaaggcagatgatttgggaaaaggaggttctactgctgtgactgcgatattgatcaattgccagaagctggtggttgctaatgttggtgactctcccccggctattttcccaaatggtgttccgacccactctcagttgatcatggcccgaacatggagagggatgaaatcgagaacagaggaggattcgtttctaactttcctggggatgttcctcgagttgatggtcaactggctgtggcaagggcatttggtgataagagtttaaagatgcatttgagttcagaaccatatgttacggtggagatagttgatgatgatgcagaatttcttatcctagcaagtgatggactatggaaggtcatgtcaaaccaagaagccgttgactcaatcaagggaataaaagatgcgaaggctgcagcaaagcaccttgcagaggaggctgttgcaaggaaaagctcagacgatatctcagtcgtcgtcgtgaaatttcagtgacattagctttcggttagtcttttcttcttcttttgggcgactctaacactttacttgtaatctgtattataagccttttcaattaagacgttacgc

SEQ ID NO: 130323 - DNA, 583 bp, Arabidopsis thaliana
  unsure (1)..(583): unsure at all n locations
gcgtccgaggaatcaatgcttgtttactatttggggatgaggattatttatacatttttcaagaagctgggggatctgcaatgcagaaccgtgcacaaggatccttggtatgtagaagtcaatatggattccgcagctattgtctggccagtatttaacagccttcaagctttctggccaggacttcaggttttagctggagacgttgatccagcaataagaactcacactgccttctttagcgtctggaaacgatatggtttcacccctgagggttttaatcttgctacacttagtgtccagtatgggcaaaagagttatcccttaaggccggaattaatcgagagtacatactggttgtacaaagctaccagagatcccaggtatcttgatgcaggacgtgactttgtggctagtttgcaatacggggcaaaatgtccttgcggttattgtcacatcacagatgtagnactncataaacaagnaggtcacatggggggcttnttcctcggagnaaanccgtaaagnactttttggntnncncttttgacttnncctgatttaacncngggtaaatctcgtt

SEQ ID NO: 130324 - DNA, 460 bp, Arabidopsis thaliana
caattatccaataattaattatggccaaatccaagttctagagttttctctagaaatatcatcatttccacctccttaaaagatgctagaaattttctagaatcatcttccacctccttaaacataaaaatctagatactctaatagaataatctagataatttgaataatgtaatctagatcttatgtaagaactctctagacttaggattaaaatattttagatattttgtagtttggaggctataaatacctcctccccctctcaaatgttgcaatgttgtgaagttgtattcaagttttaagcaatagtaataaaagttctatttcctaaaaaactctctcaaaacacttaaacacttttctccattaccctctaaaagaatgttaactctaacaagcttttcagggaatctaactacccttcgatccgatatctcatccgagaattatctccatg

SEQ ID NO: 130325 - DNA, 609 bp, Arabidopsis thaliana
  unsure (1)..(609): unsure at all n locations
nnnnnnnnnnnnnnnnnnnntgaggtcaactgcacgcgtacgtaagcttggatcctctagagcagtccagccctctttgttttttcctttatgtaagaactctctagacttaggattaaaatattttagatattttgtagtttggaggctataaatacctcctccccctctcaaatgttgcaatgttgtgaagttgtattcaaagtttaaagcaaagtaataaaagttctatttcctaaaaaactctctcaaaacacttaaacactttctccattacctctaaaagaattttactctaacagttttaaccagacacagagccgtgtgcggtttgaaaatcggagacactggtcagcagatgatgcgtagccttctcataattcacaaaacccatgaaccagaagtcatgaccatccaccgtcgtcaactgaatatacttctcagggggagtctctttcaccaccaccggattcaccggcgcttacattcgccaaaggacaaccaccctgtagtagccccagatctgnccagangggctgggagacaggggcgtcggacaangggccgggatcgaagnagnagtcngaaaggctgcgcgcggggaaagga

SEQ ID NO: 130326 - DNA, 640 bp, Arabidopsis thaliana
gcggtaacctacaaagcggattttctctcaagaaagacgcagagagcgagtttgagatccctgaaatcgtggccacattcaggaagaacaaagagagagtcaacgagatgattaaagagagtcttcaaggcaatacaattggtcagagtttgttgagtttgatggcggaaactgtgtcagagtcaacggagatagaccgatacataatgtctagctggtgcagaaagcctttctacgaggttgacttcggatcgggtagtccggtctgggtgggatacgcgtcacataccatttacgacaacttggtgggtgtcgtgttgattgattcaaaagaaggtgatggtgtagaagcatggataagcttacctgaggaagacatgtccgtgtttgtcgatgaccaagagttgcttgcttatgccgtcctaaatcccccggtcgtggcataaaacaagactctaccaattgctctacgatggatttaattaattattggctttcgcttttcgttgtgatttgaataaagtgaccaatcatttcaagttccatgttaattcagtttatatgttaccttgatcttgtaaaaactctatatggttatttgttttgtcaaaaaaaaaaaaaaaaagggcggccgctctaa

SEQ ID NO: 130327 - DNA, 520 bp, Arabidopsis thaliana
  unsure (1)..(520): unsure at all n locations
ggaatnnnccgggtgcgacgccaacgcgtccccggaaaaaggtggggtnncatgctggaacactttgatctctcatggcttactcggtctatcctaatcgtgctgcgcctcggtaaagaccacctaagggggttgttgacacgatacccaacggtgattgatcaaagcgttatacgcccggacgtttttcgtctttggttgaagccccacttcaactcttagacgcttgactctcctcgtgattcaagcgagagtcttgggagcatataaaaagatgatgacattatagaaagctttgacatcatttcttggagaaatatggcaagttccaccgatgttctctgcgatataagttggaggtgagaagatgtacgagaaggcatgaagaggagaaaccgtagagctttctccaagaagaatttcaattttccagtttgacattgaacgcagtttagatgacagacaaaatctgatattccgggttttatgctctaagggtacatacatatgatctctttgt

SEQ ID NO: 130328 - DNA, 904 bp, Arabidopsis thaliana
  unsure (1)..(904): unsure at all n locations
catttaacgaccctgtgtttcacggctttgtgtgcacatttgcattttgcatattgtttagccagcaattccatgcttgggcacatggaaccaagagcaagcttccacctctcgtggtcgcgttgcaggacatggggttacttgtttcacggagacagcatgcggaacatcatcgagcaccgtataacaacaattactgcatcgtgagtggagcatggaacaatgttctggatgagagtaaggtctttgaggcattggagatggtgttttatttccagcttggggtgagacctaggtcatggagtnagccaaactctgactgggtagaagaaaccgnaatctccaacaaccaagcataaatattttttttacagagtgatacatgtacaagaaaatttcagtaatatactgaaaagatttcttcgtaatttatatgtaacgagtgtgactgtatttaatactgtataaaacaagcaaaacaactgagcatgtaccatttaagtatcagatccgatggatgagtaaaccgaagaaacacagggaaaccagtaccgacactttccgtctttatggccattgtcgatcatggcaaggccctcctctaacaaagtttcgagagcatctataacgcgaccagatgtccatgagaggcgtctttgtacctcttccacaatcacaaagccttggccctgagccaactccaaaatctggttatgggctttgttcagctctgtgggtactgaacggacaagctttttcttgccaatagtgataacctcaaatccgctacccaatacctttagcttgctaatagctcgaagacaatcatcttcagtcacagcttcacggtctttcttccttctctgacgaagatggttgcagagctcttgcaagctgatcaaac

SEQ ID NO: 130329 - DNA, 1026 bp, Arabidopsis thaliana
  unsure (1)..(1026): unsure at all n locations
cttcttcggagaaggctttgtgtctgtatcatctgattatagcgcagagagattaggtgaggtgaaggagaaacatggggagaatctttggagcgaagaataacaaagagcctcctccgtctattcaagatgcctctgatcggatcaataaaagaggagattcagtggaagagaaagttaagaggcttgatgctgagctctgcaaatacaaagatcagatcaaaaggactagacctggtcctgctctagaagctatcaaagctcgtgctatgagagttctcaagcaaaagaagatgtatgaaggacaacgtgacatgctctataatcagacttttaaccttgatcaagtttcatttgctgctgaaggccttaaagatgctcaacaaactatgacagcgctaaaatctgctaacaaggagctgaaaggaatgatgaaaaccgtcaagattcaagatatagataatttgcaagatgatatgatggacttaatggatgagagttctgaaattcaagagacacttggtaggagctacaatgttcctgatgacattgacgaagatgacctcctgggcgagcttgatgctcttgaagctgacatggggaacgagactgaagcagacggagtgccttcttatctccaacccgataaggaaccggatcttaatgatgagctcaacttgccttcagcaccaatggggcatacaggagctccacccggacgagctcaggctgaagatgaatggggattaccagcggtaccacgtgcatcacttcggggctaaatcccatttacacacctctttgtgtgcataaatattcatctccagcgactatgcttttaaagtcttgttactgtatgtaataagtttnttgnttagcaggttcattaaccnnggaattcctcagatttgggctntattatnttatttnattagggaatcttatcgggagncttcaagcaatcggaattcttaatngatggtttangattttttggntgaaaaggtgaangtttttggggttcaa

SEQ ID NO: 130330 - DNA, 809 bp, Arabidopsis thaliana
attgtccgtctgcaagtaccggtccggaattcccgggtcgacccacgcgtccgcaagaagatgaagagtacagaggaagaagaaatcggattctccaatttagacgagaatctagtgtacgaggtgttgaaacacgtcgacgcaaagaccttagctatgtcatcttgcgtgagcaagatctggcacaaaacggcacaagacgagcggctttgggagctgatctgtactcgtcactggactaacatcggctgcgggcagaaccagctcagatctgttgtgttggcgcttggtggcttccgaagactccactctctttacctctggcctctctctaaacccaatccgcgtgctaggttcggtaaggacgagcttaaactcactctttctcttctctcaattcgatactacgagaagatgagtttcactaagagacctcttccagaatccaaataattgactacaaattattagagtttggttttggagtttgtgtatttggagtttgttgattggtaagtcagatgtgatgttcaatgctggcaataaaatttgttggtatccataagccagactgttagcaacagttgtgttctgtaataatagagggtgatgagaatttttaattactgtaatcggagctgattaaaagtagatttaatatcaaatgtgattcgattttgttgtaatggttctgtcgtgaagttaagttggtccgtagttggacaatgattgtaacaaaatcgattcgtgatccagtttggtaagattaagaactgttagtgaccaataaaatagaaaaaaccgttttt

SEQ ID NO: 130331 - DNA, 441 bp, Arabidopsis thaliana
ctcaatctcttcctctcaaatccaaacaactttgattgatccttcgccaatcgattccacatgaacgcgcagtacttaccgactctgatttggccggtgatgctcacaacgagacaaacaagaagatgaagagtacagaggaagaagaaatcggattctccaatttagacgagaatctagtgtacgaggtgttgaaacacgtcgacgcaaagaccttagctatgtcatcttgcgggagccagatctggcacaaaacggcacaagacgagcggctttgggagctgatctgtactcgtcactggactaacatcggctgcgggcagaaccagctcagatctgttgtgttggcgcttggtggcttccgaagactccactctctgtacctctggcctttctctaaacccaatccgcgtgctaggttcggtaaggacgagcttaaac

SEQ ID NO: 130332 - DNA, 937 bp, Arabidopsis thaliana
actatagaagactatgacgtcgcacgcacgcgtacgtaagcttggatcctctagagcggccgccctgtttttttttttcttttgaagtaaaacgacacggcgtttcattcccacatcaaaaaacgacagtgcttgtatttggacccacggaaggtccaataataaatgggcttttttacgagcaaacaaacaaactaattagaaaacaacagcacgtgaagtcgagaggctattctcgtctttgccgttcccggttaagcatcacctcgaccattagatcattccatgaatcaatcggaccgggtaagcaccaatgaagacaatcgttctgaacctgattcagctccttgttcttcagcccagcgaaaggatttggataccggtacggtcccggatgtccatctggtcggagaagcgacattgaagttgtgtcaagtaatacaatgtttgaattggaaccttcttgttgtgtagtagtagtcttatagaactcttcaagctcgatatcacgcatcgatacatcctcgctcttcatctctccttcgctgccttccgtaaacggcattgttcggttacagaaaccaccagagtcccactctccattctcgaaatgatcaggtgttgttgttctgaagagaacctgagctttatggttcggttcagcgacaaagtctaaaaccaaacgaagaacctttcggtacgagtatagataaccgagttcggtcatattgttcttcccttggcagtaatggcatccggttacggtgttgttttcatggaagattgttgttttgaggaaccattttccaccggagatgacaacgtagtcgaaattgatgtactgatcagtccatttctggtctagcttgtcgaggtgtactcgaatgtctgagaaaggaactccgttctcaaaggtttcagcttttacaaggaaagg

SEQ ID NO: 130333 - DNA, 543 bp, Arabidopsis thaliana
gcgtccgattaattcacaaaattttgctatagtgatcatttatataacctttgtaagattcctaaattgttcaaacggggacattaaaatagacaatagtacttctgattggatacatgtcataatcatggaatgacataaagtaaagttaaagtacggtatgaaacaattctagagatcaaaagtttcataatgaaataagctatcatggaatgacataaagtaaagttaaagtacggtatgaaacaattctagaggtcaaaagtttcataatgagtaagctactacatccatagttatttgcatgataaatctttgacttgtgtttttaggccaaatcttgcatttttaagttttatttagcattatatccatagttatatatctgcattaagaacgtcgtgacgccattatgcggaacaccaatcgaaaccacatcacaaactgcttctgtgcacaaaatctatcttttaaacctgatcaaaatccttccattcttctacgcagtctgtggacacctaaaaggccttaaacttaaatata

SEQ ID NO: 130334 - DNA, 1091 bp, Arabidopsis thaliana
ctcttcatcttctaagaaagaaacaaagaaagacttcacattttaccattatttgctctgagctcagtaggagagttcaagaaacaatggcaaagatgcaattatcaatctttatcgctgtcgttgcgcttatcgtctgctctgcatctgctaaaaccgcaagccctccagctccagtgctgccaccgacaccagctccagcaccagccccggaaaatgtgaatctcaccgagcttttaagtgtagctggtccgttccacacattcctcgactaccttctctcgactggagtcattgagactttccaaaaccaagctaacaacactgaggaaggcatcacaatctttgtccctaaagatgatgctttcaaagctcagaagaatcctcctttgtcaaatctcacaaaggatcagcttaagcagcttgttctcttccatgctctgcctcattactattcgctttcggaattcaagaacttgagccaatctggtccagtgagcacctttgctggtggtcaatactccttgaaattcactgatgtttctggcacggttaggattgattctttatggaccaggactaaagtcagcagcagtgttttctccactgaccctgttgcggtttaccaagtgaaccgcgtgcttctacccgaagcaatctttggtactgatgtccctccaatgcctgctccagctcctgctcctatcgttagtgctccttcggattctccttcagttgctgattctgaaggagcttcttcaccaaagtcctcacacaagaactccggacaaaagctgctacttgcaccaatctccatggttatttccggtttggtggcattgttcttgtgatcagatggttttgcagattgagttatgtttttaagttacaatgtgaaagattgtattacatcatttgaattgtctttttgatttttgaaacccattttttattatacatttttatcattattattgtttgtcattacgattgttgtgaattgaaaatgttcatccaaaaaaaaaaaaaaaaagggcggccgctctagaggatccaagcttacgtacgcgtgcatgcgacgtgatagtgtt

SEQ ID NO: 130335 - DNA, 561 bp, Arabidopsis thaliana
  unsure (1)..(561): unsure at all n locations
tatagggcgatttgggtcccgacccccccctcgaggtcgacggtatcgataagcttgttatcgaattcgcggccgcgaaatttgtcgtccgccatgaagattcgagcttcgatgtcgactacaacactgaagatggtcttgaggttttacgatttctaatcttctccctcactttagttcctcctgaagaacaaaagatcgttgcggaagatgataatcgattggtgtctgatgagtctgatctcgcttctttatctgagagacttcgattagtttcagttggagaagattctgtagagaactcagatgcggaaatgttgaaatcagatgaagaattggctcgaatgttgcaggcagaagaagatgctattatgtttcaacagtttgtcgctgcacgagataacggcgaatttcgaaggggaattaggccttatgttagtcaagttctcatgtatgaagatccagtccgccaagatgctgctcgaaagactgttcctaaagacgagcttggggagaaagcattggtttctctggccaaggaagggaatnttgagccatcga

SEQ ID NO: 130336 - DNA, 550 bp, Arabidopsis thaliana
cgcgcccgggttgcgtgacggctgaactgctgcttggactggttggtgcactatttttgctttagctatgtgcttggtattcgatttctgcaccctcttactcatttttgctctcgcggacttgttttacagcctctgtttcctggcgaaagtggagtcgatcaacttgttgaaatcataaaggtagtatttttgctatcaattcttttagggttagttgtatttacaaagaaaatgacatctttagagctggcactgactaatagtttctcactgctgattatatttttttcataaaactttaccaccatttctgtagtaggactcgtacattctctcttcatggtttgctaatcgtcatgcaggttttgggtacaccaacaagggaggagatcaaatgcatgaatccaaactacacagaatttaaattttctcagataaaacctcatgcttggcacacggtgtaccgactagagcatcaattatcacctaatagggagctctctatcgatatatgaccaagcttgtctcggttaatcgaggtgattga

SEQ ID NO: 130337 - DNA, 620 bp, Arabidopsis thaliana
  unsure (1)..(620): unsure at all n locations
ttnaaccccgagtaccggnncaatacacncntccanagaatattgaanccttctttttggnaaagtncagttncnttaaaattcctagggttccggtttgaacacagtctgaacaagatgtttccgagatgtcccctctacagaggaacatcccacggactgtgtcggggctaataccggccgtggcattggaataggatccgagagaggaacggaggcggagagaggagagtacggtttcgcggtttgtctcgtatgtgctggtttgtgtaaagttgtcggagaattggttgcagaaggtgctcatatggatgtggtcagattcggatatggttaggttagtagagaagagaagagataaaagagaaagaaagcaaaagagagaagagagactttggatcattgttgccattatttgttcttcttgtttatgaattatgactgaaagatgatatttatagtagacagatttgtaaaaagatgcattatatatactctttaaataggaaaaataatttattactataaggtgattgttgaggccatgttgttctataaaatattaactttgtgattctgtaatattgaaaaccagatgaaatacttgtttaggaataata

SEQ ID NO: 130338 - DNA, 467 bp, Arabidopsis thaliana
gtagtgatgtttcactgtgcgtttcagagtgtgaagaagtcgattcaggcttatgtctctcgtgtgggaggttctactgttgaggttaggttacctttccctgtaaattcgaacgaagagattatctccaagtttagagaaggactagagaaaggtagagcgaatggtagaacggttaggttagctatcattgatcatataacgtcgatgccgtgtgttttgatgccggtacgagaattggttaagatctgcagagaggaaggtgtggagcaggtttttgttgatgcagctcatgccattggtagtgttaaagttgatgtgaaagaaatcggagctgattactatgtgagtaatctgcataaatgggtcttttgtccaccgtctatcgcgtttttctattggaagaaacgtggttctgagtctgatgttcatcaccctgtggtgtctcatgagttttggaaatggtt

SEQ ID NO: 130339 - DNA, 505 bp, Arabidopsis thaliana
catggggtcagtatggggattgaatcggtggtggacaaggaaaacacgggatcatctagtggtcggcgggacgcgggttgtcctgcatgtgaaatggcggttgtgtggatacagagccaattgaggcagaacatgactcaagagaggatagtgaactacattaatgagatatgcgagcgcatgcctagtccaaatggagagtctgctgttgactgctcacaactttctaaaatgcctactgtttcattcaccattggaggcaaagtctttgatcttgctcccgaagagtacgtactgaagattggggaaggaccagtggcacaatgtattagcggctttaccgcacttgatatccctccacctcgtggacctctctggatacttggagatgtgtttatgggaaaataccacactgtctttgacttcggaaacgagcaggttggcttcgcagaagccgtgtgaaaaatgtaacatcgatcttttgttgatatgtttttggtgtgag

SEQ ID NO: 130340 - DNA, 1052 bp, Arabidopsis thaliana
  unsure (1)..(1052): unsure at all n locations
tctacccctgcttctggtcctattcctggcggtcccactattcaggttgattggtccttgaaccaagcacgtgccatcagaaccaatttgacagctagtggaccaagaccaaacccgcaaggctcataccattatggtcttataccgctcattaggacaattgtgttcggtagttcagccggacagataaacgggaaacaaagatatggtgtcaatagtgtgtcatttgtgccagctgatacccctctaaaactggctgacttcttcaagattagcggtgtctataagatcaacagcatctcagacaaacccacatatggaggtttataccttgacacctcagttttgcaagtcgactatcgaacctttatcgagattgtattcgagaaccaagaagatatcgtccaaagttatcatctcaatggttactccttttgggtggtcgggatggatggtggacagtggaagacaggaagcagaaatggttataatttacgcgatgcagtttcacgttccacagtccaagtgtacccaaaatcatggacagccatatacattgcattagacaacgttggaatgtggaacttaagatcagaattttgggcaagacagtacttgggacaacaactttacttacgtgtcttcacgtcatctacgtctttgagagatgagtaccctatcccgaagaattcgcgtttgtgcggccgggcaagaggacgacatactaggcctttgtaaggaagatatacgagcttacgtgaaattcgtcatatccatacacgtttaagtatttcttgggaagacttgcaaggttacaaacaatgagagaggatatatgtagtaacaatctagtttgacgtgatctcagctcgaggtctaaatttttatgtaattcgaatttgaagttccagtttttctttatatgcttttgtcattcatgttcttttaattttctttcctttttctaacgaaaaaaaaaaaaaaaaaaatttaatttgactttttnnnnnnnnnnnnnnnnnnnnnnnnnnnnnnnnnnnnnnnnnnnnnnn

SEQ ID NO: 130341 - DNA, 581 bp, Arabidopsis thaliana
  unsure (1)..(581): unsure at all n locations
acaaaacaacgattcttttaaaataagaacctctctctgtttctctctctctctatatatatctccctccccgctgatcgatggcggcttctgttgatcctttggtggtcggaagagtgatcggagatgtgttggacatgttcatcccaaccgccaatatgtctgtctactttggccccaaacacatcactaacggctgcgagatcaaaccctccaccgcagtcaatcctccaaaagtcaacatctcgggccattccgatgagctttacactctcgtgatgactgacccggacgcacctagcccaagcgagccgaacatgagagaatgggtccactggattgtcgtggatattcccggaggcacaaattcctcaagaggaaaagagatacttccatacatggaaccaaaggccaaccagtggggattcaccggttacatattgggacttttccgggcaaaactcaccggtgggtctgatggtgaagagacttcatcacgggcaattnaagacacgnatgttgntngnaaatttcnatcttgggcnactgtgggnangnttttnaanggccaaaagnacctg

SEQ ID NO: 130342 - DNA, 801 bp, Arabidopsis thaliana
cttctaaaaatttcccaagggcaccatcaaaggattctgggtccagatcattatacaccattccatggaaaaccttaagcggttgaatcctccgagcccaaagccaaatacggattatgtccgattaacctgccacattggtaatgtcttaagaatgattcttaagagtctgaatgggtttcgaagatagatccatgtcaaaccaacacttcttcccttctttgcttcttactatcagattatcccccccagggtggaccccccaattggtgagattcccctaaaccctgtctaaaactttttgggggccccccctggcttaaaaagtttgtaaacccgcccgccctttcttgccgcaacgaagaagttaaaaaaggcctgggatgaaaaaggtgtacagactggaagtccacgaatccttaaatgggagcctttgtgtttcctgttttgacagttggtgcaataccactccccgtgtttccccggatgccatcactgttgagagatagtctcctttacgatgccagtcaatagacgatatgctcttaaaatgtcttatcttaatccctccatataactcatcaggtagccaggttacaattgctgcaacagatgcgtctggttctgggatgtttcctgagtgaagcctctctttagtaatttcctgttcctcatcagtcccaagttcagtgttcagaaaaaacaaatctcgtcccatggcaacggctaaaactggaagcctggaaagaggattcctagcggacgcgtgggtcgacccgggaattccggacgggtactgca

SEQ ID NO: 130343 - DNA, 739 bp, Arabidopsis thaliana
  unsure (1)..(739): unsure at all n locations
gcatccaaccggggctccgggctnnnntttgcacccaatncatccaccgnnatggcccncnnaaaaagcttccggaggagggcaagccccccccccaattgcccccccaaccagggncctctacagctcaatccgaggttccaacccaatggggaaagcagcagcagcagtagctctggttcatctccagcaaaaaacgtacccattgatacaagtgcatagaaccaaagaagtatacaagcttaagctgttgtgctagcccacgaagctagaaacttaaaattcgttaccctttcaaaaaggtagctctcagttttggtgttgatcagagagattcaccgagagccatatgttttatgtctccgatggcattggttccctcttgcaggtgtcaaagtgatcttgtatgttcctagactaagattctgatgcagacaaaaacaaaaaaactcatgatttgtttgcgagttctgtagtgatgtggttattgtatctgataaaaagaatgttacttgaagaaaaaccggtttttgattaagtgaaattcagtttggtttttgttgattgaaaaaaatttcaggttcccattgcaagtttaaagggtaatcatgttagcataaagtttttgggcccccacaaaaaaaaaaaaaaaaaaaaaaaaaaaaaaaaaaaaaaaaaaaaaaaaanaaagggcggccgctctagaggatccaagcttacgtacgcgtgcatgcgacgt

SEQ ID NO: 130344 - DNA, 527 bp, Arabidopsis thaliana
  unsure (1)..(527): unsure at all n locations
ccnattggtagagatttcntcnccaaatcctttcncaanncttttnggtggcctccccctggcctcccaaaagatttgnaaaaaacggacngtccctttctttttcccancggaagaagcaagaaaaggcctgggntgaaaaagttggacaggcctggaagtcccncggatcttaaaatgggagcccttgtgatttcctgttttgacagttggtccaataccaaccccccgtgtttccccggatgccatcactgttgagagatagtctcctttacgatgccagtcaatagacgatatgctcttaaaatgtcttatcttaatccctccatataactcatcaggtagccaggttacaattgctgcaacagatgcgtctggttctgggatgtttcctgagtgaagcctctctttagtaatttcctgttcctcatcagtcccaagttcagtgttcagaaaaaacaaatctcgtcccctgcaatgtgagatgagaaggtttcatcacaacagaccaggggaggacgcgtggg

SEQ ID NO: 130345 - DNA, 778 bp, Arabidopsis thaliana
ttgacgtcgcctgcacccctacctaagctcggaattcggcttgagggctggtattcggctgggtgatggaccccaccactttggaaagaccttggcccctggctcggttaattcttccggccaccatggctcctagcaggagcttcgcgccattggatcccttggcctaaggcactgggaagagggtggacccaaaaaggacgtggtccacacctgtgcggggaaaatcactgtggagccattttaggaccgagacagaatataccgttacacaggccatttctgcacaggaggctaaccgacggaataacacctggctgccacctccatgggcaatccttgccctggttgttcttggattcaatgaattaatgactctcttaagaaatcctctatggctcttagttctatttgccggataccttgtatccaaagccttgtgggtgcaattaaatatttcaggagaattccaaaacggcgcgctacctggacttctctctttgtcaaccaaattcattccaacggtcatgaacctcctcaaaaagctcgcggaagaaggacaagcaccacccacaaatagcaaccaatcaatgaactctacagctcaatccgaggttacaaccaatggagaaagcagcagcagcagtagctctggttcatctccagcaaaaaacgtacccattgatacaagtgcatagaacaaagaagtatacaagcttaagctgttgtgctagcccacgaagctagaaacttaaaattcgttaccttttcaaaaagg

SEQ ID NO: 130346 - DNA, 597 bp, Arabidopsis thaliana
caaccccagtgtcgcctccatcgactgatagattgttaacgccatcaaacattatccatttgctgatatctttgtaatccgatcgtttttgagatgcggataacgttccgaatatctgaacggtgagaatagaattgcatggaccagttaattgaatagacttaaggagataagtattccctttaggaactaggagattaacagctccatttgaagaacatgctttcttccacgcattcacgaacgcctgcgtgtcatcggtttttccatctcctttagctccaaaatcagaaacactaacggtggttggagtccgcaaagaggctcttacaaaacttctcaatcccgtgatgtcctctcttcgcttgattaagctatcggatttgaaccttttataagaatggtcatatacattagggctgattcttgaagctttacaccatgagaacatcaaaagagcccataataggaaaacggtaacaaggttggtacaacgggccattggcaaggaaccgtgttttttctttgttgctggcaaaggaatgctgtcgtttttgggcagtaggtggagaatgtttgatgtttgtgaattttttg

SEQ ID NO: 130347 - DNA, 692 bp, Arabidopsis thaliana
  unsure (1)..(692): unsure at all n locations
aaaaacccttttttctagganccactcatattcctcccgtgctttgngtgattcnctgcccgtttacgtctatnccnctcgctcagcattcccgtgggctctncctccacctcctggctcaccgcctcatggcctcgtcgacgcctacccctattcaggcctccatggctcagccggctcatcaatggccatcgccggaacctccttacctccatattcaagaacctttccatggctcacccggcctcatcaatggcccatcggtgtagactggtcattatcgggcttctaaccacaggatatggattatctttaggttctgagtcagcaaaggattggaaaagtgaggaccagaactctacggtatctcgatccttgtccatattcatgaaaggtaactagctgaaaagtgatatggagagtttgtgccaattgcaagaggtatttataggagaggaaacaagagcgggaaagagggttatcgactcaaacttctgtcggaacttgatcatattactataggatttctattttgtcgcttgaggatatatattatatatccatcttcttgttttatgttaatttctttatccatcagtttctgttttcgttatttatccacttttcacttgttgttaactataataaatcggaaagttgatcaaaggaatccgatccaaaaattatttctc

SEQ ID NO: 130348 - DNA, 666 bp, Arabidopsis thaliana
  unsure (1)..(666): unsure at all n locations
gggggacccacgcgtncggaaaaaaaaactcatatatatatctaagaaaatcaactacataattaccttctccgttgctttttgagtagatttctcttgatccgtattaacgttcttatatccagcttcggctacagcatttgccggttgagcctccttacctccaaccttccatggctcagccggcacatcaatggccatcggtcgaacgtccttacctccatattcaagagccttccatggctcagccggctcatcaatggccatcggcgaacctccttacctccatattcaagaactttccatggctcaaccggctcatcaatggccatcggtgtagacatggtcattatcggggcttctaaccacagggtatggattatctttaggttctgagtcagcaaaggattggaaaagtgaggaccagaactctacgggatctcgatcccttgtccatattcatgaaaggtaactagctggaaaggtgggtttggggggttttgccaattgaaggggttttttttggggggggaaccagagcggggaagagggggtttcggccttaaattttttcggaccttgtccaattcctttggggttttattttttccggtttggggattttttcacaatcccccnccttggtttatgggaantnctttanta

SEQ ID NO: 130349 - DNA, 587 bp, Arabidopsis thaliana
  unsure (1)..(587): unsure at all n locations
cgaagatgatcgtgcaagaccgaagcgataagtctcttgcagaaccaacttttaagatttaaggttgcttgtcccttttttggctccttaattcttggattgatagagaaaatggatattgggattagaaacggatggagaactccgaagacttcagaaagctctggatctaatttcctgggtttgcttagatcctaccctaacaccatccccagggagagaattcatatgggtaatgttcatagtggcaaaagagcaatggtgatttctagtttaaagaaagcgaatatctctgcttcgaggaagcagagaattaagctagagattaatggagaaaaggagctgactttcagtgagtttttgaaacacccatctggcatggaggctgtgatcaacgcaaaggctttgcagagttaccatttagttgatgatagtgatgatacttacagatgtacatttgccaaaagttcagttaatgagttttgaagtttatccagtactgggttttaaggggtcacttcccacanagggangtttntnccagtttnagctnntttccctncaaagttngggaggttccnaaagnt

SEQ ID NO: 130350 - DNA, 512 bp, Arabidopsis thaliana
  unsure (1)..(512): unsure at all n locations
nnnnnnnnnnnnnnnnnnnnnnnnnnnnnnnnnnnnnnnnnnnnnnnnnnnnnnnnnnnnnnnnnnnnnnnnnnnctttttttttttttttccaaaagattggattagattaatattcaatcaacgtcatcattccaaaagcatttacaaactacaaatctctctaaagctttttaagcaatgcacaaaaacatataactaaccccaaaaaaagaaaaagaatttgatcaactcccttaagtttgtttcatcatcacacaaaaacctctgcatgtaacaaacctattttttcagacagcaatcttgtagatgactgccactggaatgttaacaacgtgacctctatctccaaacagtccaattctcccaaaactagccatcgaaacattcttcatcgctcgaaagacaaggctcaagacccgtgtctgcccgtttcctattgtaaacttggcaggtgagaccttaaccgagactgagtccggtgccatccacccgactatatatgtttcgtt

SEQ ID NO: 130351 - DNA, 435 bp, Arabidopsis thaliana
aacaggtctcttaaagttttgaacgatattcttttattcttgttgagatgttagaccatttcaagcagtctgatcacggtgcttggtgggtttatttttttaggttgtgactttgcaagaagagattgagtttctcgggtcacagatgaagaatttttcatactctaatcaaaacggatcacaacttaacaacataccggagtttgtgaatcagatgactatggccacgaccaatttcgtcgacgagagtgttttgaacaatgccgacggaagaaactgctatgatgggttcttcacgaactcagaggaaatgctcgtgaatcatcaatggctccagaacatggattattattactaagcacaacaaaattcgacgcgaactaaaaacgatggatctatatataatagttgtggagcatgggttttgtgtatgat

SEQ ID NO: 130352 - DNA, 198 bp, Arabidopsis thaliana
cttagaagcggtaaagaattacccacaaatgagagtccgaaccagatcactgaggacagtgtggatcaagatggggaggggttctggcaaaatggaaattccgctgaaaaagcaatagaagagcctatactccaccaacctactcgaccactagctcctgcagcatctcctcttgttgaaaaaccagttgccgccaaa

SEQ ID NO: 130353 - DNA, 516 bp, Arabidopsis thaliana
  unsure (1)..(516): unsure at all n locations
tccccccttaaanntgggaaaacncagttncagggnttgnaccccctggacctnctganacctgaccatgatccccctgttgncccctgttcctatcaacattaccaccagtcttggaggtttccccgttccagcaaccccccagtcacagcctcttgccgcacaagattcctcttcccaaaacccttagaagggaggaggaaaaatggatccgagaataccagaagaggaaggagaagaagggttttctctggaaccaaaaagctcagaggttaacgaggaagaagaacaaggagaggaagacgaagctttcttctttcttccttccattggaattcgtcgctcgctctaaaaaaaaacactctttcagctattatacgtatatgtatgatgtatgtgtctatatacgtatgtgtaaatacggagagagagatatatatatatatgtgggtgtgggtgtatgtatcggtttatacgaagggtgaagttatagagagaattgtgaaaatatttggg

SEQ ID NO: 130354 - DNA, 512 bp, Arabidopsis thaliana
gtagtgcttcactcttttgagtaaatagtatagtatttaatttatacgaattcgtaagttctgtgaggaataaatgaaaatcgcaaacatctctaaaaatacgaagagtaaagtcttgagaaaaccttttgtttttgttaattgcatgagaaaataacttacgatttaggaaactacctgacggattcttttcaaattgttaatctttttgaataacagtatcgtgagtgaattcgaactaacagattcctttgaagtaggttaagcttttatacttcaaataaaatataaatatataaaaatcaatcatatcattcggccggcaattttttgtattctattaatatattatccttcttgaagacgaatagaaaaattgagttagcgaatggtgacaagctcatctggaaccctaatttgcatagttctcagtttatctatttattccaatcaaacatcattttcattcacacgttaactacctgcttaaaacgttcaatgcaattcctagt

SEQ ID NO: 130355 - DNA, 610 bp, Arabidopsis thaliana
ggcatgtataaaaaaaatattgtgacatttcatttcttacaatattttcaattttatcattttttatatatcggtttggtcgattccatcttttataatcgaaaacgagagttacaaatggtttttcaaaccataaaaaatgatcctcttttttttttattttgaaaaattctaaattcgaattttctttatttccatatagattttcagaaacaggtttatagttatagtatgttcgaacgtggaattcatcatccttattaattttgtcttttccattcactcggatttcttccatttcatcgattttgtccagatcttccccttcttccgaaaaaagagaaggaaaaggagcttcttcggtggatacctcttggtcctgtttagtcccacccgtttctgaggttcctttaagtttcttagtaaaaatgggtgatggtattctgcctaaatagtagacacaggtaataaataagagaatactaaagattcgagccatagaatctctcaattctgacacaaggaacttatacttattagatctaataactacattagacctaatagaattattttgctgtatccagactaataccaatccaacccattt

SEQ ID NO: 130356 - DNA, 437 bp, Arabidopsis thaliana
aaaacatatcaaaataattaggaaaatatctattataccctcaaatggtatgttgaccaataatatagacggaaagtgttttatagttgaattttaaaatagtcttgtatagttgcatataaattaaaaaagcgatctagtataggaaaaatttggacgtaccgaggtaaagaccaaaacaatgttttgtcattttcacaacaatcaatgcatatgttcgtgaagtcgtcacgaaccacctatataagccaatgcatccatatatataaagatataacacacatatagatatagtacaagttaaatgaaaaatattttgattgtacaattagaattctgattatactttagaataaaaagaacagaaaaaagtagaagttcattgagagagatccaaaagaaataataaggcaataatgagatagaaaccatggtac

SEQ ID NO: 130357 - DNA, 432 bp, Arabidopsis thaliana
cggacgcgtgggctcaaatcaaattgatcctatccgcgtaaaacagagagtgttagggtaatgaaactctgtacctgttcatgaagtaaagaactctggaaacaaactaaacttaggctgcaaataagataatgagatctttaacttatgtgtccaaagtagttgcagcaatgaccaaacaattggtctcggaagctgttctaatgtaagatagatggtttacaaaatgaggaaaaagaataaagaaaaatgaaagagttggagggaatgtacaaatcagatatgaatgatgagaatcaagcatcatcagtatcgctgtctccggcttcaacttcttgagccacccaataattgttcccatctggaccccagaccttgtacctgtcaagaatatgaacaaatgcatcatctcaagtatctctgtcaaagaag

SEQ ID NO: 130358 - DNA, 431 bp, Arabidopsis thaliana
tattaattaaaaactttttgtagtttagtgtaaaataacataagtagtagcttcaatatataatgatggggctaataaatcaaatatactcattcgatttgagaataatattttcaaaagagaaattatatagattcttataaatatataaattatatatttatgaaagttttgtaaaagtaaaagtaaatatgggttaatttgcaaacttttataaataaaaggtggtaatgcaaaaataaaaatcgaatctattaatatttatttttagaggaaaacatagagaaataaattgaaataaaaacaacttatttataaagttcctctatgtagaagcaaaaatacatatgaacctgcatattttatatttttatctcattgacatcgggcatggcatcttaacctaatatgagtcagtgtaagggaatttt

SEQ ID NO: 130359 - DNA, 462 bp, Arabidopsis thaliana
ctctccctttccccaactgtacccatcatttccctcgtccattcctctcccttgcacataagctttgctctgtctatttaatttaactcttcttctgcatgaaagttttatgctttcgatgattcccaaaatctttctcatgcgttttttactttcttgatttggcaacatgtgctgattttgatttcttctttatggttgccgacacgaaagaagaagctaggacacaaaacaactcaaattttgtttggtgagaaaaatcaaccaagaaaatattgattcttttggagcaaggagttggtttgattgaagaaggaatggtgggaagcattgaggcaaagagtctgcaatcaaacgggtctgttcatcatattggtcttattttggaggagaaacttgatgaatttcgtcgtcttttggggaaatcagaaaaagatccgttaaggattgtaagtgttggtg

SEQ ID NO: 130360 - DNA, 469 bp, Arabidopsis thaliana
aacgatttgtcaacagaaccaaatgggaaaagaagctttattaaactccggtctaattttacacatttatgatattcgtgatctaccaaccaacctatcctttcgtctttttttttttttatttggtgagaaactacaaatgcacaaaaccaaaactgcatattaatacagaaatgttttggatattcatgattctctaaaaacatgaattactccatataactgataataaatttaatcatcgccttcacatctctatttgactatcaaccatataattcgctctcattttctttagtgaaaggtttgggggggtgaatatccatgaaattcatatggatagactttaatggaacataaaataaataaataacgaagtggggattagtagtagtatgtggagaaaagttggacaactcatttggttttgcaaactttgcaagtgtcccatttatttctcgtctcttat

SEQ ID NO: 130361 - DNA, 449 bp, Arabidopsis thaliana
gaaagtctctcccagactagagtcttccctaattttttctatctcatcctcacgatgcacctcaatggctgggtcttcttcttcctgttttgtcttctttttactaaaattttataaaatagcatttcttcttagatagtgcgtttcccaacataagaccctacaaaaatttatgggatgaaaattataataataatttctatgtactttttttttttttttttttttaaacttcgttttcatctaatactatgcagcccatatactaaatgcctaaatctatacatatttagattgatctttaaatatcaataaaaaatttagctaaattttgactggtttagaggatttttccgatgtgtcattaggattatacaactatggtttaaatatcaataaaaaatatagctggttttacaatgcaatatgattggagtgtaatttttatt

SEQ ID NO: 130362 - DNA, 1112 bp, Arabidopsis thaliana
  unsure (1)..(1112): unsure at all n locations
cggacgcgtgggcggacgcgngggtgttcagtgattatcaaacctnggngttagtctaccggggaacagtagtgaacaggatttcactggctttggcatgtcttcaatgcctacagttcctttcggtgggagtagaggattacaatcagtaaggcctgaaccttttgctgagcagggtaggatacataaccacgagagtcacaatcagaatcagttcatagatggtgggagatatcatatcgacttggataggattgctagtggagatgaaatccgaactacattaatcatcaaaaacatcccaaacaagtacacttacaagatgctggtggctgaaatcgacgaaaagcacaagggagactatgactttttatgcttgccgacagactttaagaataaatgcaacatgggtcacgcttttatcaacatggtctctccattgcacatcgttcccttccaacaggctttcattggtaaaatatgggaggaattcaacagtggggaagttcgcttccttggccttatgcaaagatccaaggaaagtctgcccttgcgtcatacatgcagactccaagttctataagggaacaaaagcaattgtttccagaagtctcctaccatgatgatggtcaagacgccaatgatcacgagcaactgttttcaagcatttggaacataaccgcgcctgattcagattggtcttacacaatggatcttatcgaaaatccgagggagaacggtaactccaagaatgctgcagaagagtcctcttgaatccccactaaaactagtagttgggaactctaactcaccatcaaaggtaaactaagtgtacaggtctggcgcggttatggaagaaacagaatgtacagtattaaggcttgttttctccacggaacaaagtaaccagtttttagggattacttcactcgaagcaaccgattaaagaaacatccctattagtacattacgttgtatactttatattcggaaacttctctctatatcagtcatgtgtatattaaaaaaaacacaacaaaagnaaacaaagggcggccgctctagaggatccaagcttacgtacgcgtgcatgcgacgtcatnnnnnnnaac

SEQ ID NO: 130363 - DNA, 687 bp, Arabidopsis thaliana
  unsure (1)..(687): unsure at all n locations
cnnnnnnnnnnnnnnnnnnnnnnnnnnnnnnnnnnnnnnnnnnnnnngcaggtccgcgattccgggtcgacccacgcgtccgcacaatcagagtcagttcatagatggtgggagatatcatatcgacttggataggattgctacgtggagatgaaatccgaactacattaatcatcaaaaacatcccaaacaagtacacttacaagatgctggtggctgaaatcgacgaaaagcacaagggagactatgactttctatgcttgccgacagactttaagcttttttctggatacagaataaatgcaacatgggtcacgcttttatcaacatggtctctccattgcacatcgttcccttccaacagactttcaatggtaaaatatgggagaaattcaacagtgggaaagttgcttcattggcatatgcagagatccaaggaaagtctgcccttgcgtcatacatgcagactccaagttctatgaaggaacaaaagcaattgtttccagaagtctcctaccatgatgatggtcaagacgccaatgatcacgagcaactgttttcaagcatttggaacataaccgcgcctgattcagattggtcttacacaatggatcttatcgaaaatccgagggagaacggtaactccaagaatgctgcagaagagtcctcttgaatccccactaaaaa

SEQ ID NO: 130364 - DNA, 458 bp, Arabidopsis thaliana
aataaatacaatttccaccttttatttcgtatttagtattacaaataaagtattttatattgggggcataaatatatataccacgctcaggattagtctcggtcaaaattgcatgtggtgttcccctatacgataagtaaccctaccaagtattgaaaatgacaagtacggtttcctgcaaaccgattgaaagttacaaatccatggattttacaatactatataatagctattattatttaactaaaagtacatacatctagctcaactgataataaatcgagtcacacagtatcaattattggtttaaaatttgatgaactctttccgtggatttggaatctagcacaaatattatctatagatttcatttttgatagatcacatatattatttctgtatattctcttgtgggaaataaaagtatgttttgaagacatcaatatctaatcatattc

SEQ ID NO: 130365 - DNA, 593 bp, Arabidopsis thaliana
  unsure (1)..(593): unsure at all n locations
gagacaacaaaaagagagaacaatgtcttcgtcgagggagctacaatacttggagggcgacatacagaaacaaccgtcccacgacgggtctcctcaactccatcttcatgaccaccgtcaacacggccgctcgttctctcgtctccgtcgcttccaccgcctctacaccagagattccttctaggcgatggtcggcttcggaccacctcaggttcatgtctatgatgatgacgtggcttaccctttggatccttagagttttcttggactatcttcctcttcctctcatctcttcttcttcttctgcttattcttattcttatcctccctttagtttcgcttcgggtcttcttaccacggctgcggagaacgcgttggtcccggctaaggcttcctcgtcgtcgtccacgtcatcaactgcgttggtgaagtattcagggtcgtcagatttgggtatgatgatttgcgacggcgttgatgagccttctgttaactctctcggtagagctctttgtcacgcattagcgcttatgaacgagattccagtaacctcaagaaaatatcaatntggcatgggaatggatgacaagatc

SEQ ID NO: 130366 - DNA, 432 bp, Arabidopsis thaliana
caagaaccaattttgcatatacgatctttaagataaatgaatagcaggtggaaccggcactcctccttcgagtccaaaagcaagtgtaaagagtatttgttcataagaattgacacaaatggttcaaactatttgagatgagttctgttctctaaagccattaactttagtatcaaaaggtgagctaaactggttctaaactactgcattcataggcaggtagggaattagaatcatgggcaaacaaaagaacaaacagatctcagatgagttttcttctctaaagccatttctaagcatccatatggatcaaagggtcagctaaatgttctacaataacgcattcacaggcaggtaatgaattaggatcatcaattagcaaaagaacaaacccttttttctcttgttccttcccactgttcttcatgctca

SEQ ID NO: 130367 - DNA, 383 bp, Arabidopsis thaliana
ctctctctatctctctcttcttcgggtttctaaaaaggacgaagcttgttgcataatatggtgaggtaaattactaattactgatccaaagttcgaatctttgctccaactccaggctagctgattgcgtagcttccgattgatttctacctgagttttgagttcctttgtggccacttcgttgttcttctgctgggttttttgctcgaggatctgatacttctgtttggtcgatgatcgagtgatcttcgttgggttttggggatctaagtcgtctatatagctaatggtttggatttgaggttgaatggagcgtttaggattttggggattgctaatggggagtgtggaaaagtcaatggattctggaaattcgttggctt

SEQ ID NO: 130368 - DNA, 431 bp, Arabidopsis thaliana
gtccgtcctgattaaccagtttctggtcttagtacaaaatgggaatcaggttcgtggaccgggtgtgaaattcaaacctgtcgatgatcatgatcgaattgaaggtagagaagctgcagaggaggaggataacaatgtggaggcagagacagagagggagaggaaggttcatgagtgtactgcaagtacgaagagacgcaagaagaagaagaaaagtgagtgttatcgatgcggaaaagcgaaatgggaaaataaggagacttgcattgtgtgtgatgaaaagtattgtggaaactgtgtgcttagagcaatgggttcgatgcctgaaggaagaaagtgtgtgagttgcatcggtcaagctattgacgaatcgaaacggtctaaattagggaagcattctcgggtattgtcgcggttgcttagtccattgg

SEQ ID NO: 130369 - DNA, 402 bp, Arabidopsis thaliana
gagagaggagaagtactttttagctcttaagatagtgtgcgtataagcactgtccgccagacatatatcttcatcctcaatctcgtattttgacataggctatccatatgtcataacatattttctggaataaaatatttattcatgaaactctgacatagactatccatatgtcataatatataacattattccagaattacaaaagcatctataatgcttgtcatgcatagcatgataatacatatggctataatatattacattgatttctcgttgtcatgattaatcgagaaaatctgccatatcaagatgactatcatcatcttggccattaaaaggaagggtccgactcatcacagatgagattaggttcaacaatcctttttttttgcctttttt

SEQ ID NO: 130370 - DNA, 550 bp, Arabidopsis thaliana
ggaaagctcactcttgcaaggcttttgtatggctcgtgaagctatggtatcggatgatgctgtcaagggtgttcactatgaagaaatccttcagctgtataacgatttgatggcgctggattcttcacactaccagtactacaaggatgagcacagcaaagcttttctccacaaggtgacttcaagcagtgaatctttgtcaagacaccttttgcgatatagggatatgaacaatcttgtatgtctacggctaaataacttatcactatctcggatagcctctgttgagaagttgctgtttgtccaaatgttagaccttagtcacaatgagcttcattccactgaaggattggaggcaatgcaacttctctcttgtctaaatctgagtcacaacagaatccggagttttcagcgctggactctctaagacatgtgaagcagctgaagtgttggatgttcacataaccacattggcaagcactcagtgacacaactagataccttgtcttcaccgctctctaattcagagttggtcagcatgatgtaggaa

SEQ ID NO: 130371 - DNA, 781 bp, Arabidopsis thaliana
gctgacagagctagacactctctaattgttcctcattctttaactctctctcggcttgcacgtatacctggagttaaacaatcattgctcaaggactatggtgttcgcctagtgtccggccgccttccagggtttggagagagtgatccccatcgtgctcggaaccttagctcatctgcctcggatatgattgacctagctgctgctctagggattgttgacaagttctggttactcggctattccagtggtagtgtgcatgcctgggctgcaatgagatattttccggaccaaatagctggagttgccatggtagcgcctatgataaatccatatgagccaagcatgacaaaggaagagatggcaaaaacgtgggagcagtggcaacgaaagaggaaattcatgtacttcttagcacgtcggtggccaagtcttcttcctttctcctaccgtaggtcctttctctctggtaatctcgagccgctggataagtggatgtcagtggcattaggagaaaagggcaaacttgtaaccgcagatccagtttttgaagacctttaccaaaggaatgtggaggagtctgtacgccaaggaactgcaaaaccatttgtggaagaagcccgattataggtatcaaattggggctttagtcttcccgagttccccatgcagaagaagtggagaaccaatggcgtcccttcttggcttatggtcaatggtaccgttgaaatccgaatgggaaactaatttgggtttttcggaaaaccctattccacattat

SEQ ID NO: 130372 - DNA, 757 bp, Arabidopsis thaliana
aaacaaattccgtgtgccctatactaataacttaataaacacgacagatactcgtcggacgtgatatgtgactcatctgtacacgtgcaaagctttttgttttgatgttttgattccttggatcaaatatccaaaattgtttgacccaaaaaaaaagattaattaattatccaaaaaaaaagcggccactaatcatatggagaggtcactaggtcagacaatttcgtttatccaaactagtaaaataagtataattagttacatcaatcgatttttttttgttcactacttgaatgttgcatcaactgatttaaaggtcaaagttatctatttaatttaaatagatcatagtttgacattagcgtgtttcggttatataaaatttcaagaatttgacatttgtagttaacaatagctgtatgatatttttgtaagaacaaatcgtattgttttggtcattatttaatgttgatacgcgggattgttgacttactctccttaaaactagtgaaacaaatctccctacactaactaccatgtgttgaattatacaaccgttgatccaactttctttggatgctttgagtttctactcgatcaatttgttttttcacatcatgataaactaacttgttttacgtcaaatcctttattttcagtttgttgttgtctaacagggagatgtttttcgtattatttatctaatgtcactattaattgttgctaaccaaaatatcatttgatcctaaacctaaac

SEQ ID NO: 130373 - DNA, 425 bp, Arabidopsis thaliana
  unsure (1)..(425): unsure at all n locations
ccctagttcccaacaaggtgacgatggcggcagcgagcttgaatgcatctggaaaaggatcgaagaaaccaaatgggttgaaggagtttctggaaagtctagaagctctgaaggcagatcttaaaaccttgagtaaggaggagctgcttgaactggaaaagcggctgaaaaatgtggctcgtaaggcgagggaagagctggagaggcgtatggagcagccctaatatgtctctgtttaccccttttaaaatgtcttaagggtcgttgaaatttagtcttaataatcgatttagtagctattgtcttaagggtcgttgaaaattagtcttaatatgtagtaaatgatcgatttagtacctaatgttttagctcctgtactgagagactcanggagttgttatgttgtatctttggatctatatatg

SEQ ID NO: 130374 - DNA, 496 bp, Arabidopsis thaliana
gcgaaccaaagatgtgcataagcctagtgactttggtatagcaccagatatgattattctggtcaagaatgagacttgagagcgtccttaagcttaccaaaagattcaggaactatcccggaaaacttattcattcgaagattaaccgacactaacgagttagctcctgagatctgaaacggtagagaacctgaaaatctattattgctcaaatctaaagaacctagagacttggcattaccaatatcaccagtgaggtttccttcaaaatagtttgaagcaaggtcaagaaactgtagactaggaagaccccaaatccctgaaggaatcattccagagagagagttgttacttacacgaagacgaatcagagtcttacatttagcataactctctggaaattgtcctgtgaatctgttctgcaacatgagaagatgcgtcattacgcctttcttgcacatataaggaggaatctgaccttccaagaagttctcag

SEQ ID NO: 130375 - DNA, 656 bp, Arabidopsis thaliana
gtttcaagctctctgtttctcagatcttctctctgttttgttcttctcataaaataagagttgtgattcaacagttatggtgagaatattccttctctacaatatactaaattcgtttcttctctctttagtaccaaagaagctacgaactcttttccctctttcttggttcgacaaaactctccacaagaactcaccaccgtctccgtcaacgatgttaccttctccatcatcgtcttcagcgccgacgaaaagaatagatccgtccgagctcaaacgcgttttccagatgttcgacaagaacggtgacggtcgaatcacaaaggaagagctcaacgactcgcttgagaatcttggaatctacataccagacaaagatctgactcaaatgatccacaagatcgatgctaacggtgatggatgcgtcgacatagacgagtttgagtcgctgtacagctcgattgtggatgagcatcacaacgatggcgaaacagaggaagaggatatgaaagatgcgtttaacgtgtttgaccaagacggagatgggtttatcactgtggaggagttgaaatctgtgatggcttccttgggactcaagcaagggaagaccctagatggttgtaagaagatgattatgcaagttgatgcagacggtg

SEQ ID NO: 130376 - DNA, 548 bp, Arabidopsis thaliana
  unsure (1)..(548): unsure at all n locations
cgnnnnnnnnnnnnnnnnnnnnnnnnnnnnnnnnnnnnnnnnnnnnnnnnnnnnnnnnnnnnnnnnnnnnnnnnnnnnnnnncttttttttttttttttaagaatgaccaatattattatttagagtctttaagttcagcccaaacttaatatacactcaaatgtttcctttagctttgacatacccaatttttttgccagattcgatcgtgtatgcattagcttttttttgttgtggtttgagcaaagaataataagtacacagcttgatgagtttcatagcatgtcaactttgttggagaatactgcacttagataaacgttctttaacttcatcccaagctggtaaatttctgaaatcaggttcaattccaccaccgttgatatccatatgggttaggtgtgacatattttcctattgtcacaacaactcctgaaccatctcggagctcatacaccgattgaatcaaaccctttccataagttctttcgccaacaagaactgctttacagttatcatgaagtgcagaggccacaatttcactagc

SEQ ID NO: 130377 - DNA, 581 bp, Arabidopsis thaliana
cctctttctcttattgtctctctctcgctatctctccctcttaagtttttttttaaaacagactctccctctaagttattcggtcgcaattaaaaaagaaaacaaaatctttataaattttgattttctctttttcacccgattattttgatttgactgttttacgacagtcaatatttcaattttattattgggtgctgacgtggcatgcatccaatagagtatcaccatgaacaccaaaacgatgcgtcttcccccacgtcgcgttctaacggcggataagcgcaaagaacgagacgccttcatctcctccgtcaccgataatccgccggaaatcgccaagtttccctctccgccgccgaaacttgttcctccgccggttaatcccatttccaagaaatcttcaaccgcagcagccgagccgatcggctcgaaccaactgatgttagccggttatctgagccacgagttcctcacccaaggcacactcttcggagagcaatggaaccaggctcgagcccaagccgagtccagtaagataaagccgagccatactgttgagccggctgaagaatgtgagc

SEQ ID NO: 130378 - DNA, 562 bp, Arabidopsis thaliana
aagaacgtatactttttactccaaatttcaattttaagatttaactggctgttgtagagggagccaatcattggggctaatgagatagagaaagagaatgtgttttcaacggattctttttgttaaagaatataaatatatattaatcataatgaggcttttacacacaggtcataattgaatgttaattagggctgtaattaagatataaaaatagcatatgaaaagaacataatgaaccaaaagcggctatatatgattcctccaaagaggagtcaacatgaagctgaatttgtatctggtggtccttttcatctcctttgatgttgtttgcagtggatgattccgcacagagggtgttgatctcaagttttcgtgttagttagcgagaaactggttagtgaggagttcaatagtgtattactgtctagctagtgacgtcgcgttaatccaaatatgcaaggtcttgtaagtgatctctggtatataaaaaaacgagaaccaaaacatgcttaaaatctcggtgaattagttgcgtcacttgtgttgatcattaatactt

SEQ ID NO: 130379 - DNA, 443 bp, Arabidopsis thaliana
  unsure (1)..(443): unsure at all n locations
caatcactcttcacttctccccactccttactccttttttttttgcctttctaagcaatctctctcttctccttatattctcatatttgattccttttctctctcatacgatctgcacaccactactaagaacaacagagctagagagacttgcaataattgtaaaacatgattggaacaagcttccccgaggatcttgattgtggcaacttctttgacaacatggatgatctcatggactttcccggtggagatatcgatgtcggtttcggcataggtgactccgactctttccctaccatctggaccactcatcacgacacgtggcctgccgcttctgatcctctcttttcttccaacaccaactcttgattcattacctgagctctatgttccggttagttctacgccctcttcgtnacgtatgatgtcaaacattaaac

SEQ ID NO: 130380 - DNA, 1220 bp, Arabidopsis thaliana
cagctcacatacgactcacttagggaaagctgctacgcctgcaggtaccggtccggaattcccgggtcgacccacgcgtccggcgacctgcttcctcaggcagccagatgcaaaattcaagaccacaaaattcaagaccagcttccgctggtagccaaatgcagcaaaggcctgcgtcctcaggcagccaaaggcctgcgtcctcaggcagccaaaggcctgcgtcctcaggcagccaaaggccaggttcgtcgacaaaccgtcaagcacctatgaggccaccaggttcaggttccacaatgaatggtcaatcagccaaccggaatggccaactgaattccagatcagattcccgaagatcagctcctgctaaagtgccagtggatcataggaacacagatgagcagtagcaatggagttggtcctggtcggtcagcgaccaatgcaagacctttaccttctaagagttcattggaaagaaaaccctcaatctcggcgggaaagagttctcttcaaagccctcagagaccgtcctcatcaagaccaatgtcatctgatcctaggcaacgggtagtagaacagagaaaggtttctcgtgacatggccacaccccgaatgatacctaaacaatcagcgcctacctcgaaacaccagatgatgagttaaccagcgctcaagagacctccctcgcgtgacatagatcatgaaaggaggctgttgaagaagaagaaacctgcaaggtcagaggatcaagaagcattcgatatccttagacagttattaccacccaagcggttttctcggtatgacgatgatgacataaacatggaagcaggctttgaagatatccaaaaggaagagagacgaagtgcgagaatcgcaagggaggaagatgaaagagaacttaagctcttagaggaagaagaaaggagagaaagactgaaaaagaatcggaagctgagccgttagaagaatcctttctcctttgtgtctttgtcttcttttaggacttttttagtgttttctcattgaaatctctttggccgcttgaggcaaaaaagagtttgaccttttttttgttttgtgttttcaaattaaggatcttttttttgttcatggaaattgtacaattagaaataatatcttttgcggccgcgaattcgatatcaagcttatcgatacagtcgacctcagagggggccaagagccattcaatgggg

SEQ ID NO: 130381 - DNA, 879 bp, Arabidopsis thaliana
  unsure (1)..(879): unsure at all n locations
ctaaacgcgataaattttagacctttttaaaccccctttgtttagaaaataacaggtccagttgggagtgatttttcgggtttcaagggccaaagggcaaaagggcgtttgtcagttaaacagcgatgcctagtgcacccttcactgcgatatcgctcaggggggggccttttaaaggcggcaactacgtattagagcttgggtaanaagcccaaaggcatagcctcaaaagcaaggggaaggatgtgccatcggaatttatctgttaaaaaggtcagatctttattatccactctcgtaagggtggtctgggaaaatatgccaaacgccgagttgcatggaaccaagatgaaaaggcttcagtttcctaactcccaggatctggacaaggctggtgattaaaattgccccaagtccatgaatccaaagcacttaacagggcttttagttgatgctgttcctccccgagctacaaagcagaagccgtgtatttgacagatcaagttcttccaaaatgaaaagaaaggtaaagttgatactaagaactactcccgtggagttgcctttgttgagtcacggagcatgaacatgctctggtagccctgagagtacttaacaacaatcctgagacatttggtcttcaacaccgccctgtcatagaatcccccgccgataatgtccagaagctgaagatacgagaagctaagcagcagcagtttcagcaacgcgagaaacacaatgaatctgatcagcagcaggcgaacggcgaagcacaggcccctgtcaataaatacaaacgaaaaaaaaaaaaaaagggcggccgctctagaggatccaagcttacgtacgcgtgcatgcgaggtcatagtntaaatatag

SEQ ID NO: 130382 - DNA, 512 bp, Arabidopsis thaliana
  unsure (1)..(512): unsure at all n locations
ctacgctttactctttcactcctctctctcctgctttgctccgccgtgagaggagaaacagagggggaattgtcaagcggcggaggcggcaacgacggtgatacaacaaccagacggtaaatcggttagattttactgtacagtaaacgcgagcgaagtgattaagtcccatcccggtcaccacgtggctctcctcctctcttccgccgtacctcacggtggctctctccgcgtcactcgtataaagcttcttcgtccttctgataacctcttgctcggtcatgtttatagactcatctcctccgaagaggtgatgaaaggaataagagccaagaaatctggaaagatgaagaagattcatggagaggtttctgttgcagaagaagagattaacccactaaccctaagatctgatgcttctgacaaaggcactcagaggaggttatatgaaaagcagagaggaatgatgacacaggagggctnccaaggaagttagagttttgcagccttct

SEQ ID NO: 130383 - DNA, 448 bp, Arabidopsis thaliana
cgcttgaaagaaacgccaatatcgcttggttgattgcttcgatgggttctgggttagagtcgttggggggataaagttcagggcttcaaatcgacacgtagattgactcctatctctctttaactcgccgggaaactctcttccaagtcaaccgttttgacataactaaatctctgacctagaggcttatcagtagaaaattagcgatattcatcgaaagaattcacctatagagatgagataggtctctataaaactcgaagctttccgttgtcgcgtagattgtatcttgtctctttctaggtcgcttggagtttgattcggaagttggctgttccgacagctgcggatttgtcagggaaattgtgtctagtgcagagaagtgatgataactcctaatagacagctcggatccaggcgaggtcggcttctttagaaaagcttactc

SEQ ID NO: 130384 - DNA, 456 bp, Arabidopsis thaliana
cggacgcgtgggcgagaatggatataggatcccatgtaactcttcgcagtattgtttagttgctggcaaacaaatggggggtgtcttcttaaccatttgggtgaaaagtgagctaagagaacacgtcaagaacatgaaagtatcttgtgttggcaggggcctgatgggttatctgggaaataagggatcaatctcaataagcatgttgctccatccaaacaagcttttgcttcgtttgtacgcacttgacttcgggacataaagaaggcgatgagctaaagagaaactctgttgtcatggagatactgaagaaaacgaggtttccgcgcgttaagagttcagaggaagaaaagtcccctgagaacatccttcagcatgaccgggtaatatggctttgcgatctaaactaccgtatagcactgtcttatcgatctgccaaagcgcttgttgagatgc

SEQ ID NO: 130385 - DNA, 469 bp, Arabidopsis thaliana
cacgagcgccaccctttttttttagattagtatctaaatgtatcttatacctttcttgggtgtgttagtggactcattacaaccttttattattcctttcgtcgttatggatttattctacataacactatatcttccgaaacaaattcaaaattttaaaggaagataatgataataattaattctcgaattagcacaaaagttttattgtatctacacctcgatttattaataactccaataccatatgcttagaggaaacaaaagcagaaccgaaccacaacaaactcatctaattctttctatccaaaccggaatttccaatacaataaaaaaacatcttctttttgtttgtttggtttagaattggttcctctgaaaacaaaatgcttaatacaaaaagaggtaccttttttttcagtcgatgtttttgtcttgaatcgacagtataataatgagattcatgttt

SEQ ID NO: 130386 - DNA, 559 bp, Arabidopsis thaliana
atgcaaggccttagtttccccaacactacaagactactccacggagaagaagctactcaaccaaactcttcttcttctcctccaaactcacacctctaaactaagacaaccatggaggttcaaattcatgatgacatgcattgaacaagaaggaggaaattaatgtgatgaatggagctagagtaagcgctatattaattagtattaccatctatccatatatttatgattcaagactattattactcatttagtgtttgttattattattcaattttgcttgtttgtttcttatcatctttgcattgatcatcaagattgtgatatttgaaaagatgggttttatgtgtgttttggtttagtactggcgttaggctgggatattgtaatctcatatttttgttctacgagtgagtttgaattttctggtttttacttgcggtttctatttcttcggttaagtaaagagtaattgaagaacgttaaaagcataggtcgtattacatgagtaatgaagaaaaaggtgttcattatcatctgtgagataccaatttctttt

SEQ ID NO: 130387 - DNA, 743 bp, Arabidopsis thaliana
atagaccagctatgacgtcgcatgcacgcgtacgtaagcttggatcctctagagcggccgcccttttttttttttttttttttttttttttccaaccacaacgagatgaattacaccacgactctaagtgaaatcatcttttaaaccaccaaaattcacccaatgacacgaaaacatttctagcacaaagaaaatcaaatcctatcctgagatccaatccaattccaagctattagtccctcatgatccgagtgtagaacatgtcctaatagcatctacgccaaaagcgcaacttcagaagggttttgactcctctgctttcactatttcggtcctaagcctaaaacggacatactaatccgactgatactcaaccggatcaaccgggctgagacaaaaatttcttgaagtcgaggctttattggagagctttccttcttcttctacaatccaaatggttttcttttctcccccatttctcattaattctccatcaggagtcgttgacggcagcatagctaatacgccttgaatcatgtaaatctgcccgggatcgataggatcttcacaaccaagctcgaaaaccacgatccgcctacctttgtacctttttaacactgagccaccactaccaaggaggttcaatcgcaggagaggtaccttcccgaaaaagactgaccaaaaaaaatcccaccagaacttgtttgccggtcgttcgaagagttcattaatttcccccattt

SEQ ID NO: 130388 - DNA, 470 bp, Arabidopsis thaliana
tttcgccctttttttttttttttcgaccaaaagggtattttaaccaaatacaatgaatcagtctattatcaccttgaaacactatgatggattcaacgctacccaaccgaaattcactgtatttttccaaccacaacgagatgaattacaccacgactctaagtgaaatcatcttttaaaccaccaaaattcacccaatgacacgaaaacatttctagcacaaagaaaatcaaatcctatcctgagatccaatccaattccaagctattagtccctcatgatccgagtgtagaacatgtcctaatagcatctacgccaaaagcgcaacttcagaagggttttgactcctctgctttcactatttcggtcctaagcctaaaacggacatactaatccgactgatactcaaccggatcaaccgggctgagacaaaaatttcttgaagtcgaggctttattggagagcttttc

SEQ ID NO: 130389 - DNA, 477 bp, Arabidopsis thaliana
tatggtccacaataagcatcactgtgattgccaatggtaagtaacaatgtacacaaataatgacaacaatttttgtaaagaaacagctctcttatgaatcagagagaagaatttggaggaaaggaaagacgaagaaagcctaataattcaaccaaaattattgtgaatagttatttagtaatactctctaagcacctgctaatgcgctgaagctgccacctctcctctgttttagaatatgtaagaggaatgaaaaggagtgttggtggcagtacctcatatatcaggcatggggagatggatgcagctgcatttctgtaaagttattgtttcctagaggagtaaataattgatttagaggtctttcttctcagacaaagctggagttttatgaagatgagtttgtgaggatgtgtttgggggtggtggtggtgggggtagctgggaagggtgctttgccgtttgggaacctcattt

SEQ ID NO: 130390 - DNA, 449 bp, Arabidopsis thaliana
cagctttttaaacccaacagagcaaaaaagcaaaagattcaacaaaaatctcctcaaattctattcatggtctctagaaattctgacggatatttcttggatccgaccggtatgactgttcctggtctcggaccttcctttacagccgccgtttcttcttcttcttcaccaacgacttcttctacggccgtggctgtggcggatgtgacggcgatggtttcttcttcggaggaggatttgagtaagaagattaggaagccttatactattactaagtctagagagagctggacggagcctgagcatgataaattccttgaagctcttcaattgtttgatagagactggaagaagattgaagcttttattggttcaaagacagtgattcagatacgaagtcatgctcagaagtattttcttaaggtacaaaagagtgggaccggtgaaca

SEQ ID NO: 130391 - DNA, 548 bp, Arabidopsis thaliana
  unsure (1)..(548): unsure at all n locations
ctattttccaaatatcagtaaaatcagactttaaattttttgaaaatctgtctctctctctcgctgatcgctctagaatttttaagagagagagatacttttttaatcgatcttgccgtcaggatttgtttaaatttggcttccgtctgacatccatcagcttctacaatagtggttggtcagcttccgtctagcatcgtctagcttgtttagtaatgatggctagcttctgttatccaccggagtagtccggttttgcttcccgttctcgagttttctttttctactctttgtttttatcacagctaccttgtgtcgtgacgtgtttagtttcagtaattccgtgatctatgagacggcggtgtcaattcgatggccttgtttcgtttgatgcggatttcccttttgttaagtaagcggtctacaacatgaatcaacgttgattgcaaccaagggcctaaggnnattaaaagaaggttttttttcagcaaataatggntnncctatagntggcttttncatgaattggnnctccgnttnggggaaaa

SEQ ID NO: 130392 - DNA, 449 bp, Arabidopsis thaliana
gtgcagtaggtggagatactgagactcagaaggatcttgctattgtatttcagtctgaggagcgacataaattaaagagggttattgatacattaaagcagagactggaaacagcaaaagctgacacggaagatcttatctcaaggctgaatcaggagttagccgttcgacaatttctgtcaacaaaggtaagagatttagaggttgaacttgaaacaactcgagagagctgcaagcaaggcatggagaaaacagtcctagatgaaaaggaaagatttactcaaattcagtgggatatggaggaactccgcaagcaatgcatggaaatggaatcgtttttaaactctataaaggacgagaaaacacatattgagactgcaaatgagtcacttgttcaagaaaatcagatgttgctgcagcagatcaatgatataagagaaaattttgag

SEQ ID NO: 130393 - DNA, 373 bp, Arabidopsis thaliana
cccacgcataagggagaggaagagagagcgatgggacacgtaacgaggctattgataaacccttcgtcttcctcgccacttctccacctccgttgttgccaccggactcttgaccctaactctgtcttctctcttcgaacctcaatcaccaaaagcaagggacgattctcttgtcttttctccggcggcaaccagagagaggagcaagctcgtaaatcattggaaagcgctcttggtgggaagaagaatgagtttgagaagtgggacaaagagatcaagaaaagagaagaatccggtggcggaaatggtggtaaaggtggagggaggaggaggttggtttggaggtggtggttggtttagtggcgaccatttc

SEQ ID NO: 130394 - DNA, 684 bp, Arabidopsis thaliana
  unsure (1)..(684): unsure at all n locations
gcaaaaataagcgnncaaacctntgnanccaagacanctggaaaccctgcttgacgataggncaagtcactctgaacgnttgcaccncaagcnccgggttgcttcacaggttagcttcatgtacatggcctctgaaggctgaaagcgtataaaaaacacgtcccncccttggttttgacanttgaatatgncgccaggaacatctttaaactgaatgcgaatatctgccttctttgaactcattgcctttccggccttcagtataaaaggaacacctccccatctttcattgttaatgcgaagaattgttgtggcaaacgttggagtgtttgagtcatttggaacagttggatcatctctatatccttcatattgtccaagaaccacctcttcatcttttatgggaatcacagattgaagaaccttcactttctcatcccggatgtgctcgggtttaagagagattggtttctccatggcgacaaggcaaagaacctggagcaagtggttttgaataatatcacgaatgattccgtattcatcaaaatatccaccgcgaccttcagttccaaaatcttctctgaaaacgatctgtacgtttgcaatattgtcgcggttccatagtggcaaaaacaagcgattggcaaacagaagaaccaacatgttttgaactaactcttttcc

SEQ ID NO: 130395 - DNA, 499 bp, Arabidopsis thaliana
  unsure (1)..(499): unsure at all n locations
ctattttccattctctgcacgttttcatggcgactcgagattctcaagggattaaactctttggcaaaactattgcatttaacactcgaacaataaaaaatgaagaagagacacacccgccggagcaagaagccacaatagccgttagatcatcatcatcatcggatctgacggccgagaagcgtccggataagatcatagcatgtccaagatgcaagagcatggagacaaagttctgttacttcaacaactacaacggtaatcagcctcgacacttttgtaaaggctgccaccgttactggaccgccggtggtgcacnccgggacgttcccgtcggcgccggtngtcgggagcccaaaccacctggtcgtgtcgtggttggtatgncntgganattggaatggtgttcncaagtcgacttttnaatnggttgcccgttaagantggnacatccggaccggantccngganttccgnatgatttccctgangggccggt

SEQ ID NO: 130396 - DNA, 516 bp, Arabidopsis thaliana
ggccgagaagcgtccggataagatcatagcatgtccaagatgcaagagcatggagacaaagttctgttacttcaacaactacaacgttaaccagcctcgacccttttgtaaaggctcccaccgttactggacccccggtggtgcactccggaacgttcccgtcggcgccggtcgtcggaagtccaaaaccacctggtcgtgtcgtggttggtatgcttggagatggaaatggtgttcgccaagtcgagcttataaatggcttgctcgttgaggagtggcagcatgccgcagccgcagctcacggtagtttccggcatgattttcccatgaagccggctccggtgttactccgacggtcaatcgtgctgattataattatttactctcttttttaaaaaataatttgttttggttttggggttgagtggttttcctctaaacccgttgaagaacgtggtgaatttggttgctattgggtacatacaggctggcaaagtagttaatttgtcatttgtc

SEQ ID NO: 130397 - DNA, 516 bp, Arabidopsis thaliana
tgtcagaggtggtgcaacagctagtaagattagttcaaagggcaagtgttgtcaaacgaagatcaagtgatgacactggattttcatacaggacacctgaacacgagcacgtcgatatctcattctgagtaatgatccaaaactactccaaaatcgggtcttttctgtcattcgaagctaaaatgcagcttgaaaactcaaaaggaagagagagttttgctcaatgcataagagaatctgatccaaaggactacagagaagtaaagaagcatcttggttcataccaaaagtgtaagaaaatatatgtttgtgtatttttgtaagagtaaaattagagtacataaccatgtttcaatcatctttcttgtaccattttctcttcacctgttgaataatcaagtatgagacttgttgctgcatcaaaataacatttgaaattttgcctatttaaaaaaaaaaaaaaaggcaggccgctctagaggatccaagcttacgtacgcgtgcatgagacgtcaa

SEQ ID NO: 130398 - DNA, 888 bp, Arabidopsis thaliana
  unsure (1)..(888): unsure at all n locations
nnnnnnnnnnnnnnnnnnnnnnnnnnnnnnnnnnnnnnnnnnnnnnnnnnnnnnnnnnnngcgggacgacccacgcgtgcgtgcggctgcgagatgacgacagaagggtccggtcaaatctcggtggtctttctcttcatccaagaaaagtttcggaagcaaagatgaaacctttttcgattcgcagccatggctacaatctgactccgacgatgatttccacagcgtaaatggcgatttcactccatcactcggaaacactcctaagagcagcttctcagataggccaccacgtttccacaaccttatattccacgagaagaagccttcccgaggctcgtcttctccagcgccacttccaaggaggaagaagcttggtgagcttttcagagacagtataagagaagaacgagaagaaagcggttcatcgtcagctataagcactccttatctatcaggtgctaactcacgcgaattcaatgacaccgccatcgaaaaggaagagaagaagaagtctaactggcatcatcatcgttgtcttcctggtttctcttcatgtggtggaagtttcatggagaggaggaagaagatgagttctgaaactcccaattgttgctgtaaaatgagatgcttgtgttttgatatttggaaatgttttgtatatgaaagaatgataaagagaaagagagggagagatacagagctctcagagtaaaaagctctgctgaattttacagggcactctattatcttgtgatgataagagattgaatcaataggtgaagagataatgtaaaaaaaaaaaaaaaaaagnnnnnnnnnnnnnnnnnnnnnnnnnnnnnnnnnnnnnnnnnnnnnnnnnnnnnnnnnnnnnnnnnnnaacggaat

SEQ ID NO: 130399 - DNA, 499 bp, Arabidopsis thaliana
  unsure (1)..(499): unsure at all n locations
cgatctcgtttgatcataatttctcaatcaaatttctttctctaaaaaggttttgctctttataaatttattttgattacttatattaatctatgaatgggttcgtcttcgtcgtcgtcgcttaataactctccgattagagctgatagtatggtaactccagaatctcagatgactgtgaacgataacaaaaacgacaacgtttcgatcttgtctccttctgtcaagaaaagctttgaatcgccaaggaagagtacttcgactccggcgaataataatctcactccggtcaaatctcggtggtctttctcttcatccaagaaaagtttcggaagcaaagatgaaacctttttcggttcgcagccatggcttacaactctggacttccgtcggttgattttccacagcgtaaattggcgnttttcacctncatcacnncggganaactcnnangggaggtttttangannggccccccgtttcccaaaccnttnttccc

SEQ ID NO: 130400 - DNA, 397 bp, Arabidopsis thaliana
gttgaatcgcccgtcactaaaatcctctccgagaatcctcctccgatctgccactagctatggcggaatcgtctggtaccacgctaatggatctgatctcggcggatccaaccccggttcctgcacaatctacttcttcgtccgcatcttccacggcgtctcagccgacttctgcttccgcatcgtcttcttcccatctgcaccatccaatgtcgacgaagacgactctaggagagaagaaatcgaagagagccactttgatgcagatccaaaacgacactatatctgttgctaaagctgcactgaatcctgttaaggccaatatcatgccacaaaggcagagacagaaaaagaagccggtttcctattcgcaacttgcaaggagcattcatgaatt

SEQ ID NO: 130401 - DNA, 519 bp, Arabidopsis thaliana
gtcttccactttgatccacttaaagcagctttaaagctttgaacatgtttagctataatccctgaggaactatcctcatgtctctctccagttgcttgcttcccttttctcaatcagcgacggctccgtcttcctccgtctgctcttgccatctcgccgcctctttttctaattttccggtttcgtcaagagactatagtttctccagaagtggaagccttgttctcaacggaggaggctcgaatctctgccggagattctgtggtttgaaactgtggatacttaagagcttgaatcgtagacaaggcaacaacagaaaacatcagcctgtaaacgagcttacaacacactcaaagcacactttcctcagcgatgatgaacgaggttttgctgaagaaactagagctgaagatttacggccccgaggggaatattctggggacggttttgaatgatggggttcacaatgtgggagacttaccaccctgtgcaaaacaactctcggatgatctttcagat

SEQ ID NO: 130402 - DNA, 671 bp, Arabidopsis thaliana
  unsure (1)..(671): unsure at all n locations
ctggatttaagaataacattcgtgacttccttgtacagtctaaggagttttccgctcaggataacaaagatctctatgctgaggaagcagctgcacagagagagagagaacgtcaaagaatgctttcaattcctgggcttattgctcctaatgagattcaagacgagatggtggactcataaaattaagaagggtgcaacaagaagaagcttcctgtgttcaatgggctggattttttgtaatcataggtttttgaaaacaggaaagagttcaaggagagattaatttccccgaccgtatctctactaccgtattccgaagcttctcaattcgattttgaggattggaaaagctaagaaaacagagatctttttggggataaattagtgtcttgtttggttaattaattgggtttaatgtagatttaaacattagggaccttctctagttatctcatatggttggctcctttttgctttgacctttttttgggggtttgtttctattactcagtgattcgtgttttaggtgcaagatatttttttagactctatctttgtcaccccctagggggttccccattgtaagattgacttgtcgccatgtttctcattaaaatcgtccactttaaagtgtgctttgacaattttatcaaacaaaanctttgaatt

SEQ ID NO: 130403 - DNA, 1012 bp, Arabidopsis thaliana
ggccccccctcgaggtcgacggtatcgataagcttgatatcgaattcgcggccgcgctcgatttgacgtctgccgatttccttagctccgacgtaaaccactgatcgtcggtattcagctatattttgatttctcagctccaaaaattcccaacgaaatggagaaaatggccaaaggatggtttccgatgagcggcactagtagcagcggagatcagcagcagcaaccgctgcaaacaggaggaacgtctctgctagctgattggaattcttacgcagcatcgagagattttgaagaagacaccggaactttaggcttcgatatcgaatccgccgttagatctgccaacgacactgtttccggcacctttaatgttgtttcgaaaggagttagagataacctgcagtctgcaacaagtagtatgccttcaggaaaagctttgatgtatttcggtttacttctagcaagtggtgtattcttcatcttcattgccttcaccatgtttcttccagtcatggtgcttatgccacagaagtttgcaatttgttttacccttggatgtggatttatcatcggatctttcttcgctcttcgtggcccgcaaaatcaactcgctcacatgtcatcggcagagaggcttccactaactttaggtttcattgccaccatggttggcaccatatatgtctcgatggtgctccatagctacattctctctgtgattttctctgcattacaggttattgcactggcgtactactgtatatcatatttccctggtggatcatcgggaatgaagttcctcagttctactctcacctcctctgtcttccgaatgtttgggagatgagctttcgctttgacctatgcaaagaaaataactcgattctctcgtgtataaagaaagatgaaagatcttcaacagtggttaaatgacaaatctggtaaaatatgttggtccaatggctcaaagacagttttgttataaatttcctatattgatactttctgg

SEQ ID NO: 130404 - DNA, 523 bp, Arabidopsis thaliana
cgcctcactttagggaaagcacgtacgcctgcaggtaccggtccggaattcccgggtcgacccacgcgtccgtgcggctgcgagaagacgacagaagggggcaacgcaaaataacactgccgtttaagacgacggtcccttgacagaatcttcatcaacgctcgatttgacgtctgccgatttccttagctccgacgtaaaccactgatcgtcggtattcagctatattttgatttctcagctccaaaaattcccaacgaaatggagaaaatggccaaaggatggtttccgatgagcggcactagtagcagcggagatcagcggcagcaaccgctgcaaacaggaggaacgtctctgctagctgattggaattcttacgcagcatcgagagattttgaagaagacaccggaactttaggcttcgatatcgaatcccgccgttagatctgccaacgacactgttccggacctttatggtgtttcaaaggggtaggattccccgcagttgcacaaggtgtttgct

SEQ ID NO: 130405 - DNA, 423 bp, Arabidopsis thaliana
tccgttttcatttaaatagaaggcccgaaagctcttatggaaaaatcggggttcaattttatgttttctaagggagaattggaatacagaggtgagctaaagtaaagcaatggatagttttgctcctggtgaaaagactactataagtcaagaccgttttatatatgatatggataaaaacttttatggttgggatgagcgttctagttattcttctagttattccaataatgttgatcttttagttagctccaaggacattcgcaatttcatatcggatgacaccttttttgttagggatagtaataagaatagttattctatattttttgataaaaaaaaaaaaatttttgagattgacaatgattttagtgacctagaaaaattttttatagttattgtagttctaggtatctaaataat

SEQ ID NO: 130406 - DNA, 517 bp, Arabidopsis thaliana
  unsure (1)..(517): unsure at all n locations
nnnnnnnnnnnnnnnnnnnnnnnnnnnnnnnnnnngttgaaataatgtcaaatttcaaaatatgtaaataaatatacattcgagaaagaaattcacaaactgtaaacaaaatttttgtaaaataataagacttgattggtaattgggcgtaaaggtaaatatagagttacataccctatcaaacaatcagcatcaataaccatacatgtaaaaagctaagagcaaatcatttcctttcttcattctgaatggtctttttctatttctcaaaaaaaaaagaaaaaaaaaaaacttccccaaaaaatgaatttaggaatttgacgagcttaggagtggacacaatcagagggtaagaggatcaacttccgagtttcgctccttaatgggactccaatcttttggctttggctttacagagatgaccataagccgccgttgtaatatggaggctccaaaaaggaagattgaccccataccaaacttgatttgggaccggaaatgcgtccacattgtacaa

SEQ ID NO: 130407 - DNA, 769 bp, Arabidopsis thaliana
  unsure (1)..(769): unsure at all n locations
cgtnnnnnnnnnnnnnnnnnnnnnnnnnnnnnnnnnnnnnnnnnnnnnnnnnnnnnnnnnnnnnnnnnnnnnccacgcgtccgctcgatttattctgcaattcattggtaaaagatgttggcaacgagcttaatcttccttcttacatataccttacgtgtaacgctagatacttggggatgatgaaatatattccggatcggcatcggaaaatcgcatctgagttcgatttgagctccggcgatgaagaattgccggttccgggattcataaacgctattccgacgaaatttatgccgcctggattgttcaataaggaagcttacgaggcttacgtagagctagcgccgagattcgcagatgcgaagggtattttggttaattccttcacggagcttgagccgcacccgtttgactatttctctcacctggagaaattccctccggtttacccggtcggaccgattctcagcttgaaagatcgagcgagtccgaacgaagaagcagtcgatcgggatcagatcgttggggtggctcgatgatcagccggagtcatcggtggtgttcctctgtttcgggagcagaggaagcgttgatgagccgcaagtgaaggagatagctcgagctttggaactcgtcggctgcagatttctttggtcaattagaacaagcggcgacgtctagacgaatcctaacgatgtgttggccggaggggttcatgggccgaatagcaggcccagttttggtatgtgggtgggcttcaccaggg

SEQ ID NO: 130408 - DNA, 295 bp, Arabidopsis thaliana
aaaacatttagatcgcttacctggttcgtgcacctgattagctgctgttattcctttttcttcccagagttcaggtcgttaaaaatctaatcttttttggtgggtgaagactcttctttatcaaatcaacctaatttctcagattctcagatctcaagagttttgtttttttagcaacaatgaataaaaatccacggctcgatttttcctcaccgtcgtcgttagccactatctccgactctgcagacggtgagctgaatgaagaccacatctttgcaatcgacatatctcacgc

SEQ ID NO: 130409 - DNA, 563 bp, Arabidopsis thaliana
  unsure (1)..(563): unsure at all n locations
gttaagtgatttcatcaaagctctggtggatcattgcttctccaccaccaataccaatggcttccctttacctcaattccttacttccacttcctccttctcacccccagaaacttttagaaccttcttcttcctctttgttgagcacttctaatggtaacgaacttgctctgaagccgattgtcatcaatggagatccacccactttcgtctctgctcctgctcgtcgtatcgttgcagttggagaccttcatggcgatctgggtaaagccagagacgcacttcagttggctggcgtcttgagctccgacggacgagaccagtgggtcggccaagacaccgtactagttcaggtaggagatatacttnatcgcggtgatgatgaaatcgcaatactctccttattgaggtcacttgatgatcaggccaaggctaatggtggagctgttttccaggttaatgggaaccacgnggacaatgaattgttgaaggggatttcanatatgtaggatgcgngagattttnattgaggtggacctgattttttttgcctnncttngggg

SEQ ID NO: 130410 - DNA, 691 bp, Arabidopsis thaliana
  unsure (1)..(691): unsure at all n locations
ctcaaagatgantttaacttggtaatgancgctggttttaagaatgantttnatctcctcaagaacgttgtgcgggaagggaaagaagagtatatgcctttgaactttggtccttactgtgccacatcctcattcgatgctgcatctccgatcttccatgatattgtacccgcactcgagtccttgaacatcgaagttgaacagtttcatgctgaatccgggaaaggtcagtttgaagtatctctcggtcacaccattgcatcccatgctgccgacaacttggtctacacacgtgaagttataagatcggttgcaaggaaacagggattgctcgcaacctttgttccaaagtatgattattgtgacattggttctggatcacatgtgcatctaagtctttggaaaaacggcgaaaatgtcttcccggcatctaataactcatcttctcatggaatctcttccgttggagaagagttcatggccggagttctatttcatcttccatcaatcttagctattatagctccactcccaaacagctacgaccgaatccaacctaatacatggagtggagcattccaatgttggggcaaagaaaaccgcgaagcagcgttaagagcagcttctccaccaggaactcctgatggtttaattactaactttgagataaagtcttttgatggctcttcaa

SEQ ID NO: 130411 - DNA, 408 bp, Arabidopsis thaliana
gtaggatgtcttaaccacatagaggattgcttttcctttgagagtcaacaggcttggcaaaggccgaccactatacaatgtggagtttattcaatggttgaaacgtttttgcgattcaattaaagggcggctttttgaccgggatttttattccagtagaaccgaagttcaagaggtgggagagagaaaagcgtaatgggatctagtacgatctcaaagtcatggcaaacaaacaatatgcatcatcctcctgtggctacttccaacaaaccagctggtcccaagcaagcaacatcacatggaattggaggtgggagcaactcatcagccgaagtgcaagctctggcaaaggaggtagaagatcttaaggtctgggttgatcttttggaaaaagtaagagatttttac

SEQ ID NO: 130412 - DNA, 522 bp, Arabidopsis thaliana
aacaaaaatggagactagagaaacaaaaccagtgatctttctcttccctttccctttacaaggtcacttaaacccaatgtttcagctcgccaacatcttcttcaacagaggcttctccatcactgtgatccacactgagttcaactctccaaactcttccaatttccctcatttcactttcgtatccatccccgatagcttgtctgaacctgaatcctatcccgatgtcatcgaggttcttccatgaccctcaattccaagtgtggttgctccttttcggtgattgctttaaagaaggcttttatcctgaaggagccaacagcagcctgtgtgattgttgacgctctttggtacttcactcacgatttaaccgagaaattcaatttcccgaggattgttctccgaaccgttaacctctcagctttcgtcgctttctcaaagtttcatgttttaccagagaaagggtatctttctttacaagagactaaggcagactcaccggatccggagcttccgtatctt

SEQ ID NO: 130413 - DNA, 470 bp, Arabidopsis thaliana
gaaaaaacaaaaagaacaaaatttgttatctctctttcctctcattttgaccctcttcacttctttttgatccctaaatggaacacgagagcaagaacaaggtggatgggatggagatggagaaaggaaaaaaagagagtgggtcgagaaaaggacttgagttaacgatgagagttttggctttggtcctaacaatggtagctgcgacagtacttggtgttgcgaaacaaacaaaggttgtgcctataaagcttattcctactttacctcctcttaatgtctctacaaccgccaaagcctcttacttgtctgcttttgtgtacaacatttctgcaaacgcgatagcttgcggttacaccgcgatctcaatagtgattgtgatgatcagcaaaggcaaaagaagcaaaagtttgttgatggcggtcttgataggagatcttatgatggtggctttactgtttttcagcact

SEQ ID NO: 130414 - DNA, 691 bp, Arabidopsis thaliana
  unsure (1)..(691): unsure at all n locations
acccgtactggacttcgccaagggagtcatgatgacttaggtaattgtcctagctacagccccaggagtgaggacaattgatcctgaccttgcacagaggcatatatacatggcatatttacctttggctcacatccttgagttagcagctgagagcgtaatggctactattgggagtgctattggatatgggtctcccttgacgctaacggatacttcaaacaagataaaaaagggtacaaaaggagatgtcacagcactaaagcccactataatgacagctgttccagccattcttgatcgtgtcagggatggtgtccgcaaaaaggttgatgcaaagggcggattgtcaaagaaattggttgactttgcatatgctcggcgattatctgcaatcaatggaagttggtttggagcctggggattggaaaagcttttttgggatgtgcttgtgttcaggaaaatccgtgcagttttgggaggtcaaatccgctatttgctctctggtggtgcccctctttcttggtgacactcaggagnttcatttaacaacctgcgtttgggctcccaatcggtcaagggtattgggctcacagagactttctccttggtcggaccctcctgggggttttgggcanaatccntttggcccttttggggctncnacttccttngnccctttaaaaannnt

SEQ ID NO: 130415 - DNA, 465 bp, Arabidopsis thaliana
cttttcgtcatcgtaatcccgcggtgaagtagtcgatgtaatcattgagagtgaaaagaaaaacaatgtcgcagctgttatcttctcctccaatggcggttttctccaaaaccttcataaaccataagttttcagatgctcgttttctctcttctcactcaattctcacctccggtggattcgccggaaaaattattcctttaaaaccgacggcgaggttgaaattaacggtgaagtctcgacaaagtgattactttgagaaacagaggtttggtgactcgtcttcttcgcaaaacgctgaagtatcttctcctagattttacgtgggtcattcgatttacaaagggaaagctgctcttacgatagaaccacgagcaccagagtttgtggctttggaatctggtgcgttcaagctgacaaaggaaggttttttgttgctccaatttgctcctgcagctggtgttc

SEQ ID NO: 130416 - DNA, 434 bp, Arabidopsis thaliana
  unsure (1)..(434): unsure at all n locations
acactaactcccataantaatttaattttacatacaacacactgatttactattgacaaaactaatcttctaacaacgataggttatatcataaatatgtacagagaaaaaaataaatgttaccaagattctacctaacatccttctactacctattggtccaacatgaaagaccgaccaccaaattcttaactaacttcccacattttatatacataaaattaaatttgcccacaaaccaaatccataaccggttcactatctgctccagatacaccaattcaaccgcgtgggttgttgacaaacacgattgaattggtctacatggaccggttagttaccccggttaaaaatatgatttgatcaaacccaaatggtatagattcctcatcactagactcccaagtgacaccaacactgtccctcctccatac

SEQ ID NO: 130417 - DNA, 504 bp, Arabidopsis thaliana
  unsure (1)..(504): unsure at all n locations
gcaagatatctggatacgcggaaaatagagagaagaaatcaaaaagcatatttttattttatctttgaaaagaagattattgtttttagtctacaatggtgactctaaaaatggagatttgcatcgagttgttgaaattgaccgtagatttcgtcgccgccgttgcagaatcaatcgaagtagctttccgccatcgtcctccaccggtgattcaatattcttcagtgatgtatggtcgccggagtaattacaccgccgttcccattcctctcgtggggtttctgtagttaatatattcttcttttgtggttcttttgttttttgttcattcttgttctattataattaccttcttgcctcggacaaaaaggtatatttcttatgaaagaacaagatgtgttttgtgtataaaccaaaaaaatcacgaaaagtttacgtaacccgtgaatatataaaagtttagacgttcccggttggaaananttttntccntaanttnnnctt

SEQ ID NO: 130418 - DNA, 503 bp, Arabidopsis thaliana
  unsure (1)..(503): unsure at all n locations
agaacatgaaagcagtggtgagcaagttgtattgttcctcgatggaggaagtgaatggtggtgagacgacggccacacctggttgacggcggtggctttgtggtgacagattacaaagaaaagatagttttcaagatcgacggttgtggagttcttggaaccaaaggagagttagttctcagagatagtgatggcaacgatttgcttctcatccacaaaaagggaggagtggtgcaggctttgagcattcataacaagtggaaaggttatagttacgactaccaaggaagtcctaaaccggttttcacgttgaggggtcccaaacactcttgcttctccataaccagttcaatcccgcatctcggttggaccggggatttgctacttctgatgttaaagggttttccccggcatagggttcgtagcatccgttgttcccaaagggaatgtgattgcacaagtaaaagattggttngggntggggtttnttaaggnggggccat

SEQ ID NO: 130419 - DNA, 539 bp, Arabidopsis thaliana
  unsure (1)..(539): unsure at all n locations
ggtactggagtatcaacaatggaagnngctcaagtgagttcaagggtggntccacccagatggggttcttataccacgtgttggaaagtatcttgcggcttcatcagcaaatcttgtcaatgtactagatgtagaaacacaagctattcgacactctttacaggggcatgctaatccgataaactcggtttgctgggatccctctggtgacttcctggcatctgttagtgaaggtatggtaaaagtatggacgctggggacaggtagtgaaggagaatgtgttcatgagctaagctgcaacgggaacaaattccagtcatgtgttttccatccggcttacccctcgctgctcgtaattggttgctaccagtctttagaactatggaacatgtcagagaacaagacgatgacattaccagctcacgaagggctaattacatctttggctgtttcaactgcaactggattggntgcatcaagctagtcatgataagctagtgaactntggaagtgaaaactatgtgagaggnaaagagacg

SEQ ID NO: 130420 - DNA, 456 bp, Arabidopsis thaliana
  unsure (1)..(456): unsure at all n locations
tatccctgagactattccgcccaatccagaggatangccacccctncctcctatgcaatggcttattggaatggttccacattcttttcctaccttcatgggggaatcagtcgaaaccagtagttctgctttatcagcggcaccacccattggttctagcttgaatgttcaaattgggtctccaccatcagagctatctgtatctttaggaagtgacgaatcagaacgacttcctggagggtttgttcacaatgcatcagaaaagccattgcaatcatccattcagttcccaaccatgagcactgatttgaatagtcaatacgacagttctgagctccctacaataccttatcaggagtgcatagaggattttggttctgaggagaacaatcttttggctgaccatgcagctcagaaccacgagctcgtttactctcaaggcgtcgtcattgcagc

SEQ ID NO: 130421 - DNA, 541 bp, Arabidopsis thaliana
tagatgtgatttcactctcgctaggtggatcatcacgcccgttttacgtggatcctatcgcgatagccgggttcggagcgatgcagaagaacattttcgtgtcttgctctgcgggtaattcaggaccaactgcatccacagtgagtaatggagctccgtggttgatgactgtcgctgccagttatacggataggacgtttccggcgattgtccggatcgggaaccgtaaaagcttggtcggatcatccttgtataaaggaaaaagcttaaagaatctgcctttggcgtttaacagaacagctggagaagaaagcggagccgtgttctgtatccgggactcgctcaagagagaactcgtcgagggtaaaatcgtcatttgcttaagaggagccagcggcagaacggccaaaggagaagaggtgaaacggagcggaggagcagcgatgcttcttgtgagcacagaggcggaaggagaggagcttcttgctgatcctcacgttttaccggccgtttcacttggattttccgacggtaaaacctt

SEQ ID NO: 130422 - DNA, 477 bp, Arabidopsis thaliana
aaacaaaccaaccatagtaaccaaaaccacaacaaaacacatggctaagctcattttcttcctcgccgtccaaatcctctttggggccgtggtttcttccgccggagacggtgaagacttcgctagaaccatggaccggaaacttcttggtctccacaaaaaggagaaacttacccatttcaaagtctattggcacgatatcttaagcggtccgaacccaacctccatcatgatacaaccaccggttacaaacagttcctattttggagccatctccatgatcgacaacgctttgacggccaaagttccgatgaactccacggtgttgggtcaggcccaaggattttacgccggagcggcccaaaaggagttgggtttcctgatggcgatgaactttgctttcaagacagggaaatataacggaagcacgatcacgattcttggcaggaacacggcgttgtcggaagtcagagaaat

SEQ ID NO: 130423 - DNA, 418 bp, Arabidopsis thaliana
  unsure (1)..(418): unsure at all n locations
gaaaaaaaaaaataaagctgtgaaaaggtaataatttacatgaagttcacgggagtaggggtcgagttttgttcgtgttagggaccatgctgcctccagttccagtcaaagcaagggtggtcaaaggttccggagaagaagtgaacgtaacgtgtgatgcgacgcagcttagttcatgtgtaacagcagtaagcacaggagcaccaccatctacagattgttgcggcaaactgaaggagcatgaaacttgtttgtgtacatacattcaaaatccgttgtatagttcgtatgttacttctccaaacgctcgtaaaacgttagcagcttcgtgattgttgcttatcctacttgttgatggtttgtgatattacttaaacaaagctattattggcaataatagtaaaaattttaaacctnt

SEQ ID NO: 130424 - DNA, 768 bp, Arabidopsis thaliana
  unsure (1)..(768): unsure at all n locations
gcaaaaaaagctaaatccaaaaagcttcagacccgtcctaacaatgacgatcgttaaaccgtcgcagtgtctcattctccggcggcggatcttccccgttatgttcactcaaaagctcactcctcaccgtcgctattctcactttcatttccctcttctacctctctctcaattccttacgcacttcgccgccgtctcctgtcatcgtggtaacaccgattcatgttcctcataccttcgtgaatgagtataagactgataacgaaacaccgacgatggaagaagaaacctactccgatgtttatcactcaccggaggctttccgattgaattacgccgagatggagaagagattcaaggtttatatttatcccgacggcgatccaaatacgttttatcaaacgccgaggaaagtcaccggtaaatacgctagtgaggggtacttcttccagaacattagagagagtcgatttcgaaccctagatccagatgaagcagatctcttcttcattccaatctcttgtcacaagatgcgaggcaaaggaacatcatatgaaaatatgactgtgattgttcaaaactatgttgatggattgatagctaagtatccttattggaatagaacctttaggagcagatcacttctttgttacantgtcatgatgttggtgttagagcatttgaggggatctccgcttctgattaagaatacntattagggttgtgtgctcacctagctacaatgttggtttcattcctcacaagatg

SEQ ID NO: 130425 - DNA, 616 bp, Arabidopsis thaliana
  unsure (1)..(616): unsure at all n locations
aatgttttaggtccactatagaagagctatgacgtcgcatgcacgcgtacgtaagctcggaattcggctcgagcggcgctccaatatcgtctccggcggctcagctgcagacacaatttctctccaatcccattctcccccgctttcgccggtctttctccaccggaaaatcaccagcaactttctccgtcgtagctatggctccccagaaaaaggtgaacaaatatgatgccaagtggaagaaacaatggtacggagctggattgtttttcgaagggagtgagcaaataaacgttgatgttttcaagaagctggagaagcgaaaagtgttgagcaacgttgagaaatctggcctgctgtcaaaagcagaggggttgggactcacattgtcatctcttgagaagcttaaagtcttctccaaagcagaggaccttggtcttctcagtctccttgagaacttagctggaacatcgcctgcggtcttagcctcggctgcattaccagctctcacggctgctattgtagccctggtgttgatcccggtggccaaacnanntaggnggttcnnagnggtttttgccggggnttttggttaaagggttttttttgggtggcc

SEQ ID NO: 130426 - DNA, 687 bp, Arabidopsis thaliana
cctttggcagtttccggccggaattttatcaatttcccggcgtaatctccaccagagttatgggaatcaccggaagtctaacgccagatcagctcgattttttccactctcaagggtatttggtaatcgaatcgttcgcgagtgaggatgagataagaggcttaaggaagaggatggatgagttgcttaatcagtttgattgttccgtctcctctatcttctccaccaaaaatcagaagcacaccacagataattacttctttgagagcgctgagaaaatctccttcttctttgaagaaaaagcttttggtgatgatgggaaattgaagcaacccaaacaactctctataaacaaagttgggcatgcactgcatgagcttgacccattgtataaggatttcacatattcgtcaaagttttcaagtttggcatcatccttaggttacaggagaccagttgtcatgcagtctatgtatattttcaagcaacctggaattggagggcgaagttgttcccgcacccaggataattctttttggggtacaccggatcccccaaaagttggaacctggcccttctgggattggcttctttggaagaattccttccctttaaccttaaaatggtcttgggcttttttgggggccaatttccccctggggatccctcaaattaaagaaaatgggg

SEQ ID NO: 130427 - DNA, 449 bp, Arabidopsis thaliana
  unsure (1)..(449): unsure at all n locations
acgagagctgtgttccgcatctcccggaaatacttcctttgagtcgaagngaaagactgagctgagaccatgtagttgcggtagtagggtatggaacaacgatagtcggaacaaagtattggattgttaagaattcatggggagaggaatggggagagaaaggatacataagaatgcagagagggattcgtcataaagaaggactttgtggtattgcaatggaagcttcttatcctctcaagaactccaacactaacccttctagactttccttggactcgcttaaggatgaactctaaattaaatctctttatattaagattgaaatagacattgacaagtttggttatggatgattgtttttttttttaatatatttctttttcattaataggttatggttttcaatgtatgaagttgatgggaatcgtttcaattcgttaaatgaa

SEQ ID NO: 130428 - DNA, 561 bp, Arabidopsis thaliana
  unsure (1)..(561): unsure at all n locations
taaatgccgnancnccccccctgaatnngcgaaccacctaccnaattcccggccttanaattcgnaatttttttggnaggtaaaggatgaaaagggtttaaatcccagatgatggccataaaatgacttgaccttgatgcggactgtaatcctttgatgataaccttttggttgctgatggttatattattacccttttacagttttacattttgactgatttggttttgtgtttacatatttgtaacgagggacacaaattgtgtattggttatgtggttggctttgttttacagattcagttaattgatgtgatcttcgacgggtttgtcctaactgtagctgtgggtgatgatagttctgaaaatctagtctggatgttattgatgaaggtgtttggctcattccattatgtctagccgcttgagacgtttccgcagtttatgacctttagtttatgttcgttttgttatgttcccgaagccggtaataaaagtgtatttctgaaactactacgccttgtattcaatagataatattcatattctacatttgatttct

SEQ ID NO: 130429 - DNA, 465 bp, Arabidopsis thaliana
cgaatcgacccactcgtcctgatgatggggtcttcgcggcctttaccagtttttcagttctttgaccagcttctttcattggtcctgaactcagggttagagcagcatttgcatatatacaaggtgttttggtgacaattgatagactctaagatgggttctgggaatttgattaaggcaataattagattgaagaagagtaaacaaggaactgaaaagaaaaaaactagtgctgtgaaaccaaaaaaaggttccaagaagaagggtacatcactagttactcgtagtgaggattgggctgctactcggattcagactgcttttaaagcctataaggctagaaaaagcttacggcgtctaaaaggaattgcaagagcaaagttatcaactgagaaacaatctgtgaagaccaagctttggtcacattgaaggatcttcactcatggaagtaaatacagtcagaga

SEQ ID NO: 130430 - DNA, 907 bp, Arabidopsis thaliana
actatagaagagttatgaggtcaactgcacgcgtacgtaagcttggatcctctagagcgttcgccctttgttttatcttttttttttttttttttttttttttttttggcccaaagctgccaaaagaaggtttcatataatcagtctttattaacaatcctgcttctttttacctctacaactcttttatatccatcaatactcacaccagatgattattttatgacaggggagggaatacaaagagatacatgaggctttcgacgaaaagaacaaagagaaagcccaccttgtttcaatcttaatggaggtaaaacaattgtagcgctatcccagctctgattctctaagacttttagctttttgtatacctgagatgctgatcccaatctcggggatcttcttggcaggtccctactaaagatatttttgttcctcgggagtgtttgggggactcctcaatcagaatacaagagttgtgttttcttccaccaccttggagatggtattatgcccgacttgggaaacctttggtatgataaaacggaaaggtcttcgtccacgggggccaaataagtaaatttaatcttcttttgggagggaaaatgtgggaacaagcgccgataatgcggaaggaggaacccgtcctttcatcgcaaagtaccgggagggactgtggccatgcttgcgatgggctggcgccgctttgaatttaaatgccgtggtcgagccgctggggtgagtgagcggggtctaggacacacctagagtagtactgcgaggatagaaggggccctatgaagctagactttctggacgatgaaagttcgagctttgtcggttgtgggacgtgtttgagcgtgtaagagaggccaccgagagcgcgacacgctgtttgcgttttcgg

SEQ ID NO: 130431 - DNA, 763 bp, Arabidopsis thaliana
  unsure (1)..(763): unsure at all n locations
nnnnnnnnnnnnnnnnnnnnnnnnnnnnnnnnnnnnnnnnnnnnnnnnnnnnnnnnnnnnnnnnnnnnnnnnnnnnnnnnnnnnnnnnnnnnnnnnnnnnnnnnnnnnnaacatataaccagtctttattaacaatcctgcttctttttacctctacaactcttttatatccatcaatactcacaccagatgataaataaatgacaggagagggaatacaaagagatacatgaggctttcgacgaaaagaacaaagagaaagcacaccttgtttcaatcttaatggaggtaaatcaattgtagcctatcccagctctgattctctaagacttttagctttttgtatagctgggatgctgatcgcaatctcggtgatcttcttggcagctactagctaaagatatttttgttcctcgtgagttttggggcgactcctcaatcagattacaagagttttgtattcttccagcaacttcgagatgtcattaatccgcaactcgggaagaacttttgatatgataaaacggaaagggcctcggttccagggagggccaaaatcagcagatggttaagctggccctggggaagtgaaaatccgtgtaacaggccgctggtaatctcgaaggtgggggcccagccctttaggtggaaagccccggngnggctgttccaatgctggcnaggnctnacnggcacctgnaccaaaggccgnnaanannnaacccccaaaacctggccaattaaaacctggntttggccccgg

SEQ ID NO: 130432 - DNA, 708 bp, Arabidopsis thaliana
  unsure (1)..(708): unsure at all n locations
cgaaggacttatactgnctacaacattcgtccgcatctttgnanncacnagctgctggaggggcattgttccatcctcaggtccgctcgagcctattcacgcctatctgtccgcattctctatcattccgcccactaatattaccggaacacgtgacagtgagagtccaagtgccattcaacagcagaagctccgcttgggtctcctttgatgggaaagaccggaaacagcttgaagcaggggatgcactagtgtgtagcatggcaccatggcccgtctcaaccgcttgtcaagttgaatccactaacgacttcttacgcagcatccacgatggtcttcactggaacctaagaaagactcaatctgctgatggaccttagaaacaaattcctccagcttttttctctttcattcttaaccaataaccatatatagtctcgacgtctatctatctatctatatgcatatagataaatgtgaaatggaaagtgatgggttctgtgatagaatgtggtctgtatccattgttgtgtagagaatgtaataatgtagctgctatgacccataattctgttgatgtgataatcactcaaagttaatgaatcaaagatatttctgcaaaaaaaaaaaaaaaaaaagggcggccgctctagaggatccaagcttacgtacgcgtgcatgcgacgtcatagactcttnctatagtgt

SEQ ID NO: 130433 - DNA, 584 bp, Arabidopsis thaliana
  unsure (1)..(584): unsure at all n locations
gaaagaaacaaatatttagaaacaaaaaatgctataattcttcctttttcttgttctttcacagattttgattgctgttcaatcgactaagagggtgtgtctttaatccctctctgttttaattttgcttcctagtcttctaagagccatggcagccatagatgtgttcaatagcagcacacatccttttcaggaagagctcatgaaagcacttcaaccttataccaccaacactgattcttcttctcctacgtcttcaaacacagtcttcggtttcaatcaaaccacatctctcggtctaaaccagctcacaccttaccaaatccaccaaatccaaaaccagcttaaccaggagncgnaacataatctctccaaattttggcccaaaggcctgtccccaatgaaggaccatgnccgntcagnaanctttntagggggggttggcaaagggactnggggaaaatnggtaggttgngtccgttttcccaaggcccnggnccnggttttgggttngggctttggcaanagttaggnggngncctgggtttngcctgggttttaaaagtnagggggggtnnggggtt

SEQ ID NO: 130434 - DNA, 636 bp, Arabidopsis thaliana
  unsure (1)..(636): unsure at all n locations
cggcaagactgtcaaggcanctagcnncacggccctcccntttcaagcaccgganaaacagcaggcgggctgctatcaaaagaaacatggcccctcaaaactatggctactcaaagcagatgctggaacttcttttatcaaaggcaccagcgagtaagcaagaggaattaagaggactagtcgatctctgtgtccagagaggcacatcgaacaaatccattgacccgcttgaagatccttctcagttatgctcagctacgctcagcagattatcgactattggatacgatgtttgtgatctctgtggtgctaagtttgctgctctttcgtcgcccggttgtatcatatgcggtatgggaagcatcaaacgctctgatgcactcgctggacctgcacctgtatccacaccgtttggctaaaggttatagacactatcaccgttggtgttaatcaacatctaagcaaatttcaaactggttacatgtacgaactcattcgatcgattttgtgggtttgattttgatttattcgtctgtatatgatttgattatttgtatctgtttattttccgtacgtagctaatacaatttgttgagatnnnnnnnnnnnnnnnnnnnnnnnnnnnnnnnnnnnnnn

SEQ ID NO: 130435 - DNA, 482 bp, Arabidopsis thaliana
cggacgcgtgggcaaatacacattttaagaaagaaaaaaaaaaattgaaagttgagaaaagttcctagagtttgaagacatgaagttcacggcgcttgtgttcattgtgttcgtggtgggtgtcatggtttctccagtttcaatcagagcaactgaggtcaaactttctggaggagaagctgatgtaacgtgtgatgcagtacagcttagttcatgcgcaacaccaatgctcacaggagtaccaccgtctacagagtgttgcgggaaactgaaggagcaacagccgtgtttttgtacatatattaaagatccaagatatagtcaatatgttggttctgcaaatgctaagaaaacgttagcaacttgtggtgttccttatcctacttgttgatttttgagatattgctaaaaaaagttgttaatgataataatatttaacaaacataagcccaaattatttttttttattctttttctttttt

SEQ ID NO: 130436 - DNA, 465 bp, Arabidopsis thaliana
acgcgtacgtaagctcggaattcggctcgatgtgagtgtgggatgtatctccttcaatcgttcacaggcaaaggatcgtgaaattgtagcaaaaaagttaagggaccatgtccaaggagctgacagtaatcctcttctcatatttcccgaagggacatgtgtaaataataattacacagtgatgtttaagaagggtgcttttgaattggactcgcactgtttgcccaattgcaattaaatacaacatagatttttgttgacgccttctggcatagcagaaaacaatcatttactattgcacttgctgcaatctcatgacttcatggggctgttgttttgtgaagtggggtacctaggaacccctaaccatttggcgccggtaataacagaatttgattttcccataaaaggtatttaccttactttctcttctggcgaagtatacaaaaggtgcctttggtatgg

SEQ ID NO: 130437 - DNA, 637 bp, Arabidopsis thaliana
  unsure (1)..(637): unsure at all n locations
aggtcaggcgggatnacccnctgagtaaattttcaaagctgaggagaaagaaagctttttcggtctgaaattgaagtgcgaatcggggaatctagggtttcgagagagagataatgggtggaggaggacatggcggaggtataacttacaagggagtcactgtccacactcccaagacttggcacaccgtcaccggaaaaggcttgtgcgccgttatgtggttctggattctgtacagggcaaagcaagatggtcctgtagttatgggatggaggcacccttgggatggtcatggtgatcacggtcacggagatcatcactaggtctcactgaaccctttgaagatcatgacgaaaaaaggatcgtctcttgtttttttccttaatttttcagcttcatatgtcgaaataaagagaactgtgaagaagacgtgaattgtttttgtacacaactttgtaagacttgctgcttctgttttaagttactacttgtgtgttgcacttcctgatcatgttgttattttgctgtcaacaaattaatttgaaataaaacgcattgcgagattcgtgtttttnnnnnnnnnnnnnnnnnnnnnnnnnnnnnnnnnnnnnnnnnnnnnnnnnnnnnnnnnnnnnnn

SEQ ID NO: 130438 - DNA, 1654 bp, Arabidopsis thaliana
gaagggttttacacaacacagatccagcaagttgcctagtaacgtagcagggacattttctggggtagctgagaaagttaggcatttgaaaacccttggatcctacgctgttcttttggagccaatattctctgtctccgagcaaaaaggtccttattttccatttcatttcttttcaccaatggacatatatggaccttccaatagccttgaatccgcagttaactcaatgaaagtgatggtgaagaaattgcacagtgagggaatagaggtacttttggaagtagtttttacacatactgctgattctggagctcttcgtggaattgatgacagttcctattactacaagggaagagccaatgatctagattctaaaagttacttgaactgtaactatcctgttgttcagcagttggtattggagagcttgcgttattgggtaaccgagtttcatgtagatggattttgttttataaatgcttcatctctcttgagaggcgttcacggtgaacagctctctcgtcctcctttggttgaagcaatagcttttgatccacttcttgcggagaccaaactaatagctgattgctgggatccacttgaaatgatgccaaaagaagtacggttcccacattggaagcgatgggcagaactcaacacaagatattgtcgaaatgtaagaaattttttaaggggaagaggcgttcttagtgatctggctacaagaatttgtggaagtggtgacgtatttaccgatggaagaggtccggccttctccttcaactacatttcaagaaactcaggactctcgcttgttgacatagtcagtttcagtggccctgagctagcttcagagctaagttggaattgtggggaagaaggagcaacgaataaatcagttgttcttcaaagaaggctaaaacaaatccgcaatttcttgtttatacagtacatatcacttggagttccagtgcttaatatgggagatgaatgtggaatctcgacaaggggctcgccttgtttggaatcacggaaaccttttgattggaacttgctagcttcggctttcggtacacagatcacgcaatttatctccttcatgacttcagtaagagcaagaagaagtgatgtgtttcaaaggagagactttttgaaacctgaaaatattgtttggtatgcaaatgaccaaacaactccaaagtgggaagatcctgcttctaagtttttggcattggagatcaaatcagagtcagaggaagaggaaactgcgtcattggctgagccaaatgagccaaagagcaatgatctgttcatcggattcaatgcgagtgatcatcctgagagtgtagtcttaccttcacttcccgatggaagcaaatggagaagattggtcgacacagctcttcctttcccggggtttttctctgtcgaaggagaaaccgttgtagcagaagaaccgttgcagcaactggttgtgtatgagatgaagccgtacagttgtaccctttttgaaaccatcaatactacaacttaaaactcaagttatgatctttgtatagcggccgcgaattcgatatcaagcttatcgataccgtcgacacgagggggggcccaatagccattgcatttcaaagggggggcggcggggggg

SEQ ID NO: 130439 - DNA, 683 bp, Arabidopsis thaliana
  unsure (1)..(683): unsure at all n locations
tggaaaccttttgattggaagcattctaggtttcggctttcggtacacagatcacagcaatttatctccttcatgacttcagtaagagcaagaagaagtgctgtgtttcaaagaagagactttttggaacctgaaaatattgtttggtatgcaaatgaccaaacaactccaaagtgggaagatcctgcttctaagtttttggcattggagatcaaatcagagtcagaggaataggaagctgcgtcattggcttagccaaatgagccaaagaccaatgatctgttcatcggattcaatgcgagtgatcatcctgagagtgtagtcttaccttcacttcccgatggaagcaaatggagaagattggtcgacacagctcttcctttcccggggtttttctctgtcgaaggagaaaccgttgtagcagaagaaccgttgcagcaactggttgtgtatgagatgaagccgtacagttgtaccctttttgaaaccatcaatactaccgcttagaactcaagttatgatctttgtatatgttactgttttgttacatttccagtaagaatatattcagttaaatcaatgatttccgcaaaaaaaaaaaaaaaaaaaaagggcggccgctctagaggatccaagcttacgtacgcgtgcatgcgacgtcatagctcttacagagtgnnnnn

SEQ ID NO: 130440 - DNA, 569 bp, Arabidopsis thaliana
  unsure (1)..(569): unsure at all n locations
ggagattttagagctgttcttcaagggaacgttgctaatttgctagagattagncttgaaagtggtgatccaaccgttgaccaattcgaagggagtcatttggtttttgtggctgctggctccgacccttttgatgtcattaccaaagctgtcaaggctgttgaacaacatcttcaaacattttcacaccgagagagaaagaaaatgccagatatgctgaactggtgtggttggtgcacttgggatgcattctacaccaatgtcacagccaaagacgtcaagcaaggtcttgagagcctcaaagctggtggggttaccccaaagtttgtcataattgatgatggatggcaatctgttggcatggatgagaccagtgtagaatttaacgctgataatgctgccaatttcgcaaaccggttaactcacatcaaggagaatcacaagtttcaaaaggatggcaaagaaggccaccgggtggatgaccctgcattgagtcttggacatgttatcacagacattaaggagtaatattcactcaagtatgtttatgtttggcatgcgataacccg

SEQ ID NO: 130441 - DNA, 526 bp, Arabidopsis thaliana
taggtacaactatagaagattatgacgtcgcacgcacgcgtacgtaagctcggaattcggctcgagatgatttcaagggtggtgactgggtcagagtgaaggcgtcagtgtcttctcccgcaatatggatgggaagacattactcgaaatagtattggcgttatgcacagcttagatgaagatggtgatgtgggtatagctttctgtttcaggagtaaacctttttcatgttctgtgacagatgttgaaaaggttacgccctttcatgtgggacaagagattcatatgacaccatcaatcacccaaccacgacttggatggtcaaatgagactccagcaactattggtaaagtaatgagaatcgacatggtcgggactctgagtgcacaggtgactggtagacagacgtcgtggagggtctcacctggagatgcagacctgctttcaggttttgcagttggggaccgggtgcgctcataaccgaccctgggaaacagaccaggctatgattgccttaatgtaggaa

SEQ ID NO: 130442 - DNA, 470 bp, Arabidopsis thaliana
  unsure (1)..(470): unsure at all n locations
gatagataagaaatcacctaatgcagggcaaaagaaacggagacaaagatggagattgggaaataaagaactctcccaactttggagatgggcagatcaaaatccgaatgctttgactgattctnaacgcgtgcgaacccctgatattgccggcttctggattccattagcagaagatatggtgccatcagctggcatagaagatgagtaccatcataaaaacaacagagtttactgctggaaaggtcttcggtttacagctcggcaagaccttgaaggattttctaggtttactgaaatgggaatcgaaggagttgtcccagttgaactattgccgcctgaggtccggtccaaataccaagctaaaccaaacggaaaagccaaccgagcggggaaagaaggacccaaaggtggttctcatgaaaccagaggggaaccagattggtgtttctaatagtgaggtnnagntt

SEQ ID NO: 130443 - DNA, 604 bp, Arabidopsis thaliana
  unsure (1)..(604): unsure at all n locations
cgggaaaccaggatgtgtacggaatacatgttcgcttatagcatgtcctctngatcttggcagagggaacgagggacgtattgaatgtccgtaccatggatgggaatactcaaccgatggagaatgtaagaagatgccgtctacaaagttactgaaggtgaagatcaaatcattaccttgtcttgaacaagaaggtatgatctggatttggcccggtgatgagccacctgcacctatacttccttctttacagcctccatcagggtttttaattcatgctgagcttgtaatggacctcccggtggaacacggtttacttctagataatctcttggatcttgctcatgccccattcactcatacatccacttttgcaaaaggctggagtgtcccaagtttggtgaagtttttaacacctacctcgggtctccaaggatactgggatccatatccaatcgatatggaatttaaaccaccgtgtattgttttatcgacaatcgggatatcaaaacccgggaaactagaaggcaaaagcacacagcagtgtgcaacacatcttcatcaactccatgtctggttaccttcttctaaaaacaagacaaga

SEQ ID NO: 130444 - DNA, 517 bp, Arabidopsis thaliana
  unsure (1)..(517): unsure at all n locations
ctctctcctctctctcgtttttctcatatggttcttgataataatttgaaagaaagatgtcaatgatgagcagaactcgaagcagcatcgccatgggaacaccatctttccttgaggtgaggaaacaagcttcatttttcttcaaagagaagcttaaaacggcgcgtttagctctcaccgatgttactcctcttcaactaatgactgaggaagctacggatggtgagtcatgtggaccaaatacacaaaccttagggtccatttcaaaggctgcttttgagtttgaagattacttggcgattgttgaagtcttgcacaaaagattggcaaagttcgataaggggaactggaggatggcttataactcactaatagttgttgagcatttactcactcattggaccagagagtgtttccggtgggtttcaaggggatatagggtgttatcccccaaatgcaaaccttccaccaggttncggggaaggggttaatttggggtnacctnttgaaagaaggc

SEQ ID NO: 130445 - DNA, 438 bp, Arabidopsis thaliana
gcgtccgaacaaaagaaaaaatatagacatatcatctgcttctttgtttctgttagtgcgtgtgtgggtcttgggggtctcatgtttttcgtgatgcgataatgctaaagtggaggcagaagatcgtccacctgtacttgttgaatactttccgggaacatattgtagtccaattcgtgctcggggtcctcaacagtgcaaagatgaaactaaggatccttactatcctaattgcgtttgtataaatcaagcaagtggacatgattgttcatgtactcattgataagtttcctttatatgtatgcgttactgaatcttgagaactaaatctatttaataaaaattagatatttatctttgatttaaaaaaaaaaaataccaccctctaaatatttcttattttttatcctaaactccctctattttaattttggggcg

SEQ ID NO: 130446 - DNA, 692 bp, Arabidopsis thaliana
  unsure (1)..(692): unsure at all n locations
cnnnnnnnnnncgactcttatagggaaaactggtccgcctgcaggtaccggtccggaattcccttgtcgacccacgcgtccgctcggctgcgagaagacgacagaagggggtgtgtgttgttgttgttggcactgtgccactttctctctcgatggaccctctcaagcaagcttcttcgatcttccgagcttagtttcgtttctaaatattcagctgttgaaatcgtgcttattgctacaaattgagaggcactaaatcagtgaggtcgtaaagaagaaggcaaccacaatgatgcagacttgttgtatccatcaatcgttttgtttccctcatagagtctttccacggtttgatgcttcgattggtattaagcccccaaagctttgtcaagttggtttcattggaaagactcaatcttatgggatttcaagtccgatacggcaaagaagattatatgtgaatttgaatgctaatgatggtcacccatccatgtctatgttggaagaagaaacctctactgaaaacaacgcacccagtcaagaagccgagcttccgttcagcaaatggtcaccttctaagtacatatggggaggtttatcagcttcctattactagcaggacaagtcgtcctccggattttaaagggtaagattcactggagaaacactcttcaacagctggagagaaccga

SEQ ID NO: 130447 - DNA, 639 bp, Arabidopsis thaliana
  unsure (1)..(639): unsure at all n locations
ctattacactcgatacgactatgagaacgtagatgcaactgcagctaaagaactcatgggactttgggttaagttgcaatcttcacttcccgaagtcaacaagattataaagggaattcatccagaggtggcaaatgttgcaagcgcagatgagttcgagtacaaagatccagtagatggctctgtttcaaagcaccaagggatccgatacttattcgaggatggatcccgacttgtgttccgtctctcgggaactggctcagaaggagcaacaataaggctatacattgaacaatacgagaaggacgcctcaaagatcggccgagattctcaggatgctcttggtcccctggttgatgttgcattaaagctgtcgaaaatgcaagagttcaccgcccgatcatcaccaactgttattacataagacagctttcagaagccgctgtctccaggaggactctcattccaacttcatttcttatgaatttgggttttgcttttttcctgttatctgttatcttacncaagtatacttcaatacatataattttaatggaataacattaggtggcccaaaaaaaaaaaaaaaaaggcttaccccnaaggcgaccgctctagaggtccaagcttacgacgcgt

SEQ ID NO: 130448 - DNA, 912 bp, Arabidopsis thaliana
  unsure (1)..(912): unsure at all n locations
nnnnnnnnnnnnnnnnnnnnnnnnnnnnnnnnnnnnnnnnnnnnnnnnnnnnnnnnnnnnnnnnnnnnnnnnnnnnnnnnnnnnnnnnnnnnnnnnnnnnnggggaatggacacattagccaatcataaccacatctatctttcatccactcacgtcactcgtcaaaccaaaatctataaacctcccaaaatacattaaatttaaataaaaaaatagatcacattaagtctacgttacttataagaaccaaccaaaatcaaataaattaggatcagagaagaaatttattgaaccgccatttctactctcgcaaatagcttaccatcaaacaccaatttccatatcacgtaagctatatatatttttattttatacactcctttctctcaacttctttatttttatatacaactcttaaaagtaagtatattatatttatttaagtggtttatgctttatataagaaagaaaatgacaagtatgatcgtgaagacaacgccggagctcttcaaaggaaatggagtgttccgtacggatcatctcggagaaaaccgaatggttagtcgatcaaaccggctaggtgatggatcaaaccgtttccctagaaccggtacaatccattgccaacggttaagcatagcaaagaccggtttgcatcgtgagacgaaggctcgagccatacttagccctgtgtccgatccggccgcttccatagcccaaaaggtaagcctttccatttcaatcattctggtgtattttcaccataaaattttatacacttttttattacgttttgttttccccttctgtcgtcttctcgcagccgtacggacgcgtggnnnnnnnnnnnnnnnnnnnnnnnnnnnnnnnnnnnnnnnnnnnnnnnnnnnnnnnnnnnnnnnnnnnnnnng

SEQ ID NO: 130449 - DNA, 323 bp, Arabidopsis thaliana
cttaaccctcaatcaaaccaaccaaccaaaaaaccatgatgcagcgagtattcacctttggaaaaggaagaagcgaaggcaacaagggcatgaagtccttgttgggagggaaaggagccaacctggcggagatggctagcataggcttgtcggtgccgccggggctaaccatatcgaccgaggcttgtcagcagtatcagatcgccggcaaaaagcttccagaaggtttatgggaagagatcttagaaggtcttagcttcatcgaacgtgacattggagcttccctcgctgatccctccaagccactcctcctctctgttcgc

SEQ ID NO: 130450 - DNA, 629 bp, Arabidopsis thaliana
  unsure (1)..(629): unsure at all n locations
tggaggttggggttttggtaatgggaatggatcctttttttctggnaatgggntttctttgcgctttgtagagttaacgttgcagcgagagattgattgtccaaggagatttaatctctcaccttcgatgaagtctttgttgagagagaatgttgcagcctttgctgctgggtatcgtgctagtatggagcaaaagaagcaggtgcaaatgcagtctgaaactagtggtactagcttgtcttgcacggctgctgctacacattcagagaagtgtgagcagccacatgtcttcggaagtgaagaatgtttcanttcagtgctggagaaattccgggatctgaaccttgatgacaatgttgattcggcacctgaggagctgaaggatgatgctttaataggactacttcagcaggttcaggatctcaaaaagcaattgaaggngaggaaagactgggctcagaagaaggcaatgcaagctnccccaaaggtcagcgatgaactntccgggcttaaatcattnggngttnganangggaattcancggggtgaaaaaggggacaaactcgtggggcttaccttgaaaatttcngggtggaatccnttgaaacttcggcaatttcaggaatgc

SEQ ID NO: 130451 - DNA, 529 bp, Arabidopsis thaliana
  unsure (1)..(529): unsure at all n locations
cgaaaagaatcctttgtaaattctttgctcacggtgcatgcttgaaaggggagcactgtgagttttcttatgactggaaggctcctacaaataatatttgcacctactaccagaaaggaatctgctcttacggaagtcgatgcaggtacgaacatgtcaaagcttccaggcctcatccatctgcttcatcttcgtccgctgtgcctcggccatctcctgcttcagcttccaacactcttgcctgtgcttttcttcctggtgtcgcggaaagagatttgagcccagatccttcttcatctttaaaaccaacgtggaatttggattctcttcaccaggattccgtagacgaggtcaaaacttctaaccctggtacagtcaaacctgaagaactacccatttgctcatttgctgctgcttggtgattgccacgtgggaatgaatgccctaaaatcntnggacnttttccaactttngggaantttgtttnanccttttaanccccggaaagggggcccaaannttttnaaaa

SEQ ID NO: 130452 - DNA, 649 bp, Arabidopsis thaliana
ctcactatagggaaagcctggtacgcctgcaggtaccggtccggaattcccggttcgacccacgcgtccgtacggctgcgagaagacgacagaaggggctccggcgacgagtaccttcgccggcaataatggtctctgtgtagatagatcgtgaagaagattagagaatcgaagaactcgtatcagataagctaaaatcaatgggtagccaacgacgaagatcggtgatagctttgattttcatctgctgcgccatttcttctacctcatctgatcaggttggaacaaattatagagattctcatgaatttttcgattccgatacaatttgtatctctgatcaatacattatggagtcttatttcactacatacacttccttagacgactcagagtttcgaaacttcttgcttcttcaacaatgttctgacaaagttcctactcaagattcaaacattgttcctgcaacttcatttatacaacatagaaacattactggtgaaggttcacatcgtaatctcatcacatccatcaagcttcttcttcatcactcagagtctcagtttcgtgagctcgtgatcgttgaacggttgcctttgggtgtttttgctgatccttttgagcttcagagtcttcaacaacgcagagc

SEQ ID NO: 130453 - DNA, 673 bp, Arabidopsis thaliana
  unsure (1)..(673): unsure at all n locations
gctgtttttgagatcgatccccaccaaaggagcctagcctaaatcatgccttcaggtgctaagaaaaggaaagctgccaaggaaaaagcaagaggaagaacaacaacaacaaggatcttctactctaatcaacctcttatccaaaaaaatggattcgagaagccaaggtgacaaggagagcgatgatggtgttaatgaacgcatagagatcactgattcaagccatgatcatgacaagagctctagtagcagcagtagtagtagcagcagcagcagcagctccagctcggatgatgagtcacgggaagtcaagaagatagatgatgataagaagactggtgatgatgtttctgaagttattactgtgagttctgtgccaattcaacctgtgcctattgctgcagatgctccgtttatgggatttactgctaatgcgattgtagagaatactggtttgatggattcagctgtgccgaatgatcccgaatctggagaactggttgagatctcgcatgttgatacaatagtctcaaacgaggctgatgataattctttgcctaaagcaactgagattgctgctgaagttgctcttgcatttgatgagattaggcagacgtcttcaggtgctactgactctgatgtgaaagaaaatnagggaaaaacttcgcctctt

SEQ ID NO: 130454 - DNA, 656 bp, Arabidopsis thaliana
acaataccacgttgtaaagagaagagtaggatctgatgtaccagagacttctcatgtatgccgtttcggaacagagaagatgcttataagattatctttcctcttacattgggagaaatcctgaaaacgataacttcactttcacggaatccttttcctcaccaatctctaattctggcttggtcaatccgcgcgatattcctctgctatacctccagagaaagattcaaaaagctccaatgggatcacttgaaagcaaagaagctcagaagaaattgcttgacgaaaagaatcataggaaacaaatcgatcagagcattacagacattctgcggctttcagttaaacaaaccaatgtcttaaatctcttaacttccacaagaacaacaggacagcctcttgtagacgattgggattgcttcaagactctagttaatagcttcaagaatcactgcggtgcaacggtgcattacggattgaagtatacaggagcgcttgccaatatctgcaatatgggagtggatgtgaagcaaactgtttcagccattgaacaagcttgttcgatgtaatgatttgcaaaacaatgtgatattcgactttaaaaatatcaaagttaatttcaataaaactcgatgtagagatggttggttcatgat

SEQ ID NO: 130455 - DNA, 431 bp, Arabidopsis thaliana
taggctcggtatcgcggttgatgtcgcgctaggtcttgagtatttgcatactggttgcaggccgccgatcattcatagaaacgtcaagtgtacaaatgtattcttagatgaaagtttcaatgcgaagttaggcggttttggcctttcgagagcgtttgatgcagccgagggaagtcatttgaatacagctattgctgggactcctggatatgttgaccccgagtattacacatcaaacatgttaacagagaagagtgatgtgtacagtttcggtgtagttctattagagatcgttactgcgaaacccgctatcataaagaatgaggaaaggatgcatataagtcaatgggttgagtctttgctttcaagagaaaatattgtagagattcttgacccgagtctttgcggagactatgacccaaactcggcat

SEQ ID NO: 130456 - DNA, 470 bp, Arabidopsis thaliana
  unsure (1)..(470): unsure at all n locations
gtctctctctatgtagacatctatccanggttacattgacggatcagactcttcttcaacgcgtcctagccaaacccaccgaccaaaggcttagcaacggaatcggattcaggtattattctgcggcttttctctatacttctcgtcggagcaatctctttgtgggcaaaccatgaggcttcaaaaggcttctccataagtatcatcaatgatgctaaagattctccttccggtaaaagattcgcccttttcttcgaatctgatgatacggcagtgcggatattgctcgatgcaagcttctttgtggagaggtttctctacgagggtgttcctcatcgtctccgtaagcctgtaaaccacgttaccgtccaattctgtggaaacagtaagtgatagagtagatagggttctcggtaacttcaggtgcaagtcatggngagtatgtgatcagattaaggccatcctctcac

SEQ ID NO: 130457 - DNA, 439 bp, Arabidopsis thaliana
  unsure (1)..(439): unsure at all n locations
ctttaatttagagagaaaaaataagcattcttccntctctgttttcgagcgggaaattctggagatggctatacaagcgcagttgacttacaccgctccgaatgcgaatcaaatcggttttggtgggtccgagttttctttgatcaacaacaatggcgttatcggaatcggtaacgatcagtcttatcttgtcaataatctccagttgcagaaagatttcaaccaacatgctctgtttcatcatcagcatcatcaacaacaacagtttccttctcaaagctttttagctgctcagatggagaaacagaagcaagagatcgatcagttcatcaaaatacagaacgagaggttgagatatgtgttgcaagaacagaggaagcgagaaatggagatgattttacggaaaatggagaagtaagctttgcttttgatgagtcag

SEQ ID NO: 130458 - DNA, 978 bp, Arabidopsis thaliana
  unsure (1)..(978): unsure at all n locations
tgannnnnnnnnnnnnnnnnnnnnnnnnnnnnnnnnnnnnnnnnngcctgcatgnaccggnccggaatncccgggttgacccacgcgtccgcggctgaagacgacagaaggggtgaagcgtgatctgtcacggatcgtgagtaatttgaagcttgtggtgtttcctaatccgtatagggaagatcctgggaaagcacttagggattgggatctatggggaccttttttcttcattgtgttcttggggcttactctttcgtggtctgcttccgttaagaagtctgaagtatttgccgtggcatttgcactacttgcagctggggcagtgatcctcacactaaatgtgctgcttctgggaggacatataatctttttccaaagcctaagccttctaggctactgtctatttccgctagacgttggagcagtgatctgcatgttgaaagacaatgtgatactgaagatggtcgttgtgtctgtgactcttgcctggagctcttgggctgcttatcctttcatgagcgccgcagtgaacccgagaagaaaagctctcgcactctacccggtcttcctcatgtatgtctctgttggcttcttaatcattgccattaattgattctatccggaaaaatgggaaatcagagataggttctttgattcagtttgggaagtcatttggtacagagtagatagagaattctccagccgcgaactattctgagttctaatgagatcatatgtataatatgttctttgacgcttttttgttaaactcccctgtggattttactcttctatatggttttgctttgtgtatgaaacttacggttcttttttggaaacgtatatataatatcaagaccttgatgctcgccaaaaatagtaaaaaagcaccaaccccccgatcgaaccgctctagaggatccnagcttacgtacgcgtnnnnnnnnnnnnnnnnnnnnnnnnnnnnnnnnnnnn

SEQ ID NO: 130459 - DNA, 537 bp, Arabidopsis thaliana
ctgaatcttaatttcccccaaatcaaagcttttgacctaaatccgtttcccggggagaatagatcaacaaaccatcgccggaatcttcaatatctctccggtgaagaaaaaatgtcgcacaacgatacgattccgctttatcaatcatctcaatcagacattgacgagattgagaatatgatgaacgacagttttcaatcaggtcccggaaccgtgcttcctgctcgaccaccgagtccgatccgtccgtcgattcccgtttcatcctcaccgttcgttcaatccaatctcccaccgcttccaccgtcgtcttcctcctccactcagaaggtgatgcctgttccagctcctccaccacttccgtcagcaggtaacgaaggtaacaagagtattggaggtagcggattccgatctccgccaaatacattgacggagcctgtttgggatactgtgaagcgtgatctgtcacggatcgtgagtaatttgaagcttgggggggtttctaatccgtatagggaaagatctgggaaagcactt

SEQ ID NO: 130460 - DNA, 724 bp, Arabidopsis thaliana
  unsure (1)..(724): unsure at all n locations
ttcccgcggggagacacacgtgcggctaatcattaagtttcatagctataatggcttcatcatcatcaatatcaaatcacaagattccaaacacactaatgtttttggtgatcgtaaactttttgtacctaattcaaactaattcagctgtcagtatcagttccaattccaactcccacttctcaagattctcgagacatcgaagctcaccatcatcaaaaaccaaacaagggtttcttgcaacggtccaagagagtatgaaccatgctctcttggctcgttctcttgctttcaacctcactctttctcatcgaaccgtacaaacccacacgttcgatcccatccacgactgcctcgagctgctcgacgacacacttgacatgttatctcgcatccatgcggataatgatgaagaagatgtccatacatggctaagcgcagcactcacgaaccaagacacttgtgagcagagccttcaagaaaaatccgagtcatacaaacacggacttgcgatggatttcgtcgcaagaaacctaaccggtttgttgactagctcgcttgacttgttcgtatccgtcaagtcaaaacaccggaaactcttatcggaacaagaatattttccgacgttcgtttccttccgtcagagcaaagggaggcgttcttgaagcttccggtgggggagcgcgtggtcggttggattctggttgtagcttcaantcggnaa

SEQ ID NO: 130461 - DNA, 525 bp, Arabidopsis thaliana
  unsure (1)..(525): unsure at all n locations
aaaagaacaattcgttttttcgctctctcaattttaatatcttcttcttcttcttccttcattgagcttcagcttcaactgtacaaagattggtaaaaggagaagaagaagatccattaaaccgtatctatcttttctctctccacttctatttccatggcggagggtgaagagaagaacggaattattgattcgattcctttattcgctaaggagcttattgccggcggcgtcacgggtggtatagctaaaaccgccgttgctccactcgagcgaattaagattcttttccagaccagaagggatgagtttaaaaggataggacttgttggatcaatcaacaagattggcaaaactgaaggtttgatgggtttctacagagggaatggtgcaagtgttgcccggatagttccccatgcagctcttcattacatggcttattggggcatacagggggtgggtttacctttgggttcccagacactactcgaggccattgcttgatccgaagctgggnaatttntc

SEQ ID NO: 130462 - DNA, 422 bp, Arabidopsis thaliana
ggaggctatggcgacgacggcgaagattttgaagggtttctacaagcagactaaaagcaatatcaccggaggtatctccaagtccaagccttcttcccggaaagtggctcccaaacacgcggcggctcaaggttctgatgttacccagcccgccgcattgatttcacacggctccgtcgatctcaacgaggattatgacaaggaggaggagatgcttagacaatttgacatgaacatcacttatggtccgtgcctgggtatgacgagacttgatcgttgggagcgtgcagtgcgtcttgggatgaaccctcccaatgaaatcgagaagcttttgaagaccgggaaagtccagcaggattgtctgtggcaaggtcgtgtctagataggggttctttaatcctttatctatgcccttgtatgat

SEQ ID NO: 130463 - DNA, 411 bp, Arabidopsis thaliana
cgattctcgctttccttctctcaacgttctcgtggaattcccaaatcggcttgaaatttttggagaaattggagcttcgattcattcatttatgaggatctctgatgattagtggcgaaattcgtgaagacatcttcgtccttgctttcgaatcgctgaatcgtgttacgttttctagattcggctgaggagtgaaattggatttttgaatcgatttctgaataaagaggaagaggatcggagatggcggcgggtgtaatggtaacggccacgggagcagtggggattctgtacttactgagccgtcggatcgggtgggcgagaaatggagaagatgattcaggaggtgaattgggtaaatcagggtgatctggaaggaggaggattgttaggagacctgctcaagcaccg

SEQ ID NO: 130464 - DNA, 522 bp, Arabidopsis thaliana
  unsure (1)..(522): unsure at all n locations
ctctgaagcatccatggaagctccttcaccttcaagcgatccatacaagttcctcaacattacacttaactcagatgggtctctcaccagacaccgtgatttccccaaactgcccccaacagagcaatccaaagacataccattaaaccaaaccaacaataccttcatccgaatcttcaagccacggaatattccgccggaatccaaacttccgatcctcgtttactttcacggcggtggatttatcctctacagcgccgcttcagctcctttccatgaatcttgcaccaaaatggctgatcgtcttcaaactataatcctctccgtcgaataccgtctagctcccgaacaccgtctcccggcgggcgtacgaagacgccgtcgaagctatcttattgggctccggtgatcaaagctcgtcggggccaattaacgggtgggttattggggcaangnggttaaaagnnggtttcggttttttngaaattttaggcaatggggttaaagctttgggggnaatnt

SEQ ID NO: 130465 - DNA, 607 bp, Arabidopsis thaliana
  unsure (1)..(607): unsure at all n locations
ccgaattctccaagtctctcatcatcacacccactccaacaaactttctacgagagaaaaaaacaaaaagaaaaacaaacaatggagaatcttgtaggtcttcttcgaattcatgtgaaaagaggtgtgaatctcgccattagagacatctcaagcagtgatccttacatcgtcgttcactgcggtaaacagaagttgaaaacacgcgtggtgaaacatagtgtaaaccccgagtggaacgacgacttgacactttccgtgactgatccgaatctcccgattaaacttacggtttatgactatgacttgctctccgcggatgacaagatgggagaagccgagttccacattggtccatttattgaagctattaaatttgcccatcagctcggaccaggacttcctaatgggnccataataaagaagatagagccgagcaggaaaaattgtttgtntgaatcaagccacattngtgttganccaagggcaaagnttntccagaatattgttccttagcttccagcacgtggagttttngngnaggttnagntacagctcgnntgggtccgntttcccgggttaagggggtttttnggncaaataatat

SEQ ID NO: 130466 - DNA, 414 bp, Arabidopsis thaliana
gaagaagaagaatggagttattcaataatggaacggccgttagattacggagctgtcacgatacatacatctacgccgtcgaggatgaaaaaaccgtccgtcaaagctctgacggaacctcacggcaatcgctatggacggtggagatggttccacgtaaaccaaaattcatacgtctcaagagctgctacggcaagtatttaacggcgagcgagtcgtcgtttcttctgggaatgaccggcgcgaaagtcatccaaacgccgccgtttcgtcaagcggagcatgaaagcgactgggaaccaatcaaagaagagtcaacggttaaactcatgtcgtggaacgagaaatatttacgtgggaacggatgagctccgccgcggaggaactctgtgacgtgtgatcgtgagccgcaca

SEQ ID NO: 130467 - DNA, 481 bp, Arabidopsis thaliana
cttaaaacgaaaccagaaatcacgagaagcattgttgtttctcacctctacagttacggcgcgaatatgacgagactacccctcttcgtcgtcctcctcctcttctccgcaagttgcatcactcgcacggcggcggagatcaaatctctcacaatctccgacgattctaggccgatgattctcttcgaaaagttcggattcactcagtccggccatgttagcgtctctatttcctctgtagcagtagtatcttcttcgtctgatccgatcccggatccatcgaggttagggttcttccttatgtcagaggaatcgcttctccaggtagtcttagagatcgagcaaaaccccaacttctgtgtactcgattccaattacgtcctccatctcttcacatttcacgatctctctcctccccctggttccaaatacgagcacttgtatccggtgatgtctccgaacgaatactctctcttcttcg

SEQ ID NO: 130468 - DNA, 845 bp, Arabidopsis thaliana
  unsure (1)..(845): unsure at all n locations
tatcttcttccccatttctctgaaaaccctaatttctccatctctcaatctctctgtgtttgtatctctcatctctgtttgagagatgataaggtaacttcaaagcatcctcgtgaattcatcttgtaatttcaggattttaattcgagataaatggcgacaaatgcgtgccttgagtccgattcgcttctacctccacggaagcgtttactcgccggattcaagaaccagaactcgagaatcagcaatgaatctccgagtcctcctttcgcttcttcgtcctcgtctactacaacttcaaatggttcctctgcttcagcagttgtgcacactcatcatctcgaccatctactcaatgaccagactcggtccccggaagagcttgctcaggcgtcgaaagcaaccgctgctttagcggttaaggttgcaaaggcggcgagagctactgctaatgagaaggccatcattgcttctaaagcagtggctgcagccaagaatgcgttggaattgtttgcttcttttcccgcagctgagacggtttcttgtaaagagcctaggttgattcgagctataaacaattctcctaggaggtctttgacggnattgttcttggtcacagaaacaaggaagcaaaaagnacttctgactaggtacctnttgaaccggttggggaatnaattgtttncttgggtgtttgttggnttccanaattgaccggganccccggngtnaaacngggnaaggcttgcttctnattcncggttaaacccggctnaaagggggaaaacaaggggganggggngtagcccctttnnggggaaaaaaaaggggganggggttaaacc

SEQ ID NO: 130469 - DNA, 417 bp, Arabidopsis thaliana
cactaccttctcttccaaaagtcgcctttttgaaaacacaaaaagacgaaaatgaccctattcaagaggccatgtctttacgtcagggatggacaaggaagatccagaagaggtacttagccgacgagccaagttcttgatttacaaaacacttcaagaagccgacttgatttctcggcgtgatcctcattcggcgtttatacggctgaagctgtatctgttgaaggtcaagatcggaaagaggttggctaagctacgccggagtgtggtatccgccgttaagatttggcggaattcgaaagcattctcataatggcgtgagagcgttgaagaagatgttccaaggtggtgcaacaactggactacctaggcctattttctcccttgaagtttgaaatttcatttatttatatttct

SEQ ID NO: 130470 - DNA, 782 bp, Arabidopsis thaliana
gacacacactctctctctgatcattcaacttttcgaaattttgcttcatcgtcttcgtcatcgtctctctgttgaattcctcaaacaatgcctctttctctccgtctttctccttcgccgacggctttatctccgactaccggaggatttggtccatcgaggaaacagtgccggattccttactccggcgtcccgacgacgaagattggtttctgttctttggattctaggaaaagaggagattcctctgttgttaggtgtagcttagaaaccgttaatgtcagtgttggtcaggtgacggaggtcgataaggacacgttctggcccatcgttaaagccgccggtgaaaagcttgtcgtacttgacatgtacactcaatggtgtggtccatgtaaagtgattgcccctaaatacaaagctttatcagagaagtacgacgacgttgtgtttctaaagcttgactgcaatccagataaccggccattggcaaaagagctaggaataagagtggttccaactttcaagattttgaaggataacaaggttgtcaaggaagtgaccggtgcaaaatacgatgatctggttgcagcgattgaaacagcgaggtctgctgcttccggatgaaccagtctctcatgtctttatccataattgtttgtatgtaatgtgaaatctggtgttatccctatatataggtgatgaggaaacgtcagcaaaagattatcttgtatgtgtaaaagtttcaagaaatatgatcatgaaaataattatctttaggtttc

SEQ ID NO: 130471 - DNA, 1103 bp, Arabidopsis thaliana
  unsure (1)..(1103): unsure at all n locations
gttcttgaagctccattccggtttgaaaaacgtccaagtaataacagagtcattgtccaaattgctctctttgatgtcctccccagggaatgaagaaacagatccgaggaagctataaaagcggcatcggaaaagcagaaattggcagcctcatgggtccaagctgcgttagtcactaacttatcgcccttctctgtctactccagcaaacaagccaaacttgctgcctccaggagcaaacccgtgatcatactcgagagcccgggtaataattcctctagtaaaacccgtgggaatattcaaaacaagccaacgattggatctaaactcgtagcacaaggaatgatccgtaaacacagggagaacagtagcagccagaaagccacctcggtagcagggtcagagtctccaccgtttaactgggtgaaaggggaatggtctaaacgaggcaactgatctggcagagaagttgcaaatggtttcacaagattggtttttgggtttcgtagagagattcttagacgctgacgtgattacatcatccagtctcagtctgtctgataatgggcagattgcggggatgctgtctcagctgaagagtgtgaatgattggttagacgagattggatcgaaagaggatgaagaagggttacaagaagtctctaaggaaacaatcgatcgattacggaagaagatctacgagtatctgctcacacatgtggagtcagcagctgcagcacttggtggtggtggtggctcagtctcttctcctagacctaaaccaatcgaaaccaaagcaaagagataaatgatgatgaagaagcttctacttgtttttttttctttcttgtatatatgaaaattggcggtcaatttcttctgtataattcaggcatcactaagaagcctaccgacgtgaaatgttggtattttttattcagtcagatactcactaaagagaacctattggtgcggccgatttcaacatattttttatccattaaaaaaaaaaaaaaaagnnnnnnnnnnnnnnnnnnnnnnnnnnnnnnnnnnnnnnnnnnnnnnntttnnnnnnnnnnnnnnnnnnnnnnnnnnnnnnnnnn

SEQ ID NO: 130472 - DNA, 444 bp, Arabidopsis thaliana
attacaaccacggtgaactgaaacccttcctggcttaaatcttgggtagttgggttaaatctttgcttcaccgggaaagtatcttagaaattatatctctggatgatgaagacgagatttctggattggtatttgaagatcgcgattggatcggctattatcggcggaggcatggaattcttcatgatcaagactggtttctacgacaaggttactgtaatagaagcagagagacgggcgttggaaaattctcctgaagctcaagccatcagagaagctcttaatccttggaggaacaaggacgcagaaacaagcaaaaccccataaatcattcaaggagctctttaattctcgtttaagttcatttcactctcaaaactttcgcaaatgctgcttcagtttcttactgcttgaaagttcaatatttcattttagtattttttg

SEQ ID NO: 130473 - DNA, 620 bp, Arabidopsis thaliana
cacgcgtaacgctttcagtcttcactccaatacatatttcaggaaatactgtctcgtatcttgtctgggactagtacatcctgtgaaacatcttaactaaaacagaggttgcttacaagaacattacctttacagcaagttattcagaactctggacattatcacccgagtcgatcgacgtcagggccgcctaacagaaaatggtaggctctctcgaagtatccaagcctccagagcacaaggttgagtccaagatcgtcatagccgatgaagaagaagaggatgaaaacgacagtccaatcgaagaggtccgtttaaccgtaccgattaccgacgatccatctctaccagttttgacattccgtacatggttcttaggaatggtttcttgcgtggtactcgcgttcgtgaacaatttcttcggttaccggtcgaacccgctcacggtatcttcagtcgtggctcagatcatcactctccctctaggaaagctcatggccacgactctaccaacaacaaaactccgtttacctggtacaaattggtcgtgttcgttgaaccctggaccattcaacatgaaagaacatgtactgatcactatattcgctaataccggagct

SEQ ID NO: 130474 - DNA, 586 bp, Arabidopsis thaliana
acccgcgcgacccgcacagtcggatgtctatcttttccaattttcccaccagaaagaaagcttctctctggttcgatatgaattcgactgagaattaattcttcaacaagcttgagagcaaagttatgctgcgtttaacttgttttacaccttctttttctcgagcgtgttgtcctttatttgcaatgatgctcaaagtcccatctgttcatctccaccatcctagattttctccatttcgtttctaccatacttccttacttgtgaaaggcaccagagatagacgtcttattcttgttgagcgtagcagacatctatgtacattgcctctcgctgctgctaaacaatcagcagcttctccttctgaaaacttatcgaggaaagcgaagaagaaagctattcaacagtctcctgaagcattgctgaaacaaaagctagatatgtgctctaagaaaggtgatgtcttggaagctcttcgcttgtatgatgaggcaagacgcaatggcgtgcagcttagccagtaccattataatgtgttgctttatgtatgctcgttggctgaggcagcaacagagtcgtctccaaa

SEQ ID NO: 130475 - DNA, 470 bp, Arabidopsis thaliana
  unsure (1)..(470): unsure at all n locations
gattcaggtcggtgtcgccaccgcccttcttcgtgcttctcttccttctttgtcggatcgtcaggtttacagatcagctcttgtggaggatatgggtgaagaagacaccgcgacggtggatcagaacagtttcggtggtggcaaagattcattgcttcgtaatcgtcattcgtcgccattgccttcaccgacacagctttcttctaaagtgattacattgcctaccgtattaacccttggccgtgtagctgccgttccgattctcgtcgccaccttttacgttgattgctggtggggaagaactgctacgacaagtattttcattgcagcagccattacagattggcttgatgggtatattgcacggaagatgagatttgggttctgaatttgggtgcaatttttggatccagtggcagataagcttatggtagcagctacaatgatattgttttgcnctaaaccaatgg

SEQ ID NO: 130476 - DNA, 477 bp, Arabidopsis thaliana
aaaatcaagatttgttgtgttggcgaagccacagagactgagtaatcgattcgattttgtttgcgtaatgatgatgacgatgccatgtgcatcgtgctcatcttagctttctcctctttctgggtttatctgtgcttaaggcaaaaaaagagtgctccttttttcatatcttcttcaaagtttcgtttttttttggtgtttattagaatctagaagttaacaattggagaatttggaattgggaaaataggggttagatatatctgtaagtgggttggttcttcttagcaagtgtttaactttgggagaggaagatgagaattacaagtgttgttatggttattggctatgagacttgtctctggtgtgagctgagatggtggtagatactttgatttaacgtcttggctatggagaatcatcatccttctactctattgtctatggattcaagtgcttcttctcatgaggagcttg

SEQ ID NO: 130477 - DNA, 651 bp, Arabidopsis thaliana
acgcctgcaggtaccggtccggaattcccgggtcgacccacgcggccgagtcggctgcgagaagacgacagaaggggattcaccggttgttatatcgtcgattcatcgtcgtcgacggcgagtacttgtgacctccacacccagattaatcttctataactgattttatcgcttagacgatcacgatctcatcgattaatctgacaaatgaagcatgtagtaaagatcttgagcctgttggtggctatctctgccttctggattggtcttttgcaggctgcaattattcctcgaagccatacatggttgctaccgatctactttgttgtatccctcggatgctatggcctattaatggttggagtcgggctcatgcagtttcctacttgcccccaagaagcagttctgctgcagaaggatattgcagaggctaagggcttcttcaagcacaaaggggtagatgttggatcgaattgacacaaaggcttttatcagaccattcatcagagatatttttcgttattgacaaaagacttaactgtactgtttggaatttttgaatttaccagtgtcactgaggtaaaactcgtaaaaaaaaaaagataaaaaaaaaaagagcaaccgctctagaggatccaagcttacgtacgc

SEQ ID NO: 130478 - DNA, 408 bp, Arabidopsis thaliana
gtcacgacgaccctcacactacacactacacataaaattgaaagccccactgcgaatccaccacaaagcaaaagaaatttgtttgttattcgaatggagctcctgagcacgatcaatctcttagcaatagctctagtgcttcttgtagttccgaagatatatggagcttgtcggatccttgtttggcggccatggatgctatcgagaagattcaagaagcaaggaatctctggtccaaaatacaggatcttgtatgggaacctccgagagattaggaagatgaagaacgaagctaagcttatggttcttgatccaaactccaacgatatcgtccctcgcgtcttacctcatcttcagcaatggaagtctcaatatggagagacctttctttactggcaaggaacagat

SEQ ID NO: 130479 - DNA, 340 bp, Arabidopsis thaliana
caaacatcttcgtctcttgaagattccaaaaaaaacaaatcaaaagctatgcaagatccatcacgacccgctacaggttacccatacccatacccatacccgaatccacaacaacaacaaccacccaccaacgggtacccaaaccccgccgccggaaccgcttacccctaccaaaaccacaacccatactacgcgccacaaccaaacccacgcgccgtcataatccgccgtctcttcatcgtcttcacaacattcctcctactcctaggtctaatcctcttcatcttcttcctaatcgttcgtcctcaactaccagacgttaacctaaactcactcttcg

SEQ ID NO: 130480 - DNA, 496 bp, Arabidopsis thaliana
aggggaatttctctctcctaaaaaacgctatcaaaaagaaaaacaaaagctatttgttctgttttgtaagaaaaaaagtagttagaggagaaaaaaaactcagtgccgagtcttgtgatactctgagccacaagaagtgtttttggtggaaggatctactgaactggtttgtaatatgggggaagatacaaaggcaaccattgagccaaccgcaaacaagactacttctcttgaaaagccatcagaggctatggctggaaaggagaatgctgggggtaaggaaacacaagaactggcgaaagatgaggatatggctgagccagacaatatggagatagatgctcagattaagaaagatgatgaaaaagctgagacggaagataaagagtcagaggttaagaaaaatgaagacaatgctgagactcaaaaaatggaagagaaggttgaggtcaccaaagatgagggacaagcagaggctaccaacatggatgaagat

SEQ ID NO: 130481 - DNA, 577 bp, Arabidopsis thaliana
  unsure (1)..(577): unsure at all n locations
aaaggaattcactgtctctctttaagactaaccgatgaatattcctccaatgctcatgcccggagacagcttccttccccggagcttctccctgttctctcagacaatgcttaccaccattttgttctagctacagataatatcttagctgcatcggttgtggtctcatctgctgttcaatcatcttcaaaacccgagaaaattgtcttccatgttatcacagacaagaaaacctatgcgggtatgcattcttggtttgcactcaattctgttgctcctgcgattgttgaagtgaaaagcgttcatcagtttgattggttaacaagagagaatgttccagttcttgaagctgtggaaagccataacagtatcagaaattattaccatgggaatcatattgctggtgcaaacctcagcgaaacaacccntcgaacatttgcttcgaaactgcagtcaagaagtcccaaatacatatctttgctcaaccatcttagnatatatcttcccagagcttttttccggactttagncaagntagtngttcctnaggntggnnggtntaggtgttacaggnaag

SEQ ID NO: 130482 - DNA, 638 bp, Arabidopsis thaliana
  unsure (1)..(638): unsure at all n locations
ctttatctctcatctctntttagacgtacaaaaaaatcagttttttaagtttcactctaatggcgtcaatttcgtcctttggctgcttccctcaatccacagcgctcgccggaacttcctccaccaccagatgccggacgactgtggctgctcgattagctgaccaatcagatgacttcgctcctcttcgttcttctggtgggaattgtggatgtgttaataattctggagagtttgatcgcagaaagttgttggtttcttctgttggtttgttgattggagcattgtcatacgattctaaagatggagactttgcatcaagcttctcaatttgctgacatgccagcgcttaaagggaaggattatggcaaaacaaaaatgaaggatccagattatacagaaacacagtctggtcttcagtataaggatttccgggtaggacctgggcctttagcaaaaaaggggggcaaagttgtggttgactggggcggttacacaatagggtactatggacgcatatttgaagctcgcaataaaacaaaagggggttcttttgagggcgatgataaggaatttttcaaatttaccttaggatccaatgaggtgatacctgcttttgaggaggctgtctctgggat

SEQ ID NO: 130483 - DNA, 719 bp, Arabidopsis thaliana
  unsure (1)..(719): unsure at all n locations
ccgcgaaaagagagcccggagctcaggataggtctaacctaaaaacagggtgcaacattctgtattcacccgggaggaagagcgattatgaagagttgggaaagcttagggctcacggaattcgacatcgagccagcgagaatggcgcttcataggttcgggaacacatcttctggtggtatatggtatgttcttggctacatggaagctaagaacagactaaagaaaggtgagaagatactaatgatgagtatgggagctggattcgagtctaataattgtgtttgggaggttctaaaggatcttgatgataagaatgtttgggaagattcagttgatcgatatccggaattgtcgagaatccctaatccattcgttgagaagtatgattggatcaacgacgataccatgagcttcgttcgtgttgattgatcacaagtaagcagaaaataacaagatcgattctttttaatatatttgtcaatcaattattatatgaaatgtttctttatcaggcaatatttcgaactttggattatttggaatgtttagacggctatagtcgacgattgatttttattttttaaaatttgaaataaataattaaagcatgtttaattggcgttgttttgtaaaaaaaaaaaaaaagnnnnnnnnnnnnnnnnnnnnnnnnnnnnnnnnnnnnnnnnnnnnnnnnnnnnnnnnnnnnnnnngtgacc

SEQ ID NO: 130484 - DNA, 520 bp, Arabidopsis thaliana
  unsure (1)..(520): unsure at all n locations
aggcgtccgggctagccaaaacaatctttttgagttgtcaaatcatcgacttgtacgaccaaatctcaaagctcaagagcttaaaaccttccaaaaatgtcgacactttgttcggacaactcgtgtccacgtgcttacccacggatacaaacatcgatgtcacaaatatgtgtgaagaagtcaaagacatgagagctaatctcatcaagctttgtggtgaagccgaagggtatttagagcaacacttctccacaattttgggatccttacaagaggacccaatcccactcgaccatttacacatctttccttactactccaactacctcaagctcggcacgcgcgagttcgatctcctgagccaacactcaagccatgtccccaccaagattgcnttcgtgggttcgggtccgatggctttnacancccatcggtattgggccaagttttacctccccaaaaaggnggttncacancttttgtnaatngnctttannngggnaacaaaatttggtttaaa

SEQ ID NO: 130485 - DNA, 1045 bp, Arabidopsis thaliana
gggaaaccaatggtggaggagatgtacatggaggaaatgaaggagcaggcaaagaacatgggatccatggaaaagactcctttggatcaaagcaacgaagattctgcttcaaagtcaacaagtaaccaagaaaagagcccaatggcggacactaattaccatatgaatcccaatcacaacggtgacctagaaggcgtcactggaatgcaaggaagccccaagagactaagaaccagcgacgagacaatgatgcagccaataaatgcggatttcagctccaacgagaagctcacgatgaagattctagaagaacggcaagggataagatcagatggtggctaccctttcatgggtaatttcgggcaataccaaatggatgagatgtcaagatttgatgtagtctcagaccaggagctcatggcgcaaaggtactcaggaaacaacaatggcgtgtccctcacgttaggtttacctcattgtgatagcttgtcgtccacggaccatcagggtttcatgcagacccaccatgggattcctatagggagaagagtgaaaataggagaaacagaggaatatggacccgccaccatcaatggtggtagctcgaccacaaccgcacattcatcagcggcagctgccgcggcttacaatgggatgaacatacagaaccagaagagatatgtggctcagttattgcccgacttcgttgcataaacccatctctctagaaggagaaaccgaaacaggttattatatacgtttctagtttttaattagtatatagtttctcataccattgaaccaaaacaaagaacaaaatttaattttagtctttggttatatatggccgccggttgtatatcgattttgtaatttttttttttcgtttctattgggggatggatagggttatatatgtatatggattagttacgtgtaatagcttgcattgggtgtataccaaaatataaaataaaaaaaaaaaaaaaaagggcggccgctctagaggatccaagcttacgtacgcgtgcatgcgaagtaatag

SEQ ID NO: 130486 - DNA, 432 bp, Arabidopsis thaliana
tttttatattttatatcaagtatgctcaagactaattcacatcttttaaaattaatcatagtcgacgtaagaaattccaacacggtttatagcacaataatcgtcgatttgtagatcaattgacatattaaccttatataatgtaaacataaataatattccgcagccagagacaatccttgccttttcagttctgtggaagatccttatgaattcagtttgtattgagaatatcataaaagattgcaggtttcttggtaactggagccagttcctcgactgcggcagctaaaccaaggacggtagcttcggcccaaggtcttcccattatttgtaatcctataggaagcccctctttatcataaccaaccgggactgatatggcagggaagccgaggagatttgcagctagaacgaagcgcattaaatcag

SEQ ID NO: 130487 - DNA, 470 bp, Arabidopsis thaliana
tgcggcactaccacactgagtaggaccatactcgtattcagacaccagggtcagcgaagtctaatcaatgttctcagaaatgaaaccaaagtcttgatatctttagatctggctatcgaaaaacacactagcttcttctaatcagaatacctatggagactgtctctgttttgctcttcttcttcctcttccttctagcggcagaagcaaggtgcaccaagcggacaggttgcaaggatttcacctgcggagaacatgacttcaagttccctttctttaggacagacatgccatctcgatgcggtcttttcaagctgtactgcagtgcacatattccagagatacagcttgcaatagatgggaaatggtatacagtcaagagcgtctctcaagccaacacgataaccatcatcgacccgaggcttaaccaaaagctgacaacccgaagctgcagtgacttgtcaagcttc

SEQ ID NO: 130488 - DNA, 436 bp, Arabidopsis thaliana
cgtctttccgtcgtccactgtctctctctctctctcgcgacgcagatggcgattcgtcgaatattttagctaatcctctctcttaatctctttgaacatttttccccaaattcgccgcagtgaatactttctcttcccgtaaatctccaaaaatcgagttttttttattacttctcaattgaatttgcttcttccgattgatctcttaattgattcgcttgtgggttggatttgaatcctctcttactttccaaaggtcataccttttcacagatctatctttgaaattgtgaagaagaagaagaagaagacgatgattcgactaagaacatacgcaggccttagttttatggcaactttggctgtaatttatcatgcattcagcagcagaggccaattttaccctgcgactgtttatctatcaacctcaaagatc

SEQ ID NO: 130489 - DNA, 811 bp, Arabidopsis thaliana
  unsure (1)..(811): unsure at all n locations
ttttttaagccaagccaggccccaaatagggaaaagggcccgttttttttaaggtaacctacccaatggtccaaaggggggttgaaataactccaaaaggttggtttaaactaaatgcaactttcagcttttgatccccaagaaatgttaaaccaggtttgtttcgggaaatgtaagtggtgttttaaaatgggtcaatggttgtagtcacccactcggatctagaggggctataatgatgatgactcacggtcacggaggtcagtgaaagttaatgggaatgagctatgggcggcagctgcagatttgagcatggtgtacagggtgaaagtggtggggcaggctgcgatggcgaggatatcgtgtctgtggctgggcttgcgtaaggaccaaaagctttctgggaaaaatctttccatgggaggcataagcgtcgacatttctgtctactgatgatgatggcgaagaatgaatgcaggtgagtctgctggcgagtgagtgaatataccttattcactgtttctccccagtagaaaaaaaaagtctctaaataaaaaaatgggtcaaattaggtatagaagtaagcaagggtttgtaaatttgaaaaaaaaaaaacttggttttgtcgtctgggtattgtaattaaatactaccttgtccctcatttgcctttgatgaggataaacatgaattagtctctccttctcaagtaaaaaaaaaaaaaaaaaaaaaaaagaaaaaaaagggcggccgctnnnnnnnnnnnnnnnnnnnnnnnnnnnnnnnnnnnnnnnnnnnnnnnnaacggaat

SEQ ID NO: 130490 - DNA, 712 bp, Arabidopsis thaliana
  unsure (1)..(712): unsure at all n locations
caacactcttgaaaacagagccatggaacattctctcatcatcctcctcttcaccgtcctcctcctcctcaccaccactcccggaatcctatctcagccctctccagccgtcgctccggccccaccaggacccacaaacgttaccaaaatcctagagaaagctggtcaattcaccgtcttcatccgactcctcaaatccactggagtcgctaaccaactctacggccaactaaacaactccgacaatggaatcactatattcgcaccgagtgattcctcgttcaccggtctcaaagccgggaccctaaattcgttaaccgatgagcaacaagtagagcttattcagtttcatgtcataccaagttacgtctcttcctcaaacttccaaacaataagtaaccctctccggactcaggccggtgactccgccgatggacattttcctctcaacgttaccatcagtggcaataccgtaaatatcacgtccggcgtaaccaacaccaccgtctccggcaatgtctacagcgatggacagctcgctgtttatnaggtcgntaaggttttgcttccacaacaagttttcgntcctngtcctcttgttncgggtccggttccgtctgtatcggaatnaagntggnggagggtnanagtntnngtnccgttntgtttttcagggggtgttttggttgntttggggaaatnntggttnttt

SEQ ID NO: 130491 - DNA, 392 bp, Arabidopsis thaliana
ggaggatttctaatgcgagatctaaaaacatatctttccgtagcaccggtactaagtactctatggttcggttcgttagcaggtttattaatagagattaatcgtttatttccagatgcattaacatttccctttttttcattctagttattaacatcagaaaggggtgaaaaatttagagatacaatcaacaatcggggactaacccccccaccttttctaattagtagaataaattagaaaaggtgggggggggggggaaaggtcgttaattcgtgggttcaggatccaatgaaattaggtatagaacgaatataagtgttgctagggaacctttcagatacttaaaaaaactacggtacaaagattttaaatatagttttcacaaaatc

SEQ ID NO: 130492 - DNA, 749 bp, Arabidopsis thaliana
ggaaaaaaaaacttttccatggggctcgtaattttcttggcactaattgtcttaatccttattattgggctcaggatattcaaagcttggatgattcttgtttggcatccatttgtgttgaccagaagactcaaaaaccaaggaatctcaggcccaaattacagaatcttttacggaaacctcagcgagataaagaagatgaagagagaatctcatctttcgattcttgatcctagctccaatgatattttccctcgtattcttcctcattatcaaaagcgtgggatattattaggagagacttttctttactggaacggaacagagccaaggatatgcatctcagatcctgaacttgcaaaaactatgttgtcgaacaagttaggtttctttgtcaaatcaaaggcaagacctgaggctgttaaacttgtcggctccaaaggacttgtctttatcgaaggtgctgattgggttcgccatagaagaatcttgaaccctgctttctccatcgataggctcaagatcatgacgaccgtgatggttgattgtacgctcaagatgttagaggagtggagaaaagagagcactaaggaagaaacagagcacccgaagattaaaaaggaaatgaacgaagagttccaaagactaacagctgatataatagcaacctctgcgtttggaagcagttacgtcgaaggaatcgaagtgtttagatcacatatggagcttaaaaggtgttatacaacttc

SEQ ID NO: 130493 - DNA, 381 bp, Arabidopsis thaliana
tcggtttcttcaccaaacgtatcaaaccaaagcaaagttctttcttcttcttctcttgcaccaatacagacgaaaaaaaactcacgaattagtgtctgatgatgctagtggcctaattcgagcttgagctgaggattttgattcaggttttggggtcatgcttttgtctcaagagcacaaaattctcttcaatgggggacgtaaatatgtaatcatggagaagaaatatgtattttcatttgatatcacatctcttgtctgcgttggtctgcttgcaacttccttcaacattgagttaatgtcttcacttcgaccaccgattaatggaactttatcaagttttcccaaaaatgattcgaacgttgtaggaaaacaacctcg

SEQ ID NO: 130494 - DNA, 420 bp, Arabidopsis thaliana
agattattcagtctcttggtccagatccgaccttggaccgtcgtgattctgaatctacacccgctggtctgactaatttgggtgctacttgttatgccaacagtatacttcagtgtttgtacatgaatactgctttccgagaaggagttttttctgttgaggttcatgtcttgaagcagaatccagtcttggatcagattgctcggctttttgcacagttgcatgctagccaaaagtcctttgttgattctgatgcttttgtcaagacgttggagttggataatggggttcaacaggatacccatgagttcttgacattgcttctttccttgcttgagcgttgcttactccattctggagtcaaagccaaaacaatagttcaagatcttttcagtggtagtgtctcgcatgtcaccacgt

SEQ ID NO: 130495 - DNA, 547 bp, Arabidopsis thaliana
  unsure (1)..(547): unsure at all n locations
tcagaaaatggctatggctacgcgagcgattcgataccagttaccgtcaccgagatttagagctcctagatgcgaatcatcggaaccgattaagcagattcagatccagcaacgaccaagaggtggcgatttagccgagaacgggaagatcgtgctccaaccaaggctttgcacgctgagatcttatggatctgatatggtcatcgctaaaaaggacggcggagatggtggaggaggaggatctgatgttgagttagcgtctccgttttttgagacgcttacggattacatagagagttcgaagaagagtcaggatttcgaaaccatctccggtagactcgccatgattgtatttgcggcgacggtgacggaggagattgttacggggaactcgttgtttaagaaactagatgtgggaaggatttaagttaagctatttgagcttgtntcccccncgattggatccccgngnntntttctttgtnacggnttntcggaccaagtcgacgggntttacaattagttnaactgtcattacccgtggggc

SEQ ID NO: 130496 - DNA, 640 bp, Arabidopsis thaliana
ctgttcgagttgtcaggtctcacaaggagaagcgttctgcatacgcccctgaggaaggagtgagatatgatggggtttacaggattgagaagtgctggcgcaaagttggagtacagggttcttttaaggtctgtcgttacctgttcgttagatgtgacaatgagccagctccatggaccagtgatgagaatggagatcgtccaagacctatccctaatattccagagcttaatatggccaccgacctgtttgagagaaaagaaactccatcatgggattttgatgaaggtgagggttgtcggaaatggatgaagccgccacctgcaagtaaaaagtcagtgaatgttttggctcctgaggagaggaaaaatttgaggaaagccataaaggcggcacactcgaataccatgagggcaagacttctgaaagaatttaagtgccagatctgtcagcaagtgttgactcttcctgtgacaacaccctgtgctcataacttctgcaaggcttgcttagaagcgaaatttgctgggaaaactcttgtgagagagagaagcacaggtggacggacactacacttaagaagaatgctctgaactgtccttgttgccaacagacatatttgttttttgcagaacccctc

SEQ ID NO: 130497 - DNA, 963 bp, Arabidopsis thaliana
  unsure (1)..(963): unsure at all n locations
gaaaaggagtctttggctaaaccgcagaagaggaaaagtcaaaaagaagtggacctaggtggtcagagtgcaactgtaccagcaacaaaaaacgttaaagcagagaatggaaaaacagctgattcagataaagaagagacagaagatgccaaaccactgaagccgaaagtttatagagacgagtgtacagcttttatttcgaatctcagtgtcaaggcacaagaggaagatatacgtaaattctttggtgatgatggtggggttgattccattcgcattctccatcacaaagacactggaaaaccaaggggactggcatatgctgattttgtggatgatgaacaccttgcagcagctatagcaaagaacagaaagatgttttttggtaagaagatcagcatagcacggtcanatccaaagaagggtaaaaaagaattcactcggcgtggaaatgatggttctgggaattcaaaggacccttcccctgatatctgagaaggcgaaagcaccacttggtggagaaactgagggtgaaaggaaaggaaatgaagtggaagtgaggggtaagaacacgtttgctgtcccaagaaatgttaaaccactcggctacacgacacctaaacccagcgcagatgagacaccaaaatcaaatgatgagttcaggaatatgttccttaaaaagtgagacttttgcttggtccctatcttccttcccttagatacttgtcttgttctacttttcggaagtaatcttatgttgtagaccagcaacatcggatctgctactctcttttgtcaagataactagttgagcttctatataactaatatataaatttaagtcttgctagacgacccatgttaataaaaaaaaaaaaaaaagnnnnnnnnnnnnnnnnnnnnnnnnnnnnnnnnnnnnnnnnnnnnnnnnnnnnnnnnnnnnnnnnntgtcctaaaacaatc

SEQ ID NO: 130498 - DNA, 436 bp, Arabidopsis thaliana
tctttctcttctcattcatttgttctttcttcagagaaaaacaaaaaacagagcatttttttttggtcaagagcaagaaaaaacagagcatacttttgcaaaaagcagagcttggagcgctttcttgtcatctaaaattcaaaggcagagacgatgggagatgtagttttgttcatagatgaaacatatttgaaatcgagttttaatcgctgtagaatctgtcacgaagaagaagctgagagctactttgaagctccttgttcttgttcaggaaccatcaagttcgctcacagagattgcatacaacgatggtgtgatgagaaaggaaacacaatttgtgaaatttgtctccaggagtataaacctggatacaccacaacttcaaaaccatctcgatttattgaaacagcagtcacaatcagagataatttacaca

SEQ ID NO: 130499 - DNA, 599 bp, Arabidopsis thaliana
  unsure (1)..(599): unsure at all n locations
cgtccgggcaactttatttttaacaatcctctttgtccactgtcctcttcctcatcctccgtgtcttctttcaccgtcgcaaccgcagccacaacaaccgtcttccaccggggccaaacccatggcccatcatcggaaacctccctcacatgggcactaagcctcatcgaaccctttccgccatggttactacttacggccctatcctccaccgtccgactagggttcgtagacgtcgtggtcgccgcttctaaatccgtggccgagcagttcttgaaaatacacgacgccaatttcgctagccgaccaccaaactcaggagctaaacacatggcatataactatcaagatcttgtctttgcaccttacggacaccgatggagactgttgagaaagattagttctgttcatctattttcagctaaagctctcgaagatttcaaacatgttcgacaggaagaggttggaacgctaacgcgggagctagtgcgtgttggcacgaaacccgtgaatntaggccagttggtgaacatgtgtgtagtcaacgctctaggacgagagatgatcggacggcgattgttcggcgccgacgccgatca

SEQ ID NO: 130500 - DNA, 616 bp, Arabidopsis thaliana
  unsure (1)..(616): unsure at all n locations
aaccgggggttttggccccccttgcnaagggntcccnaagggtttnngggaaantcccccggnnttttcccccgggggttcctttttcccggatcccacccgcggaggggcttccccggatccgccgggggagaccccggggtatggccccggcggggaccgttgccgtctgatgtggaggccgaggatcgtggatccgaattcggggtcggttcatgggaattacccaaacgggagagctctggctccaagggcccttctatttctaaaggtgcctccagctgaactagaagctcttctgattactcatccggacattctcgatgccgccgttattccgtaaaatatttcataactttttttttcctccaatttaaacgccatgatttttgccttataaacgtaaaacacaacatgttcatgtatgtatgcttttgtgtacgtactgcaaagttttccggacaaagaagcaggacaatatccaatggcttacgtggttcgnnnnnnnnnnnnnnnnnnnnnnnnnnnnnnnnnnnnnnnnnnnnnnnnnnnnnnnnnnnnnnnnnnnnnnnnnnnnnnnnnnnnnnnnnnnnnnnnnnnnnnnnnnnnnnnnnnn

SEQ ID NO: 130501 - DNA, 549 bp, Arabidopsis thaliana
taggtgcactatagaagagctatgacgtcgcatgcacgcgtacgtaagctcggaattcggctcgagcgaacgatccgagcttttttttccggcggcaattgggagattttgtggaagatcatagttggttctcttctcgattcttaggggttttagagacttggtgctcttgatttcgagtgatcatacagtattacaaggcatggacaaatcgagtggtttggatttcatcaaccagatgttcccagtagaagcttctctatcttgtgttgagtcttttatgcaaaagatttgtgacgagattcggcgagttgatgctaccattttagctgttgttagtcaacagggtaactccggaactagagctaaagaaaatcttaatgatgccatatgtgctgcggaggaactctctcataagatacaagagataaaatcaaaagccgaacaaaccgaagcaatggtccaagacatatgcagcgacattaaaaagttagattttgcaaagaaaacataaccacggcggtcactgctcttagtcgcctcacaatg

SEQ ID NO: 130502 - DNA, 470 bp, Arabidopsis thaliana
gttgcaagaaaaggaaaacaaacccaacgatgatatattttctgcatgagagcccaaacatgactgcttccagtttttgtgcacctgataccttggatttcctgcaagataacaccgcaagttctgctccaaaaataaatgatgatacaagttgcatgaaaaaggaagaattgacacatgctaacatggtagttggtgaagggattttagctgaaccaaatgcagaggatttagctgactctactttgaatctgacttctaaaaaaagtgattctgatttagttgatcaggaaactgccaaaacaatgatgtcattactacttcctcaagcaattccactgctcaagaagacctcaagcaagaagcccccaagaaatgatatgtcagacaactgcaaaacgagccaacttaatgatgcgtcaggaactgctgtgtcactggcgataagagaatctagtggagatgatgag

SEQ ID NO: 130503 - DNA, 453 bp, Arabidopsis thaliana
gattttgagacaatttgccgattcctcgatcatttcatctgctgaataacaacagtgattggctcttctgattagcaagcttcttcttttcgaaatcgcatcactttggctgatcggtggattctacgaaccatgttcaatttctggggatcaaaagaacagcaacaaggacaatctcgtccttctccagaagcttctgcaacaccgtggtattcgccgtctcttgtcacctctcctagctcatcccggcctcaaacctcagggcagattccatcacatgtttcacccaggtgaaggccgccggctttattcgccattttaaaaggccaaaaggtgtggttgggcttgggaacgcttctctctgacaaggatgcgtatcaacagtttctgcactcgcttgaccaggtcactattcaaaacaatatcagagaagagcttcgcaagaaacgttac

SEQ ID NO: 130504 - DNA, 694 bp, Arabidopsis thaliana
  unsure (1)..(694): unsure at all n locations
gcggcccggtctcggattcccgggtcgacccacgcgtccgtgattctttagtagatggaatgttgaaggatggactatgggatgtctataacgactgtgggatgggaagctgtgcagaattatgcgctgagaagtttcagattacaagggagcagcaagatgactatgcagttcagagttttgagcgtggtattgctgcccaggaagctggcgccttcacatgggaaatcgtcccggttgaagtttctggaggaagaggtaggccatcaaccattgttgacaaggacgaaggtcttgggaagtttgatgctgcaaaattgaggaaactccgtcctagtttcaaagagaatggagggactgttacagctggaaatgcgtctagcataagtgatggtgcagctgcccttgtcctagtgagcggagagaaggctcttcagctaggacttctagtattagcaaaaattaaagggtatggtgacgcagctcaggaaccagagtttttcactactgctcctgctcttgctattaccaaaagccattgcacatgcttggtttngaatctcctcaaaggtggattactttggaggtcaatgaggcatttgcagttgttagcacttccaaatcaaaaagctactcggggattnctcccagaggaangtgaccgtaaattggaggngctgactccttngggcca

SEQ ID NO: 130505 - DNA, 538 bp, Arabidopsis thaliana
  unsure (1)..(538): unsure at all n locations
aaaaccgggccgacccacgcgnccgaagaggaaggccnnaaaacnaccgaagaacattaacttttttaacagtgagagagatagaaagggcgagtcttaactagtaataggcctcccacactttggtgcgtatagtcactacgctactccctgcactcgcacgcaccagattggagctctttttctcgtcgtctctaccttcttcgtcactaggcttttcgatcagtggttctcggaatccaattccgttactccggtgattgatctccgtcgtacttcttcttcttacggaatcaaaactgataacggtattatacggtggccggagcgaggttatgggtctcacctctcgctgaagatctacgtttatgatgagaatgagatcgacggtcttaaagagctggtgtacggcagggatggtagtgttaagaccaccgcatgcttgaaaggtcaatggggatctcaggttaaaattcacaagttgcttttggagtccaaatttaagacgattaagaaagatgaagcggatttgttcttt

SEQ ID NO: 130506 - DNA, 741 bp, Arabidopsis thaliana
  unsure (1)..(741): unsure at all n locations
gctctatactgactcactctagggaaagctggcacgcctgcaggtaccggtccggaattcccgggtcgacccacgcgtccggagaaagagagagagagagacgaataaagacagagagagagagagagagtagagagagagagagagtgagagagatagctctctggctgatctgtttttttttccgatcagatcgaagagtttttatctcgtaattcgaactttttatttggtttctctgacttagagatctccaagcttcacgtaatttgctgtcgaagaagatctatcgattccacgaatttggtgacttctgccgattctcccgtttgaattctgtggaattcgctgagaaaagttgcggcggaggctgatttaggttaaatcgagcagaatttgaccaaattcgaggatttttatcggtaaaaagatacagagaaagcataattcagcaacttcagagctcaattccgcttcttcaaccatcgaaaaccacaatatctcttgaatcagctgctacaagtcgcagatctgagctgctagccaatttttgcgataattcccgcgcacagattagtaatagaataatttaaaaaganttcaaaaaccgtcgaagctctgtcgttcatggagcttcctnaaacctcgtncccttcaaaaccccaaganttttcgcaccaggggnggaaacccacanatgnttttttaattcgnttctngaagtcanttcaaccngntcca

SEQ ID NO: 130507 - DNA, 843 bp, Arabidopsis thaliana
gttagggggccttaagggggattcattttcgaagccacccaaattcaggttaaagccgggtgagcccaagttttctttctttgccaaaatgtttaaagccaatttcaattaaggtaatgttttccccaaaaagtccaaattgccgctttttggccagtgggtgtgccagcaggaaagcttgaatatgggtttaatcaaggatgggccgaagatccactaaaacccgttagaaagttctgtcagagactccaaatacaggccacccgtaaaaaagagtcctccaccagcatcgttgaacaagaaccgggtcactcgtagtagtgtatccgaaactgttgataaactcgcaaacatgaccattggagcaactggatctcgaagacactctgtgtctgtggttggacagcatcaacagctgaaaccacctccgatgaaggcaggttgggtagtagaaacacgtgacatgttccttagaccaacacaacccaccaccaatgcctactctaggaaagtcgccggatgacccctaaaccaatagtaactcaagcatgcctcttctgagcaaatattttactttataaactctctaataatcttatacatcatcagaaaaaacaagtctccttttttctttttttttcgacggcgcgtctttgcctcgtcaatggttctgcttttgttttcttttcttaatttctgtattgttaaggtttgtttttcacagtgtggcacaatttggtttgcaatgtaggtcgaatatccgagacatagggcagcccggggtatccactagttctagagcggccgccgccgcggtggagctcaagcttttgttgccttttt

SEQ ID NO: 130508 - DNA, 525 bp, Arabidopsis thaliana
  unsure (1)..(525): unsure at all n locations
gtcgattctttgcatgntgatgtctggtccttgtcttactggctatacacagacaatcaacgactggtatgatagagatatcgacgcaattaatgagccatatcgtccaattccatctggagcaatatcagagccagaggttattacacaagtctgggtgctattattgggaggtcttggtattgctggaatattagatgtgtgggcagggcataccactcccactgtcttctatcttgctttgggaggatcattgctatcttatatatactctgctccacctcttaagctaaaacaaaatggatgggttggaaattttgcacttggagcaagctatattagtttgccatggtgggctggccaagcattgtttggcactcttacgccagatgttgttgttctaacactcttgtacagcatagctgggttaggaatagccattgttaacgacttcaaaagtgttgaaggagatagagcattaagacttcagtctctcccagtagcttttggcaccgaaactgcaaa

SEQ ID NO: 130509 - DNA, 596 bp, Arabidopsis thaliana
  unsure (1)..(596): unsure at all n locations
cgcgtttaccggcgaatcggctctttactctctagccggagacgagatctacaattttaacgactctgcctaagatatagcaattattgggagctgcacgaagaagattttatttggtcgacggagctggaatcagctattctttcttcttctccctaatcgtttcttttagcagctctttctctctcacccgaaggttggtgttaagctggaaaggttggtcttttagaagatatggttcttgatgggattgtatcatcaccattacggaggccacatgctcttaagaagcaatgggatgacttgggtagctgctctactgttgtccagaggcatcgtttccttttgactgctatgcttcttttggcattcctctgcaccatttatatctactttgccgtcacactaggcgctaggcacttgttgtgctcagggatgactggaaaagacaaggcaatgtgtcaaatggaacacatccaagccagtttctccaacggaaaactgaaattcttccagggtgtcagcctaagctgattgcattatataaccattggctccccngttgaanngggggngaaacgccnnaanatggcttt

SEQ ID NO: 130510 - DNA, 487 bp, Arabidopsis thaliana
  unsure (1)..(487): unsure at all n locations
ctggctctggaagaaggttttaactctatttctatcattcgtcttctctgcagacgatttcnctctgcaagctcccaaagtcgaaaactttatcagcaatggcggttttgttgtcatctttctctccactaggaatcaacattgacatgaataagaatctgggtgtttcgtattcttctttccctcaaattcatctctttaagggttctactccactgcgtgttcgaacattcgtcgtctcgagtcgtaaaaattcaggaactggtttggcaagtgaggataagaaatttgttgctggaacgatatggttatgatgctaattgatggactttcgggtctcaatcctaggcgagacggaaagaagagaaaatgagtggaaggaatagtcaacaagtagaagaagttgttgttgtacagccaagaacaactcataggttactgcaggttcttgcaggaacggcgaaactaaagaaattgctttctctta

SEQ ID NO: 130511 - DNA, 445 bp, Arabidopsis thaliana
tttcgggtcaaaatttccgaaccctaactttagccccaaattagagagagatgcagaaacgggagcttgggaaatccggcggtaattccggtggatcttcgggtccaccagcgaagagaggccgtcccttcggtagtacaagtgctaactcagctgctgctgctgcagcggcggcagcagcggacgcgatgtcaccgtcagctttacttggtccttctcttctagttcacaattccttcgtcgagcagaacaatagaagaatagttcttgcgttgcagagtggtttgaagagtgaggtgacatgggcattgaacacacttacgttgctttccttcaaggaaaaagaagatattcgaagagatgtcatgcctcttgctaagatagctggcttgcttgatgcccttctcttaattatagatgattggcgtgacatagctctcccaaa

SEQ ID NO: 130512 - DNA, 533 bp, Arabidopsis thaliana
  unsure (1)..(533): unsure at all n locations
atcatattatttcttaaaatgtcaggagctctctttcttctctcttacatatctttcagagagacaacttcttatctttaatcgctgtccgaattatattgtcggtttttgtgcccagacgagatctgattttcctatcaacacggcttttccgttgccgtgttcttgccgttaacacgaagtagttgttggattttccatagagaggtggaggacgtcaaacaagagacctacagatcttcaaaggagaagagaaaccaccagatctgcaaacaacaagacacatcggaaggaaacgaagaggacaaacggaagactttatacgtgaggcgaaaccagtttggattctgcgggagaggagcggagaacaaagagaaggcaaaattcgacgccggggagacatagcttcaccggcgccagaagacggtgaatcttttggagtctcgtgtatttcgatggcagagtttttaaccctttttttagnncttgataaacatttaacgtaatcttnatntaggncaaagntcctttga

SEQ ID NO: 130513 - DNA, 482 bp, Arabidopsis thaliana
caaaaaaatggcatggcttgctagatccattgcgaatgctctgaagatcgatgaggaagaatatgatcaaaaggaaacgattaagaccaattcgattgaaaattccggctcagatcaaccgtcttcgccatcggtgttgcaaacacagtctccacgaggcgtgaaggaagacatctctgaactcaccaagaccttaagaagtcagctatggggcgttgcttctttcctcgcgccacctccttccttcttccgatacggcggatcatgtggatgaggagactcggaagtcatcggatctcgcggaaggtgatgaggatctgattgctggaatcaggaacgatttcgttgagatcggaggtagatttaagactgggatctcgaaactctctggaaacttaccggtattgaagtttacaaatatggcttcgaatttcttgcaattgggatcggaaggtgtggattcgaagaaccctgatgttgcg

SEQ ID NO: 130514 - DNA, 489 bp, Arabidopsis thaliana
cgtccgttctcttccttccttggaatccaccacactccatttgcttcttctgagatctgatctctctcctagccgatgcgctgcggagatggcgaatcttgtccccggcgttttactcaagcttctccagcacatgaacaccgacgtcaaaatcgccggcgaacacaggtcctctcttttacaagtcatcagtattgttcccgctttagccggaggtgagctattcccgaatcaaggcttttatctcaaagtctctgattcctctcacgccacttatgtctctttacctgatgaacacgatgatttgattcttagcgacaagatccaattaggtcagtatattcatgttgatagagtcgaatcttcttcccctgttcctattcttcgtggtgttagacctgttcctggtagacatccttgtgttggtgatcctgaagatattgtagctactcattcactagggtttctcagtgatgacaaggttaaaaa

SEQ ID NO: 130515 - DNA, 469 bp, Arabidopsis thaliana
ggatcattcaagaaacacacatattcaaacttcttcaaagaaaagaaatatagcaaaaactagaatgaagaagacagtggaggatccaagcaagatcatgagaaggtcaattcacactttcctccaaaactaccaccgtgtcaccaccgcagccgccgtggccctccctttctccgccggtctcctcctctctcagcctttcttctcttcttcctcttccacccttcacatgaggcttaacatgctcttccgcggagcgggtttctcttcttctcatgacttcttcaacatcttaagccttaaactctcacaaaccctatcttcctctttattcactcttcctttctccctcacattcctccttttatccaaagcttacgtcatcaaacttctatcaaacaatcactctgcaaattcctcctctgttttctacctccggcttctcaaaacttacgtttgcaacttcttc

SEQ ID NO: 130516 - DNA, 475 bp, Arabidopsis thaliana
cattcatccatcttttaatcattactcgagattctgtttccatggccatatcctcaaatcttctcctttgtctctctcttttcattttcatcatcaccaaatccgccttggctcagaaatgttccaactacaaattctccaccaaccgtctctttgagtcttgcaacgacctacctgttcttgattccttcctccactacacttacgattcttcttcaggcaatctccaaatcgcgtatcgccacacaaagctcacccccgggaaatgggtggcatgggccgtgaatcccacatctactggcatggtcggagctcaagccattgtggcttatccacaatcagacggcaccgttagggcttatacgtcacccatcagtagctaccaaacgagtctcctagaagctgagctgagtttcaacgtctctcagttgtctgccacttaccaaaacaacgagatggtcatctacgcaattct

SEQ ID NO: 130517 - DNA, 536 bp, Arabidopsis thaliana
  unsure (1)..(536): unsure at all n locations
atcaactatgctactgactgctgatcacgatgacagagttgtgccacttcactctttgaagttgcttgctacgttgcagcacgtgctgtgcacaagcttagacaatagtcctcagatgaaccccataattggtcgtattgaagtcaaggctggccatggtgctggtcgcccaacccaaaagatgattgatgaagcggctgatcggtattcgttcatggcaaagatggtgaatgcttcatggacggagtaaaaaaaattcctttatctacaggcaccaaatatcttttctcaatatcttctgtccaaacaaggacgttgtatgagttagtgacaattacatgtaaacacatgtttcagttttttctcaggctttatgttccagttcattgacacccaaaaaggattttcttcaatgcattttgcttcatccggcaaaaaaaaaaaaaaaaaaaagggcggccgctctagaggatccaagcttacgtacgcgtgcaggcgacgtcaagatcttctagagtgcacctannnnacaatcg

SEQ ID NO: 130518 - DNA, 444 bp, Arabidopsis thaliana
gagaaaagagagttcgcgtgctgtttgagtatcatatctaatcccagattctttcttccttctctgtatatttccacgacggttgacctaattttcgtcaccatccaattggatttgagaagagagaaaagtattctcatcatctgaagaagaagaaagatagattgatagatagagagagaaatgggtaattcatttgggtgttctgcctccggcgagagattagtgtcggcggcgagagatggggatttcgtggaagccaagatgcttctcgattgcaatccatgtctcgccaagtattcaactttcggtggtcttaattctcctttgcatttcgctgcagctaaaggccataacgagatcgtcggattgttgctcgagaacggagctgatgtgaattccagaaattattgcggccagacagcattgatgcaagcttgtaga

SEQ ID NO: 130519 - DNA, 633 bp, Arabidopsis thaliana
  unsure (1)..(633): unsure at all n locations
cttattataaaaaaaaaaaacaggattcactgctagctacagaagctttgatcacatggaagatcgaaaagagaacaagaactcgccatggctatcagtaccacagtttggagattgggatcaaaaaggaggatcaattgattactcaatggatttctcaaagatcagagagatgaggaaactcaacaagagagatgcttctcgagccagtcttggcaacgaggaagaactcattaacccttttcatgatcagcctcctgttgatactgccaagcctaagaagctaactacggttcacagtgacaacaacaaccgcaatgagttctctcaccatcacccacactctccttctaggaggagaagaatcttcagctgcttcaactgttgcgttaaagcttaaaggtgtttacttttatttatgataataacaacaaggggtgatatttgaagacagaaatgagaaatggtagtgccaccttgttttccacatgtgtttcttcggctgcatcacaattaaaatttgtctgttggtgtttactgtgtatctaactatgtttgctaaatgtcaagtgtagtaatatatattttttgtaatttttgtttggtgtatntagacacttgatattttcatta

SEQ ID NO: 130520 - DNA, 493 bp, Arabidopsis thaliana
gtaaaatagtacaccaagccatttataaatttcttcactctcagattcaaaataatataaattagaaatgggaacagagatggtcatggttcacgaggttccttttcctccacagatcatcacttccaagccactctctcttctgggccaagggatcacagacattgagatccactttcttcaagtgaagttcactgcgatcggagtttacttagatccttcagatgttaaaacacatcttgataactggaaaggcaaaaccggaaaagaactcgccggcgatgatgacttcttcgacgcccttgcctccgcggagatggagaaggttataagagtggtggtgataaaggagataaaaggagctcagtacggagtgcagctagagaatacggtgagagatcggttggctgaggaggataagtacgaggaagaagaagaaactgagctcgagaaggtcgttggctttttccagtccaagtactttaaagctaac

SEQ ID NO: 130521 - DNA, 564 bp, Arabidopsis thaliana
aattcattgacgaggatattaaaccgggtccggtttaggagacgatacgtactccccacgttgcatgttaacctctccaccaactccatcaatgtacgaggcgagacatgaatccgaattagttatcttcggagctcttaactcactattcaagaaaaccggaatcgaaccgagagaagtcggaatcttcattgtaaactgcagcttgtttaaccctaacccatctctctcgtccatgatcgtaaaccggtacaagcttaaaaccgacgtcaaaacttacaatctctccggtatgggatgcagcgccggcgcaatctccgtcgacctcgccacaaatctactaaaggcaaaccctaatacctacgcagttattgttagtacggagaacatgaccctaagcatgtatcgaggcaacgaccggtcaatgttagtccctaactgtctattccgagtaggtggcgctgcggttatgctcttaaaccggagtcaagaccgagtccggtctaagtacgaattgactcatattgtaaggactcacaaaagctctagcgataaacactacac

SEQ ID NO: 130522 - DNA, 596 bp, Arabidopsis thaliana
  unsure (1)..(596): unsure at all n locations
aacaaaaccaagaatcatacaaaacaagcatcctccaatatgatgaaacaatcaccattctcacttttaacatcaatctttctcatagctgctctttttactgcaactaccgcactcgatcctgcacccgaagacccgattttcgaattgtacatgcacgatatacttgggggaagcagtcccacagcaagacccattacgggtttgcttggaaacatctacaacggtcaagtaccgtttgctaagcagatcggttttgttccaccgcaaaacggtgtagccatacccaacgcaaatggggcaatgccaacggttaacggtatcaacgggtattccattaggtactggtttgtcttggaacaagcgttttctggtcagaatctaaatggggttcaggctcagttggggtcctgatggtctgaggcttngggtttgaacaatcacggtgatttncggcataananatcgggcctncttggggnacaaccctttggtaagnccaaggggtttttgtnccanctannagatggagccggagtnntgggtttnantttnttaaggngggggcaatgnantaatttttgggcttggtgggg

SEQ ID NO: 130523 - DNA, 808 bp, Arabidopsis thaliana
  unsure (1)..(808): unsure at all n locations
nnnnnnnnnnnnnnnnnnnnnnnnnnnnnnnnnnnnnnnnnnnnnnnnnnnnnnnnnnnnnnnnnnccacgcgtccgtacggaagacgacagaagggggcgccgggagagatcctttgatctttttccgatggaggagcaattcggcgggagcgatgagagatggaaaggatcgttggagaatataacggagatggcatcgaatctcgattcgcctcagaaacttctcctcaaaaaagcagtcttcgttgaagaagacactttctctagagcttctctcgtctccgagcaagcccgaacaatcaaggttcttgagcaaagagtacaaacactagaaagagaactagatgctgccattacagctgctgctcatgctcggtctgagaaacgccaagctgagtcctctcaaaaggctgctgaatcacgtgcccaagatgtcacaaaagagcttgaaaacaccacaaaggttttcaagctgcatatggaagagcttcgaggaatgcaagaacagatatccaaacgcgataacgagatcaaactcttagaagctataatccaaacgctcggcggcaaagagcggttgggaaaaagcgacgtgaatggatgatgatgatgcgttttttcacttgtaaaggtttgtactcctgagtttgtggagatgtatcacttcgaagataaatgtatttttgtctgtctatttgggacgnnnnnnnnnnnnnnnnnnnnnnnnnnnnnnnnnnnnnnnnnnnnnnnnnnnnnnnnnnnnnnnnnnnnnnnnnnnnnnnnnnnnnnnnnnnnnnnnnnnnnnn

SEQ ID NO: 130524 - DNA, 412 bp, Arabidopsis thaliana
gaagaattggaaggcgaaaatgaagaaaatgtaccaatggagcctggaattcgttcaagaaaagcaaaacgtgtagtggtttttactgataaagagccacatggcgagatttatactaatctcaaagataatcaaaattctgatcaaaacgatgaaatggctttgatccgttattcgcaacaatctgattttcgtcgagagataattaaaggatccatgcgttcccaaaggcgtaaaactgttatttgggaattttttcaagcaaaagtacattccccccttttttttgatagaatagataaacttttttttttttcgtttgatatatgggggctaaaaaaaaaaattattaaaaatttcatttggaaaaaaaaaattgataaaaaagaagaagaacaatcaaaaagagaag

SEQ ID NO: 130525 - DNA, 524 bp, Arabidopsis thaliana
gctgggacgcctgcaggtaccggtccggatttcccgggtcgacccacgcgtccgtacggctgcgagaagacgacagaaggggatctaactcctatgaatgcttatggttattggcttggacttggtgtttttcattctggtgttgaagttcatggagttgaatatgcatttggagcacatgaatcatcaagtacaggtatttttgaagtggaaccaaagaagtgtcctggtttcacgtttaggaaatcgattcttgtggggaaaaccgacttggttgcgaaagaagttcgtgtttttatggagaaattagctgaagagtatcaaggaaacaagtaccatctcatcacaaggaactgcaaccatttttgcaatgaagtttgtcttaaacttgctcagaaatcaatccctagatgggtgaatcgacttgctcgctttaggggttctctgcaactgtgtgttaccacctcgtttgaacgaggcaaaagtgagacgagtaggaaaaggagagccttccggaagggaga

SEQ ID NO: 130526 - DNA, 424 bp, Arabidopsis thaliana
cggacgcgtgggcgttgactccgattttgtatatgataaggagattttgacgagcatagctgttacagttgcaacaacgatcttcatcgttttgtgtttcactatctatcttatgatcagaatctttaccgggaaatcaagaaacgacaagagatatgctccagtgcatgccacggtctttgatcttctcttccacagcgacgagttatacgattacgagacagagatcgcgagagagaagccgacttacaggtttttgagtccaggacagagcgagatattaactgcagatcctcgtaacgtggagcatattctcaagacaagattcgataactatagtaaaggacccagtagtagagagaatatggcggatcttctaggacatgggatctttgctgttgatggagagaaatggagacaacag

SEQ ID NO: 130527 - DNA, 1203 bp, Arabidopsis thaliana
  unsure (1)..(1203): unsure at all n locations
nnnnnnnnnnnnnnnnnnnnnnnnnnnnnnnnnnnnnnnnnnnnnnnnnnnnnnnnnnnnnnnnnnnttggtttttttttttttttttttacaaggacatacacataaaatcagaatgatcattagatacaatagtgttacacataactcatacggacatataaaataaaataacacttgtagaacatatcccattcataagaaacgtaattagcctcttaaacaaaaaacgtaagaagctaatcttcatttttttttttctcattccacacaaattttcccattaaacacacaaaaacgagttacaattacttaacacggcaacgaggttgctttctccttctgttcgtctcactgtacagttaaaaatggctctatggactgtgcaagttctttagctgctcaaccacatcaagagtattgcttagctgatgataatcggagcgatgaagagcgtttatttgtcccgaggttttggttccatcattgaaatggttctttgcaggtccaccacgagggcagtgacgcacacggattctatgctttcttgtctcagtcgagaaccttccgtggaccacgaggaccaatatgacttccttgtctcttgtgtcttcacaccaagagttctgagcaacaccgtccacaaactcttctactgttgggaagtcttccagatgcactgaaacctcggctatttggtttggtttgattgtgccagttcctggagacacctccagccactggggaaacccgaaagagcctcttgctcggtggtcgtgtgcctgaccgtcctccccgaattttagaattgaccttcaacaaattattttgaagaaaccgatggtcttctcactcttatttgtgatacgcaggatagttgaatcctgattttggagaataatattattggtgctgacaattgtttctggaaccttgcttaactctccaagcaagaccttgattttcttattcgagtttatgatgttcccatattcttgtctcctgactgactcatcaacccgggcaatcttgacactaaatacacagcgtacgggcttgtggtcactgtctgtcacttccatgcaggcatcatactgtgatatagaagacaccactggacaatccaaactgcactcagctcccaaatgtttcttattatcgcgatatagaatcctgtcacaccaggcaggaatccgcttcttt

SEQ ID NO: 130528 - DNA, 437 bp, Arabidopsis thaliana
ttgcaattcaattcctgatctgatccgttcctgcttagatcggagcaaaacaatggcggagatggcggataaggcgaaagtggaggagatggattgggaaggtattgatggagttcgtatgacttggaacctttggcctcgcactaaggttgaagcaagcaagtgtgtgattcctctcgccgcttcaatttcaccgatccgtcgtcacccccttatccttgatctcccttatgctcctctcgattgcaagacttgtaaagctcttctcaacgccttcgctcgtgttgatttcgccgctatgaactgggtctgtcctttttgctatcataggaatcatttcccttctcattaccattcgatctctgagattaatctccctggtgagctttatccccagtacactactgttgagtacacgttgcctcctgatccgtctc

SEQ ID NO: 130529 - DNA, 653 bp, Arabidopsis thaliana
ctctttcaatcgtgcaagcaagattgtttggattagctcacttttctgtaggttatatattcacttatgcggctttcttgattgcctccacatcgggcaaattcggttaattatttatgtattctacccgcaatcatatattttttttaataaaaaaaatataggtatgcactcttatatttatttctacatctaggatccgatttgtatcattatcattgataataacaggaactgaagcattatggcaaagaaaagtttgatttatagggagaagaagaggcaaaaattggaaaaaaaatatcatttgattcgtcgatcctcaaaaaaggaaataagtaagattccgtcgctaagtgagaaatggaaaattcatggaaaattacaatccccaccgcgtaatagtgcacctacacgtcttcatcgacgttgcttttcgaccggaagaccgagagctaactatcgagactttggactatctggacacatccttcgggaaatggttcaggcatgtttgttgccaggggcaacaagatcaagctggtaaggatttaagtatcccttaatttttctatttttttctatgatcgatgaggcccctttaccattctgtctaaataggctattctatttgtacagatatggaagagggg

SEQ ID NO: 130530 - DNA, 586 bp, Arabidopsis thaliana
  unsure (1)..(586): unsure at all n locations
cgccccccctcgaggtcgacggtatcgctaagcttgatatcctcctcgccttacttttaagcttactctttctcttcactactctcgcgtcaagttccaagaccccccgattcaagtattcgttagagaagcctcaccacccacttgacccactaacgacacctgaaataaagagagtccaaaccatcctctcgggtcatgatccgggtttcgggtccgggtcaaccatcattcacgccatggctctcgacgagccggataagcaacgtgtcatccggtggaagaaaggtgatcgtctcccgccgcgaagagcggagattcttgctatgtctaacggcgagagtcacgtgctcacggtggatcttaaatccggtcgggttgtttctgatttggtcaacccgacttttggatacccgattcttactatgaaggatatcatcgcagtctcacaggttccttacaagagcgtggagttcaatcggtcaatcgaagcgcgtgggattccgttttcggtttaatttattaaaccgttgccggttggantgccnnccgggnaggncgcgggtataaancccattttttaagc

SEQ ID NO: 130531 - DNA, 498 bp, Arabidopsis thaliana
gcggtcttcttctttttccgtaagaatctctctctccttcattttcttggctgtgctaatctcaccggctgtgtcacaaacatgtaagtcacagactttttccggcgataaaacttaccctcactgccttgacctccctcaactcaaagccttccttcactattcctatgatgcctccaacacaactctcgccgtcgtcttctctgctccaccggctaagcctggcggatggatcgcgtgggcgattaatccaaaagctaccggtatggtcggatctcaaacccttgtcgcttacaaggatccaggtaatggtgttgccgtggtgaagacgctaaacattagctcctatagctcgctgattccgtcgaagctggcgtttgatgtttgggatatgaaagccgaggaggcagcaagagacggaggaactttgagaatctttgctagggttaaggtcccggctgatttggtggcaaagggaaaggttaatcaggtttggca

SEQ ID NO: 130532 - DNA, 784 bp, Arabidopsis thaliana
atttttattcagggttttgctacttcaggtcttttaaacaaaatgcctcagtctgcaatattagtaccagctctccaggcccagtggttaatgatgcacgtaagtatgatgatattaggctatggcgctctgttatgcggatcattattatcaatagctcttctagtgattacatttcgcaaagtcggacctactttttggaaaaagaatataaaaaaaaattttttattaaatgaattattttcttttgatgtactttactacataaatgaaagaaattctattttactacaacaaaacattaattttagtttttctagaaattattataggtatcaactgattcaacaattagatttttggagttttcgtattattagtcttgcgatttatcgtttggtaaccgtcggcacttctttcaggagcctgtctgggctaatgagacatggggttcatattggaactgggacccaaaagaaacttgggcatttattacttggactatattcgcaatttatttacatattaaaacaaataggaatgttaggggtataaattctgcaattgtggctttgatcggttttattttaatttggatatgctattttggcgtcaatcttttaggaataggtttacatagttatggttcatttacatcgaattaaagtaacaaataagaaggaatcgaaatctaaataaaaaaataaaaaaatagcatctatatctaacttcatataagttaagaaatctcatttagttttagtagtaaatcataaagaacctt

SEQ ID NO: 130533 - DNA, 430 bp, Arabidopsis thaliana
gtaaaatctttcttattcgtaacaaagttattgtaaacttatagaatggttgtgaaactatatggacaggtaacagcagcttgtccacaaagagtcttgctttgttttctcgagaaaggaattgaatttgagattattcatatcgatcttgatacatttgagcaaaaaaaaccagaacatcttcttcgtcagccatttggtcaagttccagccatagaagatggagatttcaagctttttgaatcacgagccatcgcgagatactacgctaccaagttcgcggaccaaggcacgaacctttttgggcaagtcttctagagcaccgggcccccgtggaccagtgggctgacgtggagacctattacttcaacgttctggcccaacccctcgtgattaacctaatcatcaagcctaggttaggcgagaaatg

SEQ ID NO: 130534 - DNA, 423 bp, Arabidopsis thaliana
gcggacggtacttttgtcggccggcgcaaaaacctgatctcttcttcacgagtaaaaacctgcgctgcatcagtttatataagcagccacccttttgctctgtttctaacaaaccagaagaagaaaaaagtttcaatttttcttgaagatgacggagtatgagaatgggaagaagaggaaagtacgaaacaaacaacaagtaaaagtacagttcttgtctcaaaggtatctaatcttatgcttttgttgtttcttcgtcttgctcttcttcttatcttccgaccgaatctccacactctctgtgcggtccgattctctgagaccgtctcttcgtgttcctactctctccgttttatcatcatccatggattcgtttcaccgtggtagattccctcccttgagtgttgaagacagagttcaatt

SEQ ID NO: 130535 - DNA, 333 bp, Arabidopsis thaliana
ctttctctctcattctctttttagcttttccctggatatagtacacgttcgaagaagaccgttcgtgtgcaaaaacatgaggtgtagagcacttaacattcgtagaagaaagagagtaatggttaatgtgagctcaaggaagctcatgacccgtctacggcgaatggttgctccggagacgagtttttccggcgaggttgacggtgctacactttatcgactcacggctgatcacattttcttacttcaagcaagaatccaacttcttcgtcgtatttcttctgtttgtggtctctagatcgaagatacacgtggctaaaaaaagacgaagaa

SEQ ID NO: 130536 - DNA, 597 bp, Arabidopsis thaliana
aaacccacacaacattcaattgaaattgcgactttcgatttaaaactctctttaactacaatcgctatccacgaacaatctgattgattctctctctgagatctctctatctatctatctttctctcttctcttaccttttcaatacgatttcggattctgagctgcgatgcttctttgattcacttgagagtgttttggagttttgactacgacttgtgatggcatctagacaaggatcaaaatcgagaaaagcagggttaaagggtgctgattctactgcatcttcgacaacctcgtcttcgaagctttatcaagagacttctatagatggccatagctcccctgcttcttcatctgctcaaagcaagcagcagttcttctcaccagatcccttaccacaaactgctcagcggtctaaagaaaacgtcacagtgacagttcgctttcgcccactcagtccaagggaaattcgccaaggggaggaggttgcatggtatgcaaatggagaaactatcgtgcgaaatgagcataatccgacaatagcttatgcctatgaccgtgtctttggacctacaaccacaacacgcaatgtcta

SEQ ID NO: 130537 - DNA, 449 bp, Arabidopsis thaliana
gagagcagctctagaagcttctgataaaaatgtccttgatggtaatgtagaggcttcttctcggttacggatacttgctgaactccagtctgaattaaagattgctaaatctgagatagacgagctaaaggcgaggttgatggacaaagaaacagaattacagtttatttcagaggaaagagataactttagcatgaaactgatgaagaaccagaaagaaatagatgttgaagctgagctgaagaaactaagggaggcgatcgagaatttaaaggcggatttgatggataaagaaacagaactccagatcgtttcagatgagaacgagacattgaagtcagatatccacaagagcgagacagatgtacaagacgcgttcctgaagctagggattgcaatggaagaggctgacaagagtagcaagaaaagcgttagagtcaccgagcaac

SEQ ID NO: 130538 - DNA, 991 bp, Arabidopsis thaliana
caccattgtatttattaatgagaagttgaataagaaaataggagcgtctcatctctttttgaagggctgttttaaaaaacaaatactagtgtgttttctctttataaaacaaacctcactcttttgtttctttcattcatcatctccacacaaaaaaaataaaaaaaaatgaacaacttaattagctctctcgaactcacatctcttacacttgaagacccatggcctgctttctagcctaaatttcctcgagaaaacaagcaaaaaaacacaagaaagctagaatcttattttcttcttggtctttcttggtttcttcaactttttcttaaaaacgttttcaaaaaatcatgggcaccggagaaaaaaccctgaagagcttccagttacatcgcaaacaatcagtcaaagtcaaagatgttccaaaagggtgtttagcgatcaaagtgggatcgcaaggagaagagcaacagagatttatcgttcctgttttgtattttaaccatccattgttcatgcagctcctgaaagaagcaggagacgagtatgggttcgatcaaaagggcaccatcacaattccttgtcacgtggaggagtttcgttacgttcaagctttgatagatggagagagatcagtttacaatggtaacaaccatcatcatagacatggtggccgtgaccagtatcatcatcttgttggatgcttcagagcttgatgaataatgatgaaatgaaatgatgggtggtgattgtatgtgttcaaattttaatgttttttctggtttaatcttgtggagttgtggagccaaaactggcctaacccacaaaagaagtgaatcttctaaattctatcgatttgtagtatctttttctgtaattttaatggaattttaagatttaagagtgttgttgtttctaaaaaaaaaaaaaaaaaaaagggcggccgctctagaggatccaagcttacgtacgcgtgcatgcgacgtcatag

SEQ ID NO: 130539 - DNA, 392 bp, Arabidopsis thaliana
tgctttggctgcaatggaggaaattctaaaatagtttgatgaggaagggaagaacaaccaacgagcagtgtacagtcgtatcgctctacgaagaatgggaaaagagatcaaaagccacgagtagacatatggtgctaaacgatcttcagagcaagaaagactcaaagctactaaggaggaatctaatgtctcagtagtagtagatgatacaactacacaatcaaagctctctgatgatgatgatcatgcagtgaatgactcttcagagaaaactgagaaggaagagactataaatggcttggcttgtgatgatgaagatgaggaggagaaggaagaaagccaaaaattagatgctataactcacgagaagacagattctgtatcttcttctg

SEQ ID NO: 130540 - DNA, 489 bp, Arabidopsis thaliana
cccagcaatggtttccaaggaagatggtatgggatcgatagccccacagattcctttctgcggctgtgaagttggatagaaaaccccgccgaaatgtgttgtggtttgaggactgacccctagggggtataacccgcggctcacaactgtcacaattgatgccagttggaatttaaatcggctgctcatcgggccgtatgatctgggttcaggctgatcttgcaggttggaaactttttacgagctatctgtgataaacctcaggagattatttgccaacaaaggctctacatttatggatcacgagaaacagatcatagaaaaatcgccgcccaaaagaaagcttaccattgataccatattctaagcacattggatcgcagcatatagtagttaggttaggttcatgatctcttaaagctcttgtctttatgggtatacatatgtttgatactagacgcaaaccggatctatcgagtgaaatatgaa

SEQ ID NO: 130541 - DNA, 571 bp, Arabidopsis thaliana
  unsure (1)..(571): unsure at all n locations
cnnnnnnnnnnnnnnnnnnnnnnnnnnnnnnnnnnnnnnnnnnnnnnnnnnnnnnnnnnnnnnnnnnnnnnnccacgcgtccgcccacgcgtccgtacggtgcgagaagacgacagaagggggaaccaaaagagagagattgtgaaagaagaaaacagagacagtttcttcgctgaaaagaaaaaccaaatcagctaaatccctaaaagtttccgtcaatgtcttctcgccggagagttcttctcaaggttatcattctcggtgatagcggtgttgggaagacttcgttgatgaatcagtttgtgaatcgaaagtttagtaatcagtataaagctacgattggagcagattttttgactaaagaggttcaaatagatgacagaatcttcactttacagatttgggatactgctggacaagaaagatttcaaagtttgggagttgcgttttaccgaggagcggattgttgtgttcttgtctatgatgtcaatgttatgaaatccttttgataatcttaataactggagggaagagttcttgattcaggctagtccttcagatcctgaaaact

SEQ ID NO: 130542 - DNA, 888 bp, Arabidopsis thaliana
  unsure (1)..(888): unsure at all n locations
agcttggaatttcggttcaagctaaaaccataattggcttttcggcggcaagggcttctgaaggttataattctcgaaacaggggggtggggaagacgtccttgatgaatcagtttgtgattcgaaattccagtaatcagaataaagctaccattggagctgatttcttgaccaaagaggtccattttgatgacagaatcttcactttgcagatttgggatactgcagggcaagagaggttccaaagtttgggtgttgctttctaccgaggagcggactgttgtgttcttgtgaatgatgtcaatgttatgaaatcctttgaaaatcttaacaactggagggaagagttcctgatccaggctagtccttcagatcctgaaaacttccccttcgttgtcttggggaacaagacagatgttgacggtggaaagagtcgagtggttactgagaagaaagcaaaatcttggtgtgcatccaagggaaacattccttacttcgagacttcggccaaagatggagtcaatgttgatgcagctttcgaatgcattgccaaaaatgctctcaagaatgaacctgaagaagaagtgtaccttccggacaccattgatgtagctggggctcggcaacaaagatcaactgggtgcgaatgctaaccaactttgttgcatggtttattagaaaaaacatgtgttttaaggagagacctttttagtttctttggcattattgtgatgtgtatcaattagcatacgcacctttgttttggattacagaatcaaaaacgaattttggtcaaaaaaaaaaaaaaaaaaggnnnnnnnnnnnnnnnnnnnnnnnnnnnnnnnnnnnnnnnnnnnnnnnnnnnnnnnnnnnnnnnnnnnnnnnnnn

SEQ ID NO: 130543 - DNA, 476 bp, Arabidopsis thaliana
  unsure (1)..(476): unsure at all n locations
cgtncgaattaacaaagaacgagttaatcggattatttacatcgattgccgtcctcatatacgttacatggctctgctacaccaaacgatgtcgtacgagactacctccgggaccaaatccatggccggtgattggaaacattttccagctcgctggtttaccgccacacgactcattgactaaactttcacggcgtcacgggccaatcatgactttacggatcgggtcgatgctgacggttgtgatctcttcgagtgaagtggctcgggagatcttcaagaagcatgacgcagctttggctggccggaagatttacgaggcgatgaaaggagggaagagtagtgacggctcgctcatcacggctcagtatggtgcgtattggcggatgctgcggaggctttgcaccactcagttctttgtcacgcgccgtcttgatgctatgagtgatgtacgctctaggtgtgttgatcagatg

SEQ ID NO: 130544 - DNA, 593 bp, Arabidopsis thaliana
  unsure (1)..(593): unsure at all n locations
cgatgatgtaagcttacgggaagctccacaagattcttcttcttcttcaggtatctgaagtcactaggcacgtcaatcacaaatggcttttacttttcctctctgacaatctttctacacttcatctctctatatatatatatcgaatcttgaaactgatttgaaagaagaagaagaagaaacctaacgaagaacattcgaaaaaacctaaactgttttttactttgagcttgaatctgtaaaaatggaaggcattgaatctgggtctaaacaaggaaagagagtggttgtgatcggcggcggaatcgccggctcactcgccgcgaaattgcttcagttcgatgctgaagtcacactcatcgatccgaagagtattttgagattacatgggcaagtttgagatccatggtggagcctaagtttgctgagagaacagtgattaaccacaagagttacttgaaacaaggccgtcttgtaacttcttccggcgntcaataatcacagagagtgatgttatgactgaagatgggtcctttgattggntatgnattatnttntgattnctacagggnancaataaattgtttcctcaa

SEQ ID NO: 130545 - DNA, 434 bp, Arabidopsis thaliana
ctcaggaagaatctagttgcggttatcttcagcccaaagagtaaagacccatccatccgttgctgaagctgctgctttgatcgaaaatgacgtcgtcctctccaacacagcgtactcacgtctcaattcctcctgaaccaggaggaaagtcactaacacaagaagctaatgagccaccagttccgatatcagtttcctcgccgtgcgggaaacgaaccagagatcccgaagacgaggtctatctcgataaccttcgctctcagaaacgttatcttagcgagataatggcttgtagtttaaacggactaacagtaggagactcacttcctgtcaacatgttagagtctccagcacggtctgagagctttctttatcacagggatgatttatcattacaatactctcccatgtcagaagactcggacgaagcgaga

SEQ ID NO: 130546 - DNA, 533 bp, Arabidopsis thaliana
  unsure (1)..(533): unsure at all n locations
tctctctgcggagacgcgtcttgaaaacncgacggcctgtgctgggtttagaacagctgaatgggcagaagatancgaagaagagggattcgtcgatggagggttagaccagggagatttagttgttgtgtatttaaagctgtgtgagaagcatccgggtccatggaggatgattcgatctcacgttcataagatgttgggagaatggtttagaattcatccgcaagttagagagcatcttaatgctcaaagcatattgacgtctgagtgtctatacggacttgtggatcagcttagagagcttggacgtagagttccactcttcaaganaaagaagatagatactctgactccacaagactctctacaaagggtttagagagttgaaactatacgttcttgattcagtgggttttatcatgtatgttgtaacaccaagatcatcatgtatccacaatagctatacgtggtattttaaacggcggccgcgaattcgatatctagcttagttataccgtcgtatcagagggggg

SEQ ID NO: 130547 - DNA, 479 bp, Arabidopsis thaliana
cagatgaaacaattccatatcagtctacctataatgctagtccaacgcgacaccatgatgtgggagttcaagcctgagagattcaaagacggcctctcaaaggcaacaaagagccacgtctccttctttccatttgcatggggaccgaagatatgcatcggccagaattttgccatgttggaggcaaagatggcaatggcgttgattctacagagattctccttcgagctttctccttcctatgttcatgcgcctcaaatagttcgtcaccattcacccacagttcggtgcacatcttatcctgcgcaagctgtaattctagaatcccatgtgctcctgtcagattaacagaggaaaattaacccggtcataggattaacccccaatctttttattaattgaaatcagaaccttggggtccaaaaaaaaaaaaaaaaaaagggcggccgctttaaaggattccagcctaaggaaggggg

SEQ ID NO: 130548 - DNA, 840 bp, Arabidopsis thaliana
  unsure (1)..(840): unsure at all n locations
gaacattcttgtacgagacttagctagtgtgttcaaagtgggattctcgctcttgctctgtgggagagaccaactggccctgatgcatttcgactgcttggagaactaaattatgaacttaacaactatgtaggcagcatcgctgcatacaaaatttctgtaaagggtgctaaagggattgatcttgaagttacacgaggcctcatgggtgcgtatttagctgcgaagaaaccagacgaggccgtcaaatttcttctagccactcgtgaacgtctgaattcaaagaaaacaagcccaactgccagtgttacagatgaaacaaatctagacccaattcaggttgagttacttctcggaaaagcgtattcagactggggacatatcagcgacgcgatagctgtttatgaccagttaatcagtgctcatcctgaagacttccgaggctacttggctaagggaattatattgagagaaaatggaagcagaggagatgcagagagaatgttcatccaggcgcgcttttttgcaccaaacaaagctaaggcccttgtggatagatactccaaactatgatcactatctgattctgtgtatataaatatacatgcacatgggcctgtgagttactaatatgagtcagattcatctgtgagacaactgtacaatacaaatattcccaatatgaagccccagaaccaagaagttcaggaactgttatttaataaaaaaaaaaaaaaaaaaaaaaaaaaaaaaaaaaaaaaaagggcggccgctctagaggatccaagcttacgtacgcgtgcatgcgacgtcatagtactctantagtgcgtcctaaat

SEQ ID NO: 130549 - DNA, 524 bp, Arabidopsis thaliana
ccgctctcttcgcacctactcttggggcggtcccgcctgggagaaacgcgtccgatcctccgctcgtgtccgcacccgcaacggcgtctccgttctcgtcaccggggccgccggtttcgtcgggactcacgtctctgccgctcttaaacgacgcggcgacggcgttctaggcctcgacaacttcaacgattactacgacacctctctcaagagatctcgacaagccctcctcgagagaagcggagtgttcatcgttgaaggagacatcaacgatctgtctctcctcaagaagctcttcgaggtcgtccctttcactcacgtcatgcatcttgccgctcaagctggtgtcagatacgccatggagaaccccggcttctacgttcacagcaacatcgctggtttcgttaacctcctcgaggtctgtaaatccgctaatcctcagccggcgttcgtgtgggcatcgtctagctccgtctacggtttaaacaccaaagtccccttctctgagaaagacagaacagatc

SEQ ID NO: 130550 - DNA, 417 bp, Arabidopsis thaliana
agaaaaagagagagagagagagagaggtttgaattttggagatgaagttcgacttcatcaggggagctcttgtaatggtatctggtgtagctcttttaatggtgtccggtgagatttcaactgaagaaatttcaccggcgattgagcattcgtcgtctctgccgcaatcagaaaccgaaatgtctccatctccgacgatgtctaatgattacgattatccgtcatcgtctcaacttacggaatccaatgatctcaactacactgatagtaccagaccgggaggcgaagaagcatccgtaggtggtgaaaatggcggaggaggaggaaagaaaaccggaatcgctgttgttggatcgattgcagccgcgagtatggttggattcggtggttatgtgttgaagaaacggcgagagaaca

SEQ ID NO: 130551 - DNA, 1669 bp, Arabidopsis thaliana
gggaaactcatccggcttctggaaatttccgtttatccgattcgttctcacgagatgatggctcgttaccacaggagatcgatgatcttgtgcttagttctgctctcattaagcatatcgccgagccaaggcttcctagggacagaggaaaagatcaaatccgctgtcttttactcaccaaaacttgtgatgaatccaggatcagttgcaaatccttacttattcgacatcgatttcccaagaggtcatatcggcctcaaagctttcgatgctgaagtggttgacgaagcgggcaaacccgttcctctacacgagacctatctccaccattggattgtcgagccatactatgtacgtaaaggttccaagcttccacagagagaaatgttcaggaatcatggattttccagggaagatcctgaaagcaatcttgattccaagtcagatattattcttgtgaaaaatggagggttgtgcaggagtttaacactcagcatttctttggtttgggatcagaaccccgcgaaacctcgacgtatgttcctgatccctacgctattgaaatcggtaatcctgaggaaacacctgatggttatgaattcaaatggcttcttaacattcacgcgatagacaccagaggttgcgaagataagaaaggatgcatagaatgtttgtgtgatctgtataatgttaccattgatgagtatggtcgagctataaggcctggatacaaaggaggtttatactgctgctatgataagactcaatgtcgggtgaaaagcggttttgacaatcggggagaaaacaagaactctgtatttgaagtataccgtgagatgggttgattgggacagctcggttttgcccgctaaggtttatattttcgatgttacagattcttgggaaagatcaaaaggagatagccaagaacatatttgccatgtggaatacgaggtgaaaccgtgcaaaaccaatggcgatggatgcgttgacgttaagaaaaagagcttagtgatgccatttgatgggtatattgtctacggggtagctcaccaccacgctggtggtatcggtggtgctctataccgagagaacggtgaagggatatgcgcttcaatgccgaagtatggcaatggagatgaacctggaaacgaagctggttacattgttggaatgtcgtcttgttatccagctgatccagtgaaagtgagctatggagagacattgactttggaatctaattacagtaatgccgttggtcataccggagttatgggactcttttacatcctcgttgctcagcagctgccggaaccagatagctccttgcctaataaacaacattttgaggcacctgcgagaagcttgagctttttagccatttttgcagtgacggtagttgtggctgttgtggttttaatagccgccgtgatataccggagacagaaacgggaagatggttaccaatcacttagtacttaaaaaagagcaaaaaccatgtcgactctatatatgtcttcaaagtgaattctgtttgtatacatagaataaaagattattttgttgtcatcttcctctgatgtgatatctctgtaatagttacgtgtaagaagaacttttctttctcaaatacatcacattcacacaataaactaacattattttcgtt

SEQ ID NO: 130552 - DNA, 789 bp, Arabidopsis thaliana
  unsure (1)..(789): unsure at all n locations
cgattgacctttcggaccggacctcccgggtcgacccacgcgtccgggtgaaccttatgataaagaagagaaaaaagaaatcatatacggaagtatatgctttagggcaatatatatctatgtctgcccataaagcacggagagtaattgatcaaatacgtggacgttcctatgaagaagcacttatgatattagaacttatgccttatcgaggatgttatcccatttttaaattggtttattctgctgcagcgaacgctagtcacaataagggtttcaaagaaaccaatttagtcattagtaaagctgaggtgaaccaagggaatactgtgaaaaaattaaaacctcgtgcccgaggacgaagttacccaataaaacgatccacttgtcatataactatcgtattggaagatatatccttctatcaacaatatgaagaatatttaatgtatttaaaaaaacctggatgcagcaatgaaaacagaaatctaacatgttatgatacatatagtagtgcaggcctatggggcaaaaaaataaatccacttggtttcagacttggtacaccccaaagtcatcattttctttggcttgcacaaccaaaaaagtattctgaaggtttagaagaagaaaaaaaaagnnnnnnnnnnnnnnnnnnnnnnnnnnnnnnnnnnnnnnnnnnnnnnnnnnnnnnnnnnnnnnnnnnnnnnnnnnnnnnnnnnnnnnnnnnnnnnnnnnnnnnnnnnnnnnnnnnnnnnnnnnnnnnnnnnnnnnnnnnnnnnnnnnnca

SEQ ID NO: 130553 - DNA, 605 bp, Arabidopsis thaliana
gcaaagcatttattaagaaaaatagagaagcttaatacaaaggcggaaaaagaaatcataataacttggtcccgggcatccaccattatacccacaatgattggccatacgatcgctattcataatggaagggaacacttacccgtttatataatagatcttatggtaggacataaattaggagaattttcacctactataaattttcgaggacatgccaaaaatgataatagatctcgtcgttaattaaataaattaaaaaaaatgaatatagattttttttgagtgagaggtaaaccttatgataaagaagagcaaaaaagacaatcactatacggaagtatatgcttttagggcaatatatatctatgtctgccccctaaagcacggagagtaattgatcaaatacgtggacgttcctatgaagaagcacttatgatattagaacttatgccttatcgaggatgttatcccatttttaaattggtttattctgctgcagcgaacgctagtcacaataagggtttcaaagaaaccaatttagtcattagtaaagctgaggtgaaccaagggaatactgtgaaaaaattaaaacctcgtgcccg

SEQ ID NO: 130554 - DNA, 537 bp, Arabidopsis thaliana
cccttaggcactttctacagagcagctaatcaaaaaaaaaaaaaaaaaaccttgttcttcgcttcttcttcctctctcacaaatttgactttcatagaagaaaaaaatggtgactacatcgtcacgaaccaagtcaaacggaccggtgcttcgttcacaatcaccgtcaggtcgattttgcggtggttactcaagagccgttccgtcatcttcttcatcagctttcgcttcatcaacgagttctagcttttcatctccgtcgtcagcttttttcagcaatcaccgtcatcacgagagcaatcacagtcaccaccgatctgcgtcaccgactcgtgtgaatctctacacagcgcaaccgatgtctcagtcgtttcgttactctctcgatagcagatctatatctccgactaacaaatcgatctccgttcgaagaatcagccaccgagccataatcacaagatctcaaggagacgtatgtgttctccgacgacgcatcaggatcttctcgatgcagtctacatagacgtagcgatcaca

SEQ ID NO: 130555 - DNA, 637 bp, Arabidopsis thaliana
  unsure (1)..(637): unsure at all n locations
acgaggtatatgtgcgttgcacacgtacggctccacctttcttagtagatccttctgagaccatcgggccaccaccaccaccgcatacgaaactgcattccacaccacaaatcttactaaaacacgagaaaagtccattacctccatctgtgtgacggcggttatgctttttcgtcgtcggagttttccgtcttgaactcattcctcccccggcagttgcagctggaacgctcgcgccatcgtaatcagtgctacttatatggcttgatcctatgtcggacaacggtggaagctctgttcgccatctctcgagttttgatcgcaatccttcgatgctagattcatcgatgctccattcgctgagtattgaaccttccgtgtcgtgcgatctatctttcgccaatttgtcagccacttcagatggcgatggtcctaactccgattcaagttaagattcgtcttccagctaaaantcctcaactggtgtaccaaaatcgttgatgagttctcatcgggtgtaggcaatgnaagtttgnatcggatcggggggttatccgacgantgtttgatntnattggggttggacccaaccattnnagncccgaananggggttngnatttggnggnngtncnacc

SEQ ID NO: 130556 - DNA, 439 bp, Arabidopsis thaliana
actttgctgcggccgagatatacaacgcattccgtatctttattgctgcttatgttgggatggctggttttggaaacttctcttactactatgtcagaaaggatttctctgttgcacgttttgcgcagatgatgtggaggctgaacttctttgtagcgttttgctgtattgttctcaacaacgactatatgttatactacatctgcccaatgcacactcttttcaccctaatggtatatggagctctgggtatcttcagcaagtacaaatgtgataggatcggtgatggctctgaagatattttcatgcttcctcgttgtctttttgttgtgggaaattcctggagcttttgaaatattttggggtcccttaacatttttgcttggttacaatgaccctgccaagcccgatcttaatcggctgcatgaatggcacttta

SEQ ID NO: 130557 - DNA, 790 bp, Arabidopsis thaliana
  unsure (1)..(790): unsure at all n locations
nnnnnnnnnnnnnnnnnnnnnnnnnnnnnnnnnnnnnnnnnnnnnnnnnnnnnnnnnnnnnnnnnnnnnnnnnnnnnnnnnnnnnnnnnnnnntcgcggccgcattaatttctcgcaataaaaaaagttcagatttcgaggtattcttgcaatctcgatcgagtttcagatctggggattcaataattagggcttttgattctgcattgtcaatgacgaattcgggtttcaatgtaaagatctgaggaaaaagtttcgatctttagattttgacttggaggtttcttcgattggtggatttgaagaagatggggaaaagacttgtgggtcttgtgtcaatgatgtaattttagcagaaagttgtttgcttttgagaagaagatgggatctggccggagcaaatcatgtctaggctcgtcggcgatggcgagagaagcttctgacgtggctcaacctcctccgtcgtcttctactggtggtggaaggagaagaagatcaaagagtcttttttgtgggcttcactcttcttgtcttgcttcatcttctacttctcattccagggatgatgaatatgaagaaaccggtgtttatggatggatgaagaacaagtcttgggaagtggttaccccggggtataaatgggaaatctcagaaaaaaaaaggccttcccaatttgccttttgaataaaagaaaatttgggaatggatggatttaccaaaatttctggaaaaaaccccaaaaagaacatttggtggatggaaccctttgtaccccttgaatgaattaaga

SEQ ID NO: 130558 - DNA, 521 bp, Arabidopsis thaliana
tttgagttacaacaacattttctttatttttctcttccattgaagaatcgtcaaagccatggttaggaaaccgtcgtcgaagatttattcggtggcagcagctgcgttggtgatcgttatatatgttgttttctgctccgtgtttgatcgtcaattgttacaatcgtcaagtgtagttctaggtacgttacaacaaccatgggaatctagaagaatcaagcaggccccacacccaccgcaagagactacttcggcatcaatcacatgcgaccgatcccacactaattacgatctctgctcaatcaacggctcatgtaatctggaccttaaaaccggaactttgactctaatggacccaacatcagcaccacttgtcgaaaagatcaggccttacccaaaaaaggctgacaactggatcatgcctaggatcaaagagctaacactaacctcaggcccattgggtctgccccgatcatgtgacataacacatgatttgccggcgattgtgttcagtgccggag

SEQ ID NO: 130559 - DNA, 769 bp, Arabidopsis thaliana
  unsure (1)..(769): unsure at all n locations
gcgattatcatttgagttcgaggattcgtccgatgcagctctagcatcaggaggggaacaacgaatggcacttgttataggtcactggagcgaagatcaacaaacaagacgcggccaaaaagactgcacaaaagagcaagaccattttgacggatatcgaaaggtggcaaaagggagttgccagctcagatgtgtttggtgttgcgattgagatcactgtccagcggcaggagtcaagcaggcctattcctctgatactagttaaatgcgcagattatctcatattaacaggacttaattcaccgaacttgttcaaggccgaaggagatagaaagttgattcaacaattggtttctgcttacaatcaagatcctagggcgtcaatacctgagggtgtgaatccagttgatgtcgctgcactcttgaaatactatcttgctagccttccgacaccactaactacttttgagctttataatgaaatcaaagatgcacggtcgagcatacacagaatgagncagtcactccagaagctttccaatgtgnattataatacattggggttcataacagcgctattgcttcgtgtgagccagaaacaacttntttaacaaaatgggttcggatggcctngctttgggaatggntccagtggncatttggngggaggcaacaggcctgattttttcggggatcttggggcgccntaaaggggnctnggaaagnncgcnttnantctntcntggnctttttagtngggnggccgngc

SEQ ID NO: 130560 - DNA, 530 bp, Arabidopsis thaliana
  unsure (1)..(530): unsure at all n locations
nnnnnnnnnnnnnnnnnnnnnnnnnnnnnnnnnnnnnnnnnnnnnnnnnnnnnnnnnnnnnnnnnnnnnnnnnnnnnnnnnnnnnnnnnnnnnnnnnnnnnnnnnnnnnnnnnnnnnnnnnnnnnctgcgcagattatctcatattaacaggtaataatgttgggaccaatggagcaataacacttttattgctcacaccttctcatatcgagttatcaatgtgatattttcctctgacccaggacttaattcaccgaacttgttcaaggccgaaggagatagaaagttgattcaacaattggtttctgcttacaatcaaggttgcaagatttcttttcgactcttatggcctcatggagaaattgtcatttaattgaatcacttggttggcagatcctagggcgtcaataccctgggggggtgaatccagtggatgccgctgcactcttaaaatactatcttggtagccttccaacaccactaactacttttgagctttaaaaggaaaaaaagatgcgcgggcgggcat

SEQ ID NO: 130561 - DNA, 534 bp, Arabidopsis thaliana
ggtacggaatcgcagttccgggctaggcccacgcgtccgattattattaaggtatggcgacacttgaaattaccgatatagccctggttcaaccttctcaccaaccactctccaacgaccaaactctctctctttcccatctcgacaatgataacaacctccacgtcagcttccgttacctccgcgtctactcctcctcctcttccaccgtcgccggagaaagcccctctgccgtcgtatccgcctctcttgccaccgctctcgttcactactaccctcttgctggctctctccgtcgctctgcctccgataaccgatttgaactactctgctccgctggtcaaagcgtgcctttagtcaacgctacagtgaactgtacgcttgagtcagtcgggtatttggatggacccgatccaggtttcgtcgagagattggtaccggatccgacccgggaggaaggaatggtcaatccttgtatcctccaggtcactatggtttaagggtgtgggtggggtctaggtgcatcgattcatc

SEQ ID NO: 130562 - DNA, 392 bp, Arabidopsis thaliana
cattttctcgggaaaattctccaacgaagcttttttttgcttcttctctgaattaaattttggactgaagcaaaaaaagaaaattaagggcgttcatactctacgacgaagcttaccacacaatgcttcttctactaccttctctttccaaatccatctccgtcttgttctagggtttatcccaatcgatttcagatcatgcacggccttagccgtctaggtaacggcagtagcaacggtagaatcaatattccgtcaccgtcaccaccttcttcgcctcggattcgtcataccagaggaaaatctctcgccggaggtgtttataagcaaggattaggagagagacttgtgtttttactcttttcgatagtttttagaaagaaaggtgtctt

SEQ ID NO: 130563 - DNA, 456 bp, Arabidopsis thaliana
  unsure (1)..(456): unsure at all n locations
atggaaaccaaaatccctaagtcaatgatcgccggagtacagactgtcatgccggtggaagtgacgcaacaccgggaaatccgctccgtatccgtcgtagatcccgtcggagtaggaatattccggcgaacggttaacatagttacgtattacaaagaagcaggtgatagtggtggtgagagagggtggttagtcgccgggtggatcaaggaatctttagggagagccttgacggagcagccgatgctttccggtaggctacggaggaggaagacggccggggaatgatggtttggagttagtggccaatgatagtggtgtaaggattgtggaggctaaagttttccggcgagtctttccggagtttcttgaaatggcggaagagagaccaaaagcaagacnttaagcaaganancttttttttnttgaaanacaattnatgaagataaccncaat

SEQ ID NO: 130564 - DNA, 569 bp, Arabidopsis thaliana
cggacccgtgggcttctctgctactgctccttcgcgaagaagcatagactaaggtttagggtagaatataatggcgggttggcagaagaatttacagattgttattcgtcaagttggtaaaagagttaaggacagtcacatttccacggcaaattactcttcttctactcggaatttggaatcccctttctcacaaggttacttgcagagtctcctgagaccatcctactcctccagaccactgtatcatctttctacaacaactggggatctctacctcgagacaattgcaggcgggtgaggagcctgtatcatcacctttgtcatctccagctcttgctgggtaagtggcaaaagaagaagaggcagtagattatcccaaagcgtcagaaagttcagggctgtcctcaagtccataaacgcagagtcctaagaagggtcaaccttggttccagcacttagtcccgtgggcatgcgctgttgaagatgctttgttccaattgcagggcccggtcaaacgggctgcacaaactgagtaccgggttattcacccctgccgggcaaatgct

SEQ ID NO: 130565 - DNA, 874 bp, Arabidopsis thaliana
  unsure (1)..(874): unsure at all n locations
gctggtttcgatgggattgagatccacggggcgcatggttaccttattgatcagtttttgaaagatgggatcaatgaccgtactgaccaatacggaggatccattgcaaaccgttgtagattcttgaaacaagtagtggaaggtgtagtttcacccataggagctagtaaagttggtgtgagggtatccccggctatagatcacttggacgcaactgattctgacccactatcactcgggctagccgtggttggcatgcccaataagttaccaggtgttaatggctcaaaagctcgcttaccttcacgttacacaacctcgctaccacgcctacgggcaaacagagtctggaaggcaagggagtgatgaggaagaagctaagctaatgaagagcttgaggatggcttataatggaacctttatgtctagtggaggattcaataaggaactaggtatgcaagctgttcaacaaggtgatgctgatttggtttcatatggcagactgtttatcgcaaacccggatttggtttcgcggttcaagattgatggagagttgaataaatataatcggaagacgttttacactcaagatccagttgttggctacacggattatcctttcttggctcctttttcccgcctctgagtttgataatcgaggagaaaatgtattgacaatacattgatatgtaaaatgacaatgttattgttatccacttaatatttagtcatgtatcttgttgtttatctagttaaaatcttcatggcattactccnnnnnnnnnnnnnnnnnnnnnnnnnnnnnnnnnnnnnnnnnnnnnnnnnnnnnnnnnnnnnnnnnnnnnnnnnnnnnnnnnnnnnnnnnnnnnnnnnn

SEQ ID NO: 130566 - DNA, 387 bp, Arabidopsis thaliana
tgacaatggcgacgaagctgatttctccgccgttgtcttgtccgtgggttacttcaagagaggtgataatcaaagggcttccacggcggagaagagaatggatggtcacgaagagaaacagagtctctgctgtcacggccatgattgtggagccactttctgttgtttcttcttcagcaattcagattcatcaatggtgggaacaaaaccctaattcggtactgttaatgacggaggctactggtggttattcgttggctagctattatacgtctttgggtttgtttgttaaatccctgttccccggggcctttggtctctaatcaaacgctctgttaaatcaaagatagtgagaaagacgtttgttggtaatgacgtcaagaagga

SEQ ID NO: 130567 - DNA, 441 bp, Arabidopsis thaliana
ccaaatcaatccttctttaatttacttattcttagtataacgttcacaccttttcttacacatttacaactatatatggagtcgtcacggagcctcgagcacgtgctctccatgcaaggtggcgaggatgacgcgagctacgtcaaaaactgttacggtccagcggcagctttagccttgagcaaaccaatgctgacgacagccatcaactccataaagctcaccgaaggttgctcctctcacctgaaaatagccgatttaggttgcgcaatcggagacaacacgttttccacggtggaaacggtggttgaggtgttagggaagaagctagccgtgattgacggtggaaccgagccggagatggagttcgaggtcttcttctctgacttgtcttccaacgatttcaacgcgttgtttcggtcgttggatgagaaagtgaac

SEQ ID NO: 130568 - DNA, 455 bp, Arabidopsis thaliana
cagagatggggcagactttgttcgtggataccctttcagtatgcgcgaaggtgccataacgcgcggtctctcatggcctctggctcaacattcctgactatgatgctcccactcagcttgtgaaacctcttgagaaaaattccaggtatgttgatgcagtcatgaccattcccaaaggaactctttttcctatgtgtggtatgaaccttgcttttgaccgtgagctgattggtccggctatgtactttgggcttatgggtgatggacagccaattggacgctatgacgacatgtgggctggttggtgtgtcaaggtgatatgtgaccacatgggatggggagtgaagacgggtttgcctttcatatggcacagcaaagccagcaacccattcgtgaacctgaaaaaggaatacaacggtatattttggcaggaagaggcgattcccgtcttcaat

SEQ ID NO: 130569 - DNA, 712 bp, Arabidopsis thaliana
  unsure (1)..(712): unsure at all n locations
atgatactccnnnnnnnnnnnnnnnnnnnnnnnnnnnnnnnnnnnnnnnnnnnnnnnnnnnnnnnnnnnnnnnnnnnngnnnccacgcgtccggaaggagacaacacaacacacacacacacagagagcaagcaaaagaggcggctagggatcagagagtggttccttcactgaaagtttcttctttttcattctcttcttctccttcagattccttgcctcttcttcaagattctcctctcttccatgtgcgtttctgtgcttttgaagacgacgatgatgatgatgatgtctttatattgaaaccaaattcgtctccacgattgtttcttctgagttttgatttttcagatctcgcttcttttccgatttgttcaatcatcatggcttacctgatgtagtaattgggatcaaattcattcacaaagctcgagtttttattattagtggctactgttatctgtgtatagaagaagcttgtgtgtgtggttctctacgtttcatgatcggtttacggtatctgttatatccggctccggtgggttcagatttaggcactggtctagaaggctttcttcggctactgcttcttctggtcaccaaaagaagccctttttggtttcttcttctggttcatggcgaggaacttaaaccagcctgttcagacacaaagggccggggccggtttcaagacttctcttactggagctag

SEQ ID NO: 130570 - DNA, 440 bp, Arabidopsis thaliana
gtcttataatttattcatttctctcttcttcatcgatcttcggcttttagaaaacctgggcggaaatggcaacggcgtcggttaacatgcagtcagtgttcgctgctccttccggtgtattgactacacgcaacatcagaaacacaaaccaactcttcttcaagaggattgctccggataggcgtcagatgcatggctcagggcgatcctatcaaggaagatccttctgtgccctcgacctcgacttcggccactccaccacaaatgccacagtctcctcctccaccagttagcaagcctaaggtgagtacgaagtttggagatttgctagcgtttagcggtccagcacccgagaggatcaacgggagactagcaatggttggattcgtggcggccatcgccatggagttatcaaagggagaaaaacgtgttgctcagat

SEQ ID NO: 130571 - DNA, 484 bp, Arabidopsis thaliana
gcgtttgcttccatcgttctctcgattgtttcctctcaagcgaagcttcttcttcttcgatcttcttcctcgtgtgtggattcgtttctgaaataggatcgaagtaatggccagcaaatctggaagcggtggcctaagagaaccgccgaatgagcaagctgttttgaacatgtatgaaggcaagagatcagagctaagccaaatctactccaacataaccgacctcgagatgcaagtgagcgaacattctctggtcattaacgccattcagcctctcgaccaatcgaggaaatgcttccgcatgataggaggcgttcttgtcgaaagaaccatcaaaagaggtactcccagctgtccaacgtaacagggacggacttgaagaggttttgaggaagcttttacgggacattggggagaaaaagaaggaagatcctttcagacgtttgaagcttaagtataagatcaggataacgaaacaagaaga

SEQ ID NO: 130572 - DNA, 1237 bp, Arabidopsis thaliana
  unsure (1)..(1237): unsure at all n locations
cttgaaaccatgctcaaagagtttgagcggttgaaaaaagagtatcctgatcggattctgattgcttcagtcatggaggaatataacaaaactgcttgggaagagcttatcgaccgtgttgagcaaactggtgttgatgctttagaaatcaacttctcgtgtcctcatggtatgccagagcgcagaatgggtgccgctgttggacaagattgtgcgcttctcgacgaggtttgcggatggattaatgctaaagctacagttcctgtatgggctaagatgactcctaatattactgacataactgagcctgctagggtgtcactaaaatccggatgtgaaggaattgcagcgatcaatacaatcatgagtgtaatgggaattgatatgaagacgttgcgtcctgagccatgcgttgaaggttactccactccagggggatactcttataaggccgttcgcccaattgcactggcaaaagttatgaacattgccaaaatgatgaaatctgagtttagtgaggatcgctcgctttcgggtattggaggagttgaaactggctatgatgccgctgaattcattctccttggatcaaatactgtacaggtatgcaccggtgtgatgatgcacggctatggtcatgtgaaaaccctttgcgctgagctgaaagatttcatgaaacaacacaacttctctacaatagaagagttcagagggcattcgctgcagtactttacaacacacacagatttagttaagagacagaaagaagcagttgagcagagaaaagctgagaagagaggcttgaaatctgataaagattggaccggggatgggttcgtgaaggagactgagagtatggtttctaactaagttagtagcctgatgaagttatgaccacccaaatatttcaataaaggttcagcaacttcattcacaactcacatgcaaattacgaaggctctttctttcaaatgtttaaaatcaacttcttaaatctcacttgaaaagaaataactaaattttatgtttcttaattttcttctcgttgtgtattattcatcttgtatccatccatagcaaccatttctttgttacttcaagttggcttaaattttggccaataataataccatagaccttctccaaaaaaaaaaaaaaaaaaaagnnnnnnnnnnnnnnnnnnnnnnnnnnnnnnnnnnnnnnnnnnnnnnnnnnnnnnnnnnnnnnnnnnnnnnnn

SEQ ID NO: 130573 - DNA, 600 bp, Arabidopsis thaliana
attcagactactattcagagcttacctccagctttaaaacactattactgcatctcaaagcgtcaacacaaagtcgacacgttaaggagatgcgttcacgccctcgatgcccaatcggttatagctttcatgaaccactcaaggcagctcaaagatgtggtctacaaactcgaagctcgtggtatgaattcagctgagatgcacggagatctcgggaagctagggagatcaacagttctaaagaagttcaagaacggggaaatcaaggtacttgtgacaaacgagctctctgcccggggtctggatgttgcggaatgtgatctggtggtgaatcttgagcttccaactgatgcggttcactatgctcatcgagctgggagaacagggaggctgggaaggaaagggacggtggtaacagtgtgcgaggaatcacaagtgtttatagtgaagaagatggagaagcagcttggtttgcctttcttgtattgtgagtttgttgatggagagcttgttgtcactgaggaagataaagctattataaggtgaaaatctaaagatgtaattttcagatactattaaaactattgaaaattcagagtc

SEQ ID NO: 130574 - DNA, 726 bp, Arabidopsis thaliana
gcttcttgtacaacagccgaaacaattataccatgacattaaaatccagatttttttcagtcattttcgtattatttgtttaaaagtaaagtttttcttccatcaaaatggaaaatgtgatctggtttttttcttagaagatattaaaacaatcggagagaggattgcaaattttttatttttgttaatttgctgtgtgatgggtctggttgattctttgttaggaaaagatgcaagaaaatttctcaaaaggaaagatagtgatgctgcagaagcaggacgagctttggaagaactcagaagttctttgtacaatgagcttaaaacagcagaaggagctaaaaggcaacaacagagattttgtggccctgttgttgcaatgtcctttaatttcgttgttgctgttggaatcatccttgccaataaattagtaatttggtttcttcaatctcaaattcttctttctcttttttttatttaccatgtgaatgtaattgtaaggttgaattgtgcaagtgatgggaagagttggattcaatttcccaatctttctaacattgattcattataccgtggcttggattcttttagctttcttcaagtctctctctttgcttccaatgtctcctccatcaaagacaacacctttctcatctcttttctctcttggagctgtcatggcctttgcttctggactcgctaataccagtctcaaacacaatagcg

SEQ ID NO: 130575 - DNA, 537 bp, Arabidopsis thaliana
  unsure (1)..(537): unsure at all n locations
gctancctcgatcncnggcgggaagnatccccgcgaaggacngggacctgtaaggacggntactggatcagacctggaccgngtatccgccctgaaggcttgcaagngttaatccncttttaaacttnccaaggattgngcctggaaagtgaataggggaaagaagagtggaagtgaagaagttggagaggtgattaatgttatctaataaatcaccccaagacaaggggcggtgtctttttgttcttttgtttttccttttcaactttcttcattgatctctattctttttttgagtcataattcattggttttggaacctaaatttttgtcagttttgtctttggtttatgtctttctctcttgttaatgtttatgttgttttttggtcttgtcagtaaagaagagtgaaaaaacatcacatcatgtaataatggcttgtgtctgtaattctgtgaatcccctcaggctgaattttgtcagtcatgttgggacaatttcctgtttctgtcttttcaaaaagctccaattccagtt

SEQ ID NO: 130576 - DNA, 561 bp, Arabidopsis thaliana
  unsure (1)..(561): unsure at all n locations
gattggcatgcagtgaagtgcgtganttcgagtataaggttgccgagtctcaagtttttgatagagaagcagatgatgtgtctactattgacattcttgaggcaagatgtgggaatctgttgtgctcgaaatctgaaaatacaagccctgtttctgggaatgacagtgatttgtcacaattgagcgagaagattagtttactacttttcgagaacgatgaccagttggatcagatgctcatgaatgaaatctcccaagaaaatatgaaaaacaaccttttgcaggaatttctgaaagaaagcttacactcatggcttttacaaaaggtagcagaaggtggaaaaggtccaagtgttttggatgaaggtggccaaggtgtatttacattttgcaagcttctcttgggtacaaactgggccttaggacccaccaataatcgcttggtgtaagcggtggtttccgggttgaaatggttggcccncncttnatttggnaanttttcttttgcaagggggggggtnatttggtcnccccaaagcntttgggnctncccnggggctt

SEQ ID NO: 130577 - DNA, 635 bp, Arabidopsis thaliana
  unsure (1)..(635): unsure at all n locations
gagtacaaaagacttatcagtcgattgcctgaggtttacgtcgggaaaaccgagaggcttcgatctctgataaagatattgtgcatagcgggaaagaaatgcttgagagacaagaaaatgcatatggctccttggagaaaacacaagtacatgcaagccaagtggcttggcacatgtgatcgatctagctccttggaagcttcggtttccgaggccatggagccagaaaattgggtgccggtggcgaagcctagggtttctatgttgaactatgatggtctcttaggtggtttctctgccggtccggcccctgtagtggtcgtgtgatatttttgtactatgtttttttgatgacttgtaattattaagtgattagggtgagtcatgagtgttaattatggtttctgatttgaacttagcaagaaatggtctcagcggctgtgattcgagcctctacattgtgtagtaagggacgaagatgctgttttgtgtcattggtgctggaagaaattagacatttgtgatttttttttatattgactgtatacgagtgattaacattaaaatttaacagaaataatatacattttgagtttcgaaanaaaaaaaaaaaataaaaaaaaattaggggcggc

SEQ ID NO: 130578 - DNA, 567 bp, Arabidopsis thaliana
  unsure (1)..(567): unsure at all n locations
cccgggnanccaaaggccnacttnngttggccctaaaaacncnctcccctntggangggccnatttggaaggncntnaacccgtcggaanaaacaaggttgntcccaaaaaccaaagatagntttaaggaaaaagatangaaaanaaaagagttaaagcatcgagaatggggggaccgagacaaggatagatatgtccgtcgagtatctgtgcttgttggtagtgtcatgagtgaacccaaagagattggaagagaagaaagggaatccgataggtgggaacgggagaggatggagcagaaagatcgagaaagaaataaagagaaagataaagatcatatcaaaagagagccaaggactggtgctgagaaagagatctcgcagaacgagaaagagctgggagaagcatctgccaaaccctcagagcaggaatatgtggcaccagagcagaagaagcagaacgaaccggataattgtgaaaaagacgaaagagaaacaaaggaaaaaaggagagagagggatggtgattcagaggcagaaagagctgaaaagcgcaacagaatcagtg

SEQ ID NO: 130579 - DNA, 817 bp, Arabidopsis thaliana
  unsure (1)..(817): unsure at all n locations
nnnnnnnnnnnnnnnnnnnnnnnnnnnnnnnnnnnnnnnnnnnnnnnnnnnnnnnnnnnnnnnnnnnnnnnnnnnnccacgcgtccgcgctcttgcttctggccctcgctgtttcgagctctcctcaaagccctaattttctcctcttcttcttcattctctcaccatgaagctcgtcaggtttttgatgaaattgaacaacgaaacagtttcaatcgagcttaagaacggaaccattgttcatggaaccattactggtgtagatgttagcatgaacactcatttaaaagctgtgaaactcactctgaaagggaagaatccagttacattagaccacttaagtgtcaggggaaacaacattcgctattatattcttccggacagtttgaatctggagactttgctggttgaagacactccaagaatcaaacccaaaaagccaactgcaggtaagattccagcaggtcggggacgtggtcgtggaagaggtcgtggacgtggccgtggtggtcgttaagcattttgcagtaatcaaaagtctggtcctttttggtttgtaacagcaggattgtaaaagatctatcttgtagtgagatttggtgtcactaagacaaattcttgttatctcttttagtttttcatgaatttgaaaatttgaaaacgttattggccaaacattaccatcacttcaatattggttttaattaattggacgttggaatcaccttttatttcatacacacatataaatatatttttcgtatagggggcgggcccggttttttagaaggaatatccaaaagcttttacggtaacc

SEQ ID NO: 130580 - DNA, 453 bp, Arabidopsis thaliana
gtttggcttttcccatgagcttttccagcacatacatctttattgattaaataaaaaacttggttagtctgtgatttaattcttacattcaaatacttatgcgtgaacttgctcttattatatagcctcctactacctattaagtcttttaacggttcataatcctcttagtcggtgagccttggatgactgcttctggtgggaccaatgagctcaatccatgttgcttcaatgatccttctcttgtttctcttcttgcatcattctgattctcgtcacctcgacaatgtccacattacagcgtctcggttttcactcgtcaaggttcttgatccacatttcaattcatcaacttttcatttactttcatgttcttcgtatttgcgggatctggttatcaccttctcaaaactaaggcttctttttgtttttctgtggcttaggatcaaaatg

SEQ ID NO: 130581 - DNA, 481 bp, Arabidopsis thaliana
  unsure (1)..(481): unsure at all n locations
taaattgcggccatacaatgctacgatccacttgctgcactccactttgccctttcacggcgaaacaaccttctttccttaggaaacagcaacgtattacctctgatcgcttcacctttcgcggtggtggtggtggcgatgccgccgccgtcgtctcctcctccggcctccgtgatctcgttttcgtcgtaaaccctcaaggtgctaatggtagaacagctaaagaatggaagaagttgcttcctcaccttcgatctcgtcttggtaaagactgtaatgtaagtgaattattaacatcgggtccttctcatgccattgacattacaagagaggctataaagggcatggtgcagatgctgtcattgccggttggaggtgatggaacacttcatgagggttgttaatggcttcttttttgggaggggaaaccttgtcgggttatctctggctggggaagctagtcgttcggctnaanttnggc

SEQ ID NO: 130582 - DNA, 423 bp, Arabidopsis thaliana
aggaaatatacttcgcataatgacgataatgatcaagtttctcctgttagctctgctcgtgatctctccgatttgcgccgagaaggacctgatgaaagaggaatgccataatgcacaagttccgaccatttgcatgcaatgtcttgaatccgacccaacctccgttcatgcagaccgtgttggcatcgccgagatcatcatacactgtctcgactctcgtctcgatatcatcaccaataacattacaaatatattgtcactgggaggaggaacgaaagaagtgagaaaaatcttggaggattgcagaaatgacacgtcgacggtggcacctaaactactgtcggaagccaaaacaggtctgaaaaccggtgattacgacaaagccgccaaatcgatagagtatgctagcattcctcatagctg

SEQ ID NO: 130583 - DNA, 414 bp, Arabidopsis thaliana
aaaatattttggatactcttaataatcaatcgattgatgattgctcgttttgtgctcagcgttctaatcgtagcggcgatagtttctggtagtgagttttctgatactcgtgatgcaaaagtagaaaaaatcttaaagaaactcaacaaacctgctcttaaatctatcaagagtccagatggagatataatagactgcgttcatatgaataatcatccaatttatgagcatcctttattcaaaaactacacgattcagatgaaaccaagttcttaccctaaaggtaaaaataatgaatcttcagacaaagagaaacaaagtgttgtgactcaactatggacagttaacgggaaatgccccaaaaacagtattccgatcagatgaacgagaagaaaagaaattttgcgaaccgaa

SEQ ID NO: 130584 - DNA, 683 bp, Arabidopsis thaliana
  unsure (1)..(683): unsure at all n locations
cggaaacctaggccgagtgttcctctgtaacctccgggactcttccgcaagattcggttgaaaggtcatcgaccgtaactgtctcacgacggagaagaagctctctcaggtcgagacggaggcagagatcctctccttgctggaccacccttttcttcctacgctctatgctcgtatcgacgagtctcactacacgtgtctcctcattgattatgctcccaatggagacttacattccttggtacgcaagcaacctggtaaccgtttaccgattcagccggttagattctttgccgccgaagttctcgttgcattagagtaccttcacgcaatgggaatcgtataccgcgatcttaaacctgaaaacgttttgcttcgtgaagacggacacgtcatgttgtcggattttaatctttgtttcaaatccgacgttgtccctacttttaaatctcgtcgctaccggagatcttcttcatctccgtcgcttcgtcgtagaagnaagcggttgcttctccgttgcttcgggngaaaaaagtacgngagganagggagattnttttcaaangtttncgggcaagagcctgtaacggggttttcaannntcttnttttgggancanatgggnttttttncgccnggnntagtttcccggaaacggccacggaagcggttagcctnttggg

SEQ ID NO: 130585 - DNA, 744 bp, Arabidopsis thaliana
gtaccctattcactatagggaaagctggtacgcctgcaggtaccggtccggaattcccgggtcgacccacgcgtccgtctcaaaatcccaacttggcctctgtttttgctttcttttatgttctcttcttctctaaaaaccatctcatacttccaagaatttctctcacaaagaccaagaactcaaaatgtatcaagattctggattaatgctccgttacatgcaaaactgtcccccagatattcaacaattcgaagacctcttcaaatcatacaaactctccgatgaaatgaacaacacttttgttgagtcatcaaacatatctgagtatgatattggagaagaaagtgatctttttagagctcctgatccaattcttgaagaaccaatcttaaccgttgatccactctctgctgctttgactatgatctcttgtggtgaagacacttcacaaggtctttgtgagcttcctgatcttggttcattgcagagtggtcaacagcttcttgacaaagctttttatgaatgtgagcaagatcttatgatgaaatcagctatggagtctccattctctgatgttttagaccatcaagaacatctctggtgtgacgaccatccatgagaacccggatttgccaaagagaggttaccccggggaatttgacccccattggattgggccccctgcccccaccaagagaactgggaaggaattcaaaaatttttcccccgaatttccaattt

SEQ ID NO: 130586 - DNA, 752 bp, Arabidopsis thaliana
gaagcaacaagtgaagaaagaaagaaaaaaatggagaagagtggaggaagaattgtaatggatgagataagaagctttgagaaggcacacttgttcgatcttggtcatcctcttcttaaccgtatcgcagattccttcgttaaagccgccggagtgggagctttacaagccgtgtcaagggaagcttactttaccgtggttgacggggcaggttttgactcgaacaacgtggctccaccggcggagattacagggcaacaagaaacataggttccctaatctcagaggggaaagcagcaaatctcttgatgcattggtgaagaacacaggaaaagaatctctccaatgggggctagcggcagggttatactcaggtatcacttacggtatgacagaggttcgtggaggagctcatgattggcggaacagcgcggtagctggagcattgacaggagcggcaatggctatgacgacgtctgagaggacaagccatgagcaagtggttcagtctgctctcactggagcagctatttccaccgctgctaatctcctttctagcgttttctagatgatttgtattagaagctttaatgcataagggttgtttcatgtatcagttatgtttctttttgtgaaaacgaattcgctaaaggtctactaagatcttttcctgaaactctcgaagctggagagagatcgttttgttatctgtttggaaaatatttgcactatatatatcttgagtagtacct

SEQ ID NO: 130587 - DNA, 391 bp, Arabidopsis thaliana
  unsure (1)..(391): unsure at all n locations
ctttttccttggtaaggagcatcttttcatgccgattgcatcantgcagagttgcttatttactctgtggcttgtcaaatttccatttttttcttaatctctcccactcccactcataaaattagttttgtctttctttccccaaaaatctttacttaaaatctttttcacccttttgctttaacttttgtttgctcctcctctggatcgtatcggtgggctggaagaagaaattgtgagaaaaaatggagaaaaccaagatgattacgtctatgacctgttgaagaaaccctactcagaataagagtaaaactctgtgatttttctgactaacagagagagagacacctaaatgggctcagagcaggatcagaggaaaaggtggggaggt

SEQ ID NO: 130588 - DNA, 959 bp, Arabidopsis thaliana
  unsure (1)..(959): unsure at all n locations
cccctcccttaaagtcttctcctcctccatactactatcactccccagggcctccggagaagtccccaccaccaccatactactaccactcccctcctcctccggtgaagtcccctcctcctccatactactaccactccccgccccctcccgtaaagtctcctcctcctccatactactaccactccccacctcctccggtgaagtccccaccaccaccatactactaccattcacctcctcctccggtgaagtctcctcctcctccatattactaccattcaccacctcctccggtgaaatccccaccaccaccatattactaccattcaccacctcctccggtgaaatccccaccaccaccatactactaccattcacctcctcctcctgtgaaatctcctcctcctccatattattaccactccccacctcctccggtgaaatccccaccaccaccatacctttacagctctccaccaccaccggtaaaatctcccccacctcctgtctacatctacgcttctcccccacctcccacacattactaggctcatcaaattcaacaaaatttccccattattcaagttttcttttaaaaaatgaaataaaggaagggtcaaagtcaaagagaagaagaagtgaaccaaataaggatcgtggcgtggaaatcagaaacaaaacatctctaacaacgatccacatcacttcctcttcttcaatgtcgctcatcttccacttgtgcatcattatctttgcgtcttcgtcaagtcaaattgtttccaagacccttttagatcgtatcatactcctctttgttcccttttgttgttaagtgaaaaaatgggttttggtaatttaattgttgtgcatacattttctattttgttattcttccgttaatgtaatgaaagagttgttagcatataaaacaaagttcagtttcttcaaaaaanana

SEQ ID NO: 130589 - DNA, 558 bp, Arabidopsis thaliana
aattcaacaaaatttccccattattcaagtaagtcctatacttatacctttacctcataatccgttttaataattgtgccctaaataaaatcggaatttcttctttcacaggttttcttttaaaaaatgaaataaaggaagggtcaaagtcaaagagaagaagaagtgaaccaaataaggatcgtggcgtggaaatcagaaacaaaacatctctaacaacgatccacatcacttcctcttcttcaatgtcgctcatcttccacttgtgcatcattatctttgcgtcttcgtcaagtcaaattgtttccaagacccttttagatcgtatcatacgcctctttgttcccttttgttgttaagtgaaaaaatgggttttgggaatttaattgttgggcaaacattttctattttggtattcttccgttaatgtaacgaaagagttgttagcaaattaaacaaagttcagtttaaaaaccaaaaacaaaaaaggcggccggtttaaaggattccaggttaacgaagggtgccatgcgacgtcatagctcttctatagtgtca

SEQ ID NO: 130590 - DNA, 463 bp, Arabidopsis thaliana
gcagcggaggcggtggtggatactcaggaggcgtgtggcggttgagttactcctcctgtgaaatcggctcctgctccatattattaccactccccacctcctccggtgaaatccccaccaccaccatgacccttacatgctctccaccaccaccggtataatctcccccacctcctgtctacatctacgcttctcccccacctcccacacattactaggctcatcaaattcaacaaattttccccattattcaagttttcttttaaaaaatgaaattaaggaaggggcaaagtcaaagagaagaagaagtgaaccaaattaggatcgtggcgtggttatcagttacaatacatttctaactacgatccacattacttccttttttttaattgcgcttatctttcacttgtgcatcattttttattgcgtctttttcaagtctaattgttttcaagcacccttt

SEQ ID NO: 130591 - DNA, 399 bp, Arabidopsis thaliana
caattcaccaattcctaagcattcttcagaaatccgagctgctttttgccacatctattcgcttcgaatctcttttcaccagctcaaaaactgtcgctttcaattccgctcgtttcgtcccaccgctccgtgtattgctgaacttcttcatagcaactcaataccatggatgttactgaagttccatggcgtcgtcttcctcaattttccggttcttcacgcgcctcgtggctcggttcttctgggtttccgctttcttcatatatgttctctcatgttgagcgtggaaagacgtttaggcttaccttgtgctttggggtctctcgtttacgtccaaggtctgctattgtaagtgcacaacaagaacagccacctagtcgtctcaaaggattatgcgag

SEQ ID NO: 130592 - DNA, 764 bp, Arabidopsis thaliana
  unsure (1)..(764): unsure at all n locations
cccccctttgattgaccttcccatctgcagtaccggtccggaattcccgggtcgacccacgcgtccgaaagagaatgttacaaaagttcctaatgctaaagacggtcgatattcaactgatattgaaatatatggaatgcaaggaattccaccccatgtcttgactgctcattatggagaagaagaggatgagcctccagccaaagttgcaaaagttgagattccttctgcccctcttggtggtgtagttcctagaccatatggaatggtatatccgcctcaacaagtacctggtgctgtacctgcacgaccaatgtattatccgggtcctcctatgcgtcatcctgctcctgtatggcaaatgccacctcctcgtccgcaacaatggtatcctcaaaatccagctctttctgtacctccagctgcccatttagggtatcgaccacaaccactttttcctgttcaaaatatggggatgactccaactccaacctcagctcctgccatacaaccatcaccagtcactggagtaactcctcctggaattcctacatcatcacctgcaatgccagttcctcaacctctgttccctgttgtgaataacagcattccttctcaagctccaccattttctgctcctctgcctgttggtggggctcagcaaccatctcattgcagatgctttagggtcagcaggtgctttcgcctaaaattttttcagggggctaatgnnatntnngntttgncaaaattggggcntntac

SEQ ID NO: 130593 - DNA, 444 bp, Arabidopsis thaliana
  unsure (1)..(444): unsure at all n locations
gacccacgcgtncgctttgtaccaattagaaaccctagcgagcggaggatggtgacaaagaacgagacttttgagggagtggagatttcaattttgagatcaaatcttgaaatcaacaaataggagaaagatttagtgatgggtaagaagaagaagagagctacagagaaggtgtggtgttattactgcgatagagagtttgatgatgagaagattcttgtgcagcatcagaaagctaagcactttaagtgtcatgtctgtcataagaagctttctacagctagtggcatggtgattcatgttcttcaggttcataaagagaatgttacaaaagttcctaatgctaaagacggtcgagattcaactgatattgaaatatatggaatgcaaggaattccaccccatgtcttgactgctcattatggagaagaagaggatgagcct

SEQ ID NO: 130594 - DNA, 469 bp, Arabidopsis thaliana
gttcaaagatcaagatctgcagacatggcggacgaagcaaccagagctgcttttatggagattcaagctagcatgattgaactcactgggaagctcaaacaggtgcagaatcagatgcgcaacaaagagggagatagaaagcgagctttcttaaccttggaggagctgaggccattgcctgaagagacaaacacctacaagtcaataggaagaacgtttgttctagagcccaagacagtgctggagggtgaacaagagcaaaaactcaaggacagtgaagctgccgttgcttctctacagacatccaaggaatacttggagaagcaggtagcagaggttgagaacaacttgagggagctgttgcagcaagaaccgggcattgctcaacagattatgtccatgtctatgtaacttttgtattatcccaaacctttgagtttggagagcttttgggattgaaaccataaca

SEQ ID NO: 130595 - DNA, 418 bp, Arabidopsis thaliana
ctctccttatcgctctctaaaatccactataagagattcgtaaccgtaagtgatggccctcaaggtggaagctaaaggtggaaaggtagggatccagtgggatgatggatctgactatcatgatgtaacaaagatatatgtacgaggtggtcttgaaggtattcagttcatcaagtttgagtatgtcaaggctgggaaaaaggttattggaccaatccatggtgcttctggtcgtggtttcacagagacgtttgagatcaacaatttggaaaaagaatatttgttatctattgagggttactacaacgcatctaccggtgtgatacaatgtcttcagttcataacttacaagaagacttatgatccaatcggatacaatgagggtgctaggtttacacttagcgctagcaggagcaag

SEQ ID NO: 130596 - DNA, 550 bp, Arabidopsis thaliana
cggacgcgtgggaattcgattcattttctattaggccttgctctagcctccggaggagttattacttccttggtagctcaacacatgtactctttacctgcttatccgctcatagcgcaagattttacgactcaagctgcgttatatacccatcaccaatatattgcaggattcatcatgacaggagcttttgctcatggagctatcttttttattagagatcacgttccagaacagattggggagtacgtattagcaagaatgttagaccataaagaagctatcatatcccatttaagttgggccagcctctttctagggttccatactttgggactttatgttcataacgacgtcatgcttgcttttggtactcccgaaaaacaaatcttgatcgaacctatatttgcccaatggatacaatctgctcatgggaaaactttatatggatttgatgtacttttatcttcgacaagtggcccagcatttaatgcgggtcgcagcatatggttgcctggctggttaaatgctattaatgagaatagttatt

SEQ ID NO: 130597 - DNA, 609 bp, Arabidopsis thaliana
gggggagaagcatattttcctttttcactaagaagaaaaaaatggcgatggcgagaagcatctcttacatcacctctactcagcttctccctcttcatcgtcgtcccaacatcgccatcatcgatgtcagggatgaagagaggaattatgacgggcatatagctggatcgctacactatgcgagtggctcgtttgatgacaagatctcacatcttgttcaaaatgtcaaggacaaagacacacttgtcttccattgtgccttgagccaggttcgtggccctacttgtgcgagaaggctcgtgaattatcttgatgagaagaaagaagatactggaatcaaaaacatcatgatcttggaacgcggctttaacggttgggaagcttctggaaaaccggtctgccgctgtgcagaggttccttgcaagggcgattgcgcctaaaccctactaaaccatatttgggacctaaattgatgttccacattgtcactgtcctaaagttgaattgaaggttatcataaataatctcttatcagtatgtttggtttacatggagcacaaacaccaaacttgcaacaacaatactaaaagggcttttatggtaaaaaaa

SEQ ID NO: 130598 - DNA, 1067 bp, Arabidopsis thaliana
tgcagtaccgcaccggaatttccgggtgcgacccacgcgtccgccggaggctatggcatcaatctactcctctttaacctactggcgcgttaaccacccctacatctccaattttacttggatcgaaggtgaaaccctaggctccaccgcctttttcgtatccgtcgtagtctccgtttacctctccgccacgttcctcctccgatccgccatcgattcactcccatcactctgtccacgtatcctcaaaccgatcacagccgtccacagcctaatcctctggctcctctccttagtcatggccgtcggttgcactctctcaataacctcatctcacgcgtcttcagatccgatggcgcgtttccttcacgcgatttgctttcccgtcgacgttaaacctaacggaccgcttttcttctgggctcaagtcttctacctctcgaagatcctcgagttcggagacacgatcctcatcatactcggcaaatcaatccaacggctatccttcctccacgtgtaccaccacgcgacggttggggacatgtgttatctctggctccgaactcgccaatcgatgttttcgattgcgctcgtgacgaattcgacggtacacgtcctcatgtacgggtactacttcctctgcgccgttggatcgaggcccaagtggaagagattggtgaccgattgtcagattgttcagcttggtttcagttccgggttatccggttggatgctccgagagcacttattcggggcgggttgcaccgggatttggggatggtgtttcaacgctgcatttaatgcttctcttttggctctcttttccaacttccattcaaagaattatgtcaagaagccaacgagagaggatggcaaaaaaagcgattagattggtttcttggacaataagtaaaacctctcattgtgtcttgaattgttgattagtttccacacaaaaggattaattgtcttgaattgttgtttattttgaaatttttgtctgtgttgtacttgcccctgttgagatacttttgtacttgtatgaatataagatgacagaaaatatc

SEQ ID NO: 130599 - DNA, 710 bp, Arabidopsis thaliana
ataggactcactataggaaaagctggtacgcctgcaggtaccggtccggaattcccgggtcgacccacgccccccagctttataacttctaaaacaaactcttataactttttacttcctcctccatggcttattctaagattgctcttctcctcatcttcaatgtcatcttcttcactttagtcagctcgacttcagtcccttgtccaccaccaccgcccaagagccaccacaagaaacccgcaacgccatctcctaaacccacttgtaaagacgctcttaaacttaaggtatgtgctaacgtgttggatttggttaaggtttctctgccaccaacgtccaactgttgcgctcttatcaaaggtctagttgatcttgaagccgcggtctgtctttgcactgccctaaaggctaatgttcttggtatcaaccttaatgttcccatttctttgaacgttgtcctaaaccattgtggtaagaaggttccatctgggttcaaatgtgcctaggggttacacattttaaattgaggttctatatctcacatttcattcctggttttaaaattccgcggttggggaaatccttcaaatggtggaaattggtctatccctcctccatggaatgaataaccaaaaggggttatagattagaaaaaaaaaaaagggcgggcggccgctttaaaggaatccaacgtacgggagcatgcc

SEQ ID NO: 130600 - DNA, 564 bp, Arabidopsis thaliana
  unsure (1)..(564): unsure at all n locations
caaaagcttgataaagagagagtttttagggttttcttgtacctattataagaaatactctaactgaaactttacttcttcatcaatggcttattctaaggttgcccttctcctcgtcttcaatgtcatcttcttcactttcgtcagctcgacttcggtcccttgtccaccaccaccgcccaagagctaccacaagaagcccgcaacgccatctcctaaacccacttgtaaagacgctcttaaacttaaggtatgtgctaacgtgttggatttggttaaggtttctctaccaccaacgtccaactgttgcgctcttatcaaagggtctagttgatcttgaagccgcgggtcttgtctttgcactgccctaaaaggctaatggtccttgggatcaaccttaatgttcccaattcctttgaacggtgtcctaaaccattgtgggaagaaggggcccactgggttaaatgggcctggggttacccattttaaattggggctttacccacatttaatccctggttttaaattccggggttgggatccttacatgngaatggaaagnnc

SEQ ID NO: 130601 - DNA, 429 bp, Arabidopsis thaliana
  unsure (1)..(429): unsure at all n locations
cccacaggaancccgcaacgccatctcttaaccccacttgtaaagncgctcttaacttaaggtatgtgctaaccgtgttggatgtggttaaggtttctctaccaccaacgtccaactgttgcgctcttatcaaaggtctagttgatcttgaagccgcggctcctgtctttgcactgccctaaaggctaatgttcttggtatcaaccttaatgttcccatttctttgaacgttgtcctaaaccattgtggtaagaaggttccatctggtttcaaatgtgcctagagattacacattttaaattgaggttcctatatcccacatttcattcctgtttttcaaattccgcgtttgatgatatctttatctattgttgtaatttgttttatgcttcatctatcaatgaaataaaaaagtgttttgcttaaaaa

SEQ ID NO: 130602 - DNA, 806 bp, Arabidopsis thaliana
  unsure (1)..(806): unsure at all n locations
ggccaagattgggtcacgtggaaacagatctttttgcttgttgatgtcgnctgttgcgtgtgctgttctgtttcccattgtctggtccatcaaaaacttgcgtgaggcggctaagactgacgggaaggctgctgtgaacctcgttaagttaactctgtttaggcagtactacattgaggttatctgctacatctacttcactcgtgttgttgtgtatgcactggagtccattacctcttacaagtatatgtggactagtgttgttgccagcgagttagccacacttgccttctatctgtttactggctacaagttcaggccagaggtgcataacccgtactttgttgttgacgatgaggaagaagaggctgctgctgaggctctgaagcttgaagacgagtttgaattgtaagtcatcactggaataatcgtgtcacgtgtgagtcagtaaaaagaaacatactttgtttgacaggatgattgagagtaaaccggatcatcagctgcctgctaaaccgccttctcttctttggttttttcctcttgttatctttattagaatgcaatacctgttttgtttttacttgaattgttaggatacttatatagactctatgaatgtcttgtcccccaatgcatagtatgtgtattactggtaacataaaacgcttggtgctgctcgttatacttaatctgagtctctgcttttcaaaaaaaaaaaaaaagaaaaaaaggtcgggcgcggnnnnnnnnnnnnnnnnnnnnnnnnnnnnnnnnnnnnnnnnnnnnnntcgtctcaatcattc

SEQ ID NO: 130603 - DNA, 407 bp, Arabidopsis thaliana
ctgcctcctaatttcttcgcccttctaccgaagaatctctccactcttgccctctggcgtaaccctaaaccagaagcaccagatttgtgcaactttttcccagagaacaatagaaaacccaacttgtgctctctagggttttctttattccttctcatctttggattttcttgggtcatcattttggaagcttacccaccagcgaaaaaattataacttccatcgattcctggcttctctctctcgctctctctgcatgtgctaaatcgccggactgatcctcactgtcacctctgttcccggcttattcgccggtgaaatctatggttggtgctcagatttatttccaattgtttgtgcatctggtggaggataaatgctccttgttttggatctagggatttcta

SEQ ID NO: 130604 - DNA, 442 bp, Arabidopsis thaliana
aaacaaaggatccttttttactggaaagatgttttttttttcttatcttctgagatggattgcgatagagagagagaacaaaaaaattctcagtgagcgcttattgatcaacaatggcgaaagagacagtgtgtgtaaccggagctaatggtttcatcggatcttggataatccgaacgttaattgagaaaggatatactaaaatccacgcttcgatttacccaggatccgacccgactcatcttctgcaactacccggatccgattctaagatcaagatctttgaagcggatctcttagactctgatgcaatctccagagctattgatggatgtgcgggagtgttccacgtggcgtcaccttgtacgttggatccaccggtagatccagagaaggagctggtcgaaccggcggttaaaggaacgatcaatgtgttggaagc

SEQ ID NO: 130605 - DNA, 467 bp, Arabidopsis thaliana
ttccgggtcggaccaagccttccgccggtttacaagtccccgccaccaccggttttcttcttctcgcctcctccggtttacgaaggtgtcctccaccaccagttaagtactactcccctcctccagtttacaagtctccaccaccaccggttcactactctcctcctcccgtagtataccattccccaccaccaccggttcactactctccttctcccgtagtatatcactccccaccaccaccggttcactactctccttcttcagtcgtataccactcttcaccaccaccggttcactactcaccttcttcagtcgtataccactctccaccaccaccggttcacttcttaccttcttcagttgtataccactccccaccaccacccaagaagcacttcgaatacaaattttcttcttcttcggtccattacttttcccctacggtataccattcttcttcttct

SEQ ID NO: 130606 - DNA, 408 bp, Arabidopsis thaliana
acaagactctcttcttcttcttcctctttatgttttgtccgccacacgcatgggcgggagtgatcagagttcttcgtctctctacttcaactctcatctctaaaaccctagactctctcgtcttcaatcgttttaaaaagaaatggaaggaaattgctcgcaaggacgctttgattctcaagtttcttctatgagagatcttcgtccaaatgctataaatcagaatcagaaacaacaccatccaaattctcgacaagactcaggctttaacaatactatggatacacgtcacaacaatgtcgacagaggaaagaaatcaatgtgtgaagatgatgaactttgtttggtaagttgtgatggtcaaaacaagtccaaggaaaactctccttggcaacgtgtgaaatggat

SEQ ID NO: 130607 - DNA, 419 bp, Arabidopsis thaliana
gaagcaggggcaccacaggatcaagaggcgtttattaaagaagtggaggccggcaacaaggagaatttcctggaatttaaagccccaaagttttacggacagcccttaaattgtctcaagctttggagagccgttatcaagttaggtggctacgatgtggtcaccacatctaagctatggcggcaagttggagaatcgttccatcctccaaaaacatgcactacagtctcctggacattccgcattttctatgaaaaggcacttttggagtatgagaagcatttaaggcaaaatggtgagcttaaccttcctggttcagcttctcttccgtcttcaggcattgaaaaggaggcaagtagccatcaagcttcagggtcaggcagaacaagaagagatgctgcagctcgtgctatgcaagg

SEQ ID NO: 130608 - DNA, 835 bp, Arabidopsis thaliana
catatcttgactttgtgtcggaaaatggtgaagagtttggtaattttggaagtccatcatggtttagttgggacaacaagcttccaggaacacatgtataaagaacaagacacttctttacaaatcatgattcatgtttgtttgattataacattttgtgacttatctaatacatttgcagatactattatcaagattaacctttttcaaaaaagggttatcaggaagcaaaggacttcaaggttttaaagaaacagcagaagctgtcatgtgtgggcttataccaagctcaccaactgctacatctagtagaaccgatggtggtctaatatgggtaagtgaatggaatgccctgcaacaccctgtgtcctctgcatttctagctacactctacagtgactatatgctcacctctggtgttaaggaactatcttgcagtgaccaatcctttaaaccttcagatctcagaaaattcgctagatctcaggctgattacatgttagggaaaaatccggagaaaatgagctatttggtgggatatggtgagaaatatccagaatttgtgcatcatagaggagcttcaataccagctgatgcaaccacaggatgcaaagatgggtttaagtggcttaactcggatgaaccaaatccgaatgtagcttatggagcacttgttggtggaccgtttttgaatgacacgtttatagacgcaaggaacaattctatgcaaaatgagccaagcacttataacagtgctcttgttgttggtcttttgtccagtttggttactacttcttcctcggtagaatctttttaaatgagatttttattaatt

SEQ ID NO: 130609 - DNA, 495 bp, Arabidopsis thaliana
  unsure (1)..(495): unsure at all n locations
gggttggaatctccncgcggctattgagccttccatgcnttgcggtcaacgtcaactnttcactctatnccctgccagtntataaaagcttcctactttcagacagttcgtcgtgtatgagtattatttctccatgaaactcctcatcaagtctccattgtttttttaacaggtgtgtttaatatggatagtcacagcgttcttcttgggccggcgacaagaacaattggcgaaactccaggtgggttcatcttcataggaacaaaatcttaactttgatacagaagatgagaggcttcaacgtcatatgtaggagttatgggaaaacaacttaaacccgaccgacatgaagatgaaggatcacaaggcagagtaatggtttagaacttagcttaaagaattcatatgtctgctgataaattaaatattgtacaaagggaaattacgctctttcttttgagagcggagtatatgtaaccgaacttggtttttctc

SEQ ID NO: 130610 - DNA, 488 bp, Arabidopsis thaliana
  unsure (1)..(488): unsure at all n locations
tgacaacttatgttgtaactagacctggaagggaactcttgttcaccgttgtctcgcaagacgagaaatacaaagctaaggtatgcatagatgtaattgttcaacggcttggagatgctgcagcggcgggactatttgaagtccttaccattgctcttggcggtcaaacgtcaactgcttcactctatgccctgccagtataataaaagcttcctactttcagacagttcgtcgtgtatgagtattatttctccatgaaacncctcatcaagtctccattgtttttttaacaggtgtgtttaatatggatagtcacagcggttcttcttgggccggcggccangnacanttggcgnaaccccagggtgggttcatctttcatagggaccaanatccttaactttgatncaganngttnagagnttcaacggcatatgtaggcgttattgggnaacanctttancccggccgcnatntggtnnaggtcc

SEQ ID NO: 130611 - DNA, 481 bp, Arabidopsis thaliana
cttggattttcctggtgagattctacaaaaccaaaagattccttcgccggaataatcaccggagataaagataaaggaatggcgtccctgaaatttccgttggagattctcgccgtcttcgtcatcatctccgtgattcttttgccgattgctcaatctcattcttcttcgccagctcccgcacccaccagcgatggaacatcgatagatcaggggatagcgtatgttctaatgatggtggctttggcgttgacttatttcattcattgacgtgatggatccgatctatttgttcttcctccataatggtttgtctttcgtagtgttgtgttacaattcttttctttttggggtttgtgacgtgagattttgtagaaaatcatattagggttttggtcctcatgcttttgtcctgtttttgttggttgcattattcggggaccctttttccttcccgtgggatggagagggggggtttttt

SEQ ID NO: 130612 - DNA, 494 bp, Arabidopsis thaliana
  unsure (1)..(494): unsure at all n locations
gtcgtcttcttcgtcatctccgtcgctgttcgttctcattctttcttaaggtagagctggtggtttctgtaatcgccggtggtgatggcttctaacgatccaaaaaacggcggcggtttcttcgcctctcttgcttcatccatcaccaatttcggatcggccatgagtaaatcagtgaacggtttgatgggatatgaagggcttgaagtgattaatccagaaggaagtacagacgatgcagaggaagaagcagggagaggaagatggaagcaagaggaacgtgatggctattggaagatgatgcagaagtatatagggtctgatgttacatctatggttactcttcctgtgatcatttttgaacccatgacaattgttgcagaaaatggctgagttgatggaatactcatatttgctagacatgggttgcaaaactngaggtccctncatncgtatggtntattcantcatcatgggntatnaccttgngnnta

SEQ ID NO: 130613 - DNA, 769 bp, Arabidopsis thaliana
gccccagctctatacgactcatttagggaaagctggtacgcctgcaggtaccggtccggaattcccgggtcgacccacgcgtccgcccacgcgtccgtacggctgcgagaagacgacagaaggggggctaacaatggcgaagaagaaggaactgttatcaaaagcaccgtggagaggcgacgacgaagatgattccgataagtttagcaacgcaaagcttaaagtcacaaaggattctgatggtatgtcgaagatgcacgtccctagccgcggaaccaaaaaaggaagtctcgctgatgatgatgatgattcacttgagattgatcctcagcttcgttacagcttcaatcgcaactatcagttcctgcaaagtgtattcactatagacactttggtgaagcctcttcctccttcaatggcattcaatgtctctcgcaacttgagcttcttcacccgcattttcactcaattctttgatcctgaaggcattgcaaatgcacagaagtctctagggttggggcaggaagagaaagctccccgtgttcgttgaaatatgaccatatttcaatcttgtgaatggacccagcactgttagattgattaaaatatgtcctcaaagagatgttttgtatgaattttcctgagtacaatgaaatttccaagttccattttaaaaaaaaaaaaaaaaaaaaaaaacaaagcggccgctctagaggatccaagcttacgtacgcgtgcatgggacgtcaagtaattctaaggcgtccta

SEQ ID NO: 130614 - DNA, 336 bp, Arabidopsis thaliana
cggacgcgtgggattggattctgcttttttcttttcacgtttccgatcgtttctggaacgtgtggtgagcctaaggttcatctctctcttctactcgtcgattctggtcatcgaacattccactcagctcacgtaaagtgctatatctcgtttcccctgtctcggttcaagctttcaagagaattgtgactgattctagaagggctctttgtcagcacactggaaccgaataaggagcctggtaacgtgtcaagtaattcgagcaccgatacagagaagtcgtctgacgagatctctgtcaaccatgccgtgatcgcgtggcaagagatgagaaag

SEQ ID NO: 130615 - DNA, 1220 bp, Arabidopsis thaliana
cgtccggccaaatccacacccgcggggtcttctggtccatccttggttccccttttcctttctcactgtttctgccttacttaaaggctcaatctttgcttcaaattcaacccatctctttttcctcccttccctcacaatcaaaatcttaattctcagcttctggttttgtcgaaaatggaaggcggttccgctagtggatcggcttcggctttgtcaaacgatgaaaatctcgtcgtttcttgtgaggattcttcttctcctatagggaatgagcttgagcttggtcttacgttgagccttggtcgcaaagggtatcgagattgtagggtttacgctgatgattcttcttcttcttcatcatcttcttctctgagcagagctagcgtaattgctgggatcaagaggacagctgattccatggctgcaactagtgggcaagttgtgggatggccaccaataaggacttacagaatgaacagtatggttaaccaagctaaggcttcagccactgaagatccgaacttggagataagtcaagccgtaaacaagaatagaagtgattcaacaaagatgagaaattccatgtttgttaaggtgactatggatggcattcctattggaaggaaaatcgatctgaatgctcataaatgctatgaatcattgtcaaacactctagaggaaatgtttctgaaacctaaattaggttcacgcacactagaaaccgatggtcacatggaaacaccggtcaagatactaccaggtgggtctcccggcttagtcctaccgtatgaagccaaggaaggagattggatgcttgttggcgatgtcccgtgggggatgtttattggttcagtgagaaggctccggataatgaaaacatcggaggctactggtaaagctcagatgatattatgaagcaaataataatctacgaagaaccctttatgtttgaagcagtaataagacagatcacagatcaaagagaagacaaaaacattgtaagaagcttcttcttcttctctcccctttacagtttcttttttggctctgccatttttcttttagttaggtatatgttctctttgtaaatccccccttaaaaatctattagaaaacccttttttggacaaaaaaaaaaaaaaaaaaagggcgtccgctgtagaggatcccagcttacgtacgagtgcatgcgacgtcatagctgttgtataagtaac

SEQ ID NO: 130616 - DNA, 552 bp, Arabidopsis thaliana
  unsure (1)..(552): unsure at all n locations
gagtaagtccgttcaggtcgatcataataattccgacgaattagaaagcgaaaaaacaaatctacgaaattctcctctttccgaagatgcagattgaagaagaaggagaagaatcataagaataaagctttgaattatcccgttttgctccaccttcgttcttctgattccatatagatccgtttaatagcagcaacgttgttcaattgagaaggtggaaacatgtttaagttcttaaaaggagtagtggctggatctgggacgggactcaaggatctaccttataacatcggtgatccttatccttctgcttggggttcatggagtcactttcgtggtacctccaaggatgatgggtctccagtttccaataatttgctcccccctggggacaatgctccaagatgggcatttggctgctggaccgaaatnggtgccaangccttcggaccggggngnganccnaanatccttcattccccacaggactgggggccgaacncctggaggngctacaccaagttcaacctannagcncggccngtntncgta

SEQ ID NO: 130617 - DNA, 467 bp, Arabidopsis thaliana
  unsure (1)..(467): unsure at all n locations
ttgctccaccttcgttcttctgattccatatagatccgtttaatagcagcaacgttgttcaattgagaaggtggaaacatgtttaagttcttaaaaggagcagtggctggatctgggacgggactcaaggatctaccttataacatcggtgatccttatccttctgcttggggttcatggagtcactttcgtggtacctccaaggatgatggatctccagtttcaatatttgctctctctgggaacaatgctcaagatgggcatttggctgctggacggaatggtgtcaagcgccttcgtacccgtgaggcatcccaaatattctttcattttctccacagtactgaggtcggaactccatgatggctctactacccaaagttacaaatctatatagtcacttgagcctgttatgccgcttgtcagattaggttaaagggctaggctttaaagtnncccnnngggtt

SEQ ID NO: 130618 - DNA, 357 bp, Arabidopsis thaliana
ctctcggaaatagttgctgaagaaagtttgagactttatggcgcttaaagcaaaaccaagatctgaaatggatatctcagattgttctgcaaatcaacaaccagatggtgttaatgtagtgggggatgcacaagaggtggaagaggatatagttgatatcttgaagtggcatgatgattttgaagaggaaagagaagaggttttgtgtggagcctcttcttcaaggtcttttggtgattcaatgtgtgctcgtgatggtgatgattttggtttgggtgatgaagcacaatctatggttagcaatgattatccattacctgggaacctgtgatgatgggactgagttttttgggtttg

SEQ ID NO: 130619 - DNA, 413 bp, Arabidopsis thaliana
gtttcgttgtcattcctcttgttgatgtatatgttgcaataataacatcggtcgtgcctattggaactccttttaccgtgacatatacaatttcatgtaatgatcatctcgtcagattataaacgtataatattgccctcacaacagactctaattctaaggattgatgttgcattctctgagataaacgtgctcatagtctacatgctttgaccagaagcctctgtatcttggaatcccaatctctagccatggtttgaggttgccattatagtgtatcacgggctgccctctcaatatccctttggttcacactcgggttgtatccaagccctagtatgtgccatttccggtctagcgggatatgttcgtctccaaaatgtggttaaccaaggggggaaaggccccaagtt

SEQ ID NO: 130620 - DNA, 504 bp, Arabidopsis thaliana
taggtaccactatagaagagtctatgacgtcgcatgcacgcgtacgtaagctcggaattcggctcgagccaccacggaattctccctccggccaaatcggatcgaatctttcttaccattccggtgttcccgccggatttcagagctcgtggatggactaagtctcctttctctctccttataaatccctctcttgcttcagctgccaatcgtcgtctctctcatcttcctcctatcgcgtgttccagaggtattgatcaggaagatgaagagaaggagagcagagaacttctaccacacaaaaacgatgagaatgcaaccacttcacgctcttcttcatcagtagatagtggaggcctgacagattatcatcaagaagaaactcacaactcttccttcaagactgctgccttgtgcgttggcactgcggtggcatttggaactggaataggtttgaaggaaggtgctggcaacgcttcagagtttgtcgcaggctacatattg

SEQ ID NO: 130621 - DNA, 542 bp, Arabidopsis thaliana
  unsure (1)..(542): unsure at all n locations
tggggctttaaattagtagaaatgatcagacagttttccccaagattccgattcagagtatgctcctatccaccgacaaatgtaatgactatcagaaacgaaataatcctttattttttataagtctaccaacttttttctaaaaaagaaagaagaataggaacgaaacaaggctcttttttttttcatatatttcgaaaataaaatcgaatttctgtcatgaataataaaaaaataggatgtctaattatttttcgtaatcgaaaaccacgatgggcttaaatacttttttttttttaggagttttttattaaagggttaagttattactcaacaaatagaaattcaaatttgtaaaggggtgagatgaattccgaagcgcgttttttattcttagaatttgagcagacagaattccattgggtaataattcgggaccccagatatatttaaaccattttnggacacancatacccaccaaatttaaaancngggcctnggtttntttatggccccgaggngccggatggggccagncccc

SEQ ID NO: 130622 - DNA, 467 bp, Arabidopsis thaliana
atcctttccaagcaattaactgaagtccattaaaaccttctctgacaatggtgcctcgcggacccagcccaccaaccggctgcggcgaacgcaaccgcaactgcaaccccaatcgcaacctcgagcacaacccctgccgggcaggcgtatgaaccccgtcctatgcatcatcgtcgccctcgtcctcttgggactcctcgtgggtctcgccatattgatcacatacctcacactcaggccaaagcgactcatctacacggtagaagccgcgtcggtccaagagtttgctataggcaacaatgacgatcacatcaacgcaaaattcagctacgtgatcaaatcatacaacccggagaaacatgtctccgtaagataccactccatgcgtatctccacggctcatcataaccagtccgtggctcacaaaaatatctctcctttcaagcaacgtcctaagaacgagacta

SEQ ID NO: 130623 - DNA, 470 bp, Arabidopsis thaliana
  unsure (1)..(470): unsure at all n locations
gacccangcgtncgnttcttctgtagacaccattgatatcctctaaattgttccccgtcgtagaaactttaggtaatcgttgccgtcgagctgagatttgtgaaggggaagccctgggagattcgataagggattgtaaagttgcacaagtttgcttatccccagaacctgctctgcaacacaacaatggggaaaaaaggagggactttgaagagaagtagcaaaagcacaaaaactcgcaaagatatcgtcgaagaccaatacgacgacgagattgacgcctttcataaacagagggatatagttcccttggatgttaatgatgatactgatgaatcggatgaagatgatgtgcaacctgtatttgatttacagggtgtggatgatgaaagtgaggaggatgaagatacagaagacgaagaggtggccgagaatggacttactgcgaaaatgattaggcagaagaaata

SEQ ID NO: 130624 - DNA, 608 bp, Arabidopsis thaliana
  unsure (1)..(608): unsure at all n locations
gttttgtcctttttagattttgttttttttttattctttaaaccgttcattgatttcttctgagtcattagaggttgatgtatggcaagcaaaagggttttcaattgtgtgttggttgctgtgatctttgaccagattttatggtggaatttctgaaaaaagtatcaatccggttcttgaaatgatgaagagaccgatcccaagttggccatggtggttattaggaagtagaaaagagaaagaaactgaagctcttaagtttcctacaaagatagctcgagtaaataagaggaaagagcttgaacttgagagctttggttcgtctggctctgaatctgtagctgttgttgctggtgatggacctgaatggtctgttggatggactgagccacatggacctgatttccaaagtgatgatgaaggaaatgatggtggcttcttagtgttggttccttgttatagagctgtttgtttgaaggctcctagtaataataattacccacccctttgaggcctgtcaaagaatctcccccaatgggtttgcccccccnatgggaggatttccatggggcaaattgnnttcaanntttgaaaaactttttnccngg

SEQ ID NO: 130625 - DNA, 846 bp, Arabidopsis thaliana
gaaaagattgcagtagaagaagaagaactgagaagcggcattgacgaagctgagaaattggttgcaaaggaagatgagataaagatgctgaaagctagactctatgacatggagaaagagcatgaatcactaggcaaagaaaacgagagcttgaagaatcagttgagcgattcagcttcagagatttctaatgtgaaagctaatgaagatgagatggtttcaaaggtgagtaggattggggaagagttagaagaaagcagagcaaagacggctcacctgaaggagaagcttgagtccatggaagaagcaaaagatgctttagaggctgagatgaagaagctcagggttcaaaccgagcagtggaggaaggcagcggatgctgcagcagcagttctttctggagagtttgagatgaatggtcgggatcgatctgggtcaactgagaagtattatgcaggtgggttctttgacccgtcagctgggttcatggatccaccgggaatggctgatgattatcatgatggactgggaagtggcaagaggaagagttctgggatgaagatgtttggtcagttgtggaggaagaaagggcaaaagtgagttacagattgtgtggagtgtcattcaagaaatggtgtgctcaccgtttctctcttttattttgctgtatttacctgcaagtttttgtaagtgggtccgcttcatcagaagctaactatcaatccaaatcaaccgcaaaaacaatttcatgaacaaatttctgaaaaaaaaaaaaaaaagggcggccgctctagaggatccaagcttacgtacgcgtgcatgcggcgtcatagtaaaatatagtgc

SEQ ID NO: 130626 - DNA, 458 bp, Arabidopsis thaliana
taaacattcacaccatctctttctctaacaatggagatttttcaaaaggccaaagccgttcgtctacggagccatcacgacaaggacctagtcgccgatgaagacgaagaatctgtaactcaagaacgtaacggctcagcaggtgcagccaaatggaccggtgagataatcccaggctcaacatatctcatccgtctcaaaagcgcttatggcaaatacttaacagcgtctaacaaaccgtttcttcttggagccaccggaaaaaaagttctacagactaaacctagtcgtcttgactcgtctttagcttgggaaccgattagagattctgctttggttaagctcaagactcgttatggtaacttccttcgtggtaacggtggtttacctccctggagaaactctgttactcatgatattcctcatagatcggccactcaagaatgggtactttggca

SEQ ID NO: 130627 - DNA, 650 bp, Arabidopsis thaliana
ggaattcccggtgacgacgcgtccgaaagaagtgtacaaggttgatgaaatgtttatgaggtggttctacacaggagacagatgacgttttcaccctgatggctgcctcgggataatagaccgaaaaaaggagatcgttaaacttcagcatggagaatatgtctccttgggcaaagttgaagctgctctaagtataagtccctatgttgaaaacataatggttcatgctgattcgttctacagttactgtgtggctcttgtggtcgcgtcccaacatacagttgaaggttgggcttcaaagcaaggaatagactttgccaacttcgaagaactgtgcacgaaagagcaagccgtgaaagaagtgtatgcgtcccttgtgaaggcggctaaacaatcacgattggagaagtttgagattaccagcaaagatcaaattattggcatctccatggacgccagagtcaggattagtcacagcagctctaaagctgaaaagagatgtaattaggagggaattctctgaagatctcaccaagttatatgcctaaatttttcttcttcctttactttttttttttttacgtctcgatgcattcgaaagacttaacagatgcacaaaaacttaaatataagaatagttatctcttttc

SEQ ID NO: 130628 - DNA, 765 bp, Arabidopsis thaliana
  unsure (1)..(765): unsure at all n locations
aatcatggctaccaccaccaatctcagcttcgctctctccttcttactcccgttttgccgctacgaaatcccaaatcagagacccgctgtttacgtcccccctgccactcccatcttctttcttcctggttagaaatgaagcatctttatcttcgtcaatcacgccagtccaagcttttacagaagaagccgtcgatacttcggatttagcttcttcttcttcaaagcttgtacttgtcgttggcggcactggtggtgtaggtcaacttgtggtagcttcattgctcaagaggaatataagatcaaggttattactgcgtgatcttgacaaagcttccaagttatttggcaaacaagatgaatattccttgcaggtagttaaaggggatactaggaatgcagaggatcttgatccatccatgtttgagggtgtcacacatgtgatttgtaccactggaactacagcttttccttctaagaggtggaatgaagaaaacactcctgagaaagtagattgggaaggtgtgaagaatctcatttcagcattgccatcatcggtgaagagagttgttttggtttcatcagtaggtgtgaccaagtctaatgagctaccctggggcatcatgaaccctttttggagttcttaaagtacaagaagatgggggaagattttcnttcgtgacctctgggcttccatttcaccattatcagacctggtagntttncctnantnggccatacacatcttatgncctgganactttg

SEQ ID NO: 130629 - DNA, 653 bp, Arabidopsis thaliana
cggggcggcccacgcgtccggattgttatagcgatggtggctggaagattatcacgtgaagatgctaaagagcatgggtggctggttgatggatttccacggagggttgcccaggcacaaagtctggacaaactgaacgtgaaacctgacatttttatcttactagatgttcctgatgaaattctgatcgatagatgtgttggtcgaaggttggatccagtgactggaaaaatttatcatatcaaaaattaccctcctgaatcagatgaaattaaagcaagactggttacacgcccggatgatacagaggagaaggtaaaagcacggctgcaaatatacactcagtatgctgaagcgatcgcttcagcatactcagatgttatggtcaagattgatgcaaacaggccaaaagaagtggttttcgaggagacccagactctactgtctcagatacagttaaagagaatgataaagactgataaagcatctcctgttcaggataaatggagaggaataccgacgagattgaataacattccacattcgagggatatcagggcttatttttatgaagatgtgctgcaagccacaattagatctatcaaggatggtaacacccgtcttcgggtggacattaatatccctgagctaaa

SEQ ID NO: 130630 - DNA, 463 bp, Arabidopsis thaliana
atctttttttctggtacacatgttctgttttgcctgcgtggtattatcaccggttgtgtggtaggttagggtaaattcaggttggccatttctgttgagctaacctccacaactcttttttttggtcgttcgcaggtaatttaatctatccttgttaaaattcgaccaagggcgtgatcgatttttctcgtttatgcacgaaattcgaaccgggataggcttggagaatatagaaggggaggccaaaaaaattaagaaatggtttaggaatgttggggataaaagaagaaggagaagaagtgatagtgatgatgataagattcgattttaatttaaaccgggtcccgaaatccagctggtgtggagaagtccaaataataatccaagtttttaagcctaaaaaaaaaaaaaaaggcggcccgctctaaaggatccaagcttacgtaggcgtgcatgcgacgtc

SEQ ID NO: 130631 - DNA, 465 bp, Arabidopsis thaliana
cctacgaaaaaaaattcttcaattcaatatcactaatatgctattctctcttcttcttcttcttcttccgtcttgcgccaaacctcgagtcggcgaatcattcgattctcagattcgcatattttcttcgaattcgctaggctcaaaacgttgtttccgtgtacaagaagcaacctaacgatttggggccaggtgaaggaagagctgatttaggttattgagattcgttttcttcaaatggaaaacgaaagggttgagagagaacagagccaatttcaggaagacgagtttatcgattcgagaaaaccaccgccatggaggaaacagatcacggttcgagcgatcgtcgcgagtttattgatagggattgtctacagcgtgatcttgtcttgaagctgaatctaacgacaggactcgtaccgaatctcaacatctcatcagctcttttggcttttgttttcctca

SEQ ID NO: 130632 - DNA, 640 bp, Arabidopsis thaliana
  unsure (1)..(640): unsure at all n locations
ccgcannncccccagntattcaacnccngttggtcccacctaaccagttttctccggattggagcaaccatcctagcccttcaggatgcaagtgatgcctttatggaaactgctaaattttccaggtccccggaaaaagatttgggagccagtgtatgttttgcattatttgctgtctcctggctattgctacggttgatatacttcccattttggatcatcagggccacgagcattgaactcctggattatttggatatgacatcagctgaaggcacattgatgtactattctttcaacactatgttactaatgctgcttgttttccacatatattggtggtatctcatttgtgccatgattgtaagactacttaaaaacagaggaaaagttggagaagacataagatccgattcagaggatgatgatgattagtcttgtaagatacggaacatgtttccacttctccaaccaaaccatttagctgctgaagaatttgttttcagcttcattaccttactgactagcgttggagggtaacacaataaagaagaaaagggtattagattttatttcagttttgtattggtctgagttccattcgacattagactgcatattttctttgacatataagaaa

SEQ ID NO: 130633 - DNA, 656 bp, Arabidopsis thaliana
gttttctcgaaccttccacgagatatactaagccattgaagaagaagagacctgagacgaacaagaaatccagaaattaccaattgcttttttttgtttaatcgaattcaggaaaagtgaagaaacgaaagagagaagacaaagaagaagaaggtgagatgggagttgattattacaagggtttgcaggttgatagaagcgctgacgacgatgaccttaagaaagcttatagaaaactcgctatgaaatggcatcctgataagaaccctaacaacaaaaaagacgctgaggctaagttcaagcagatctctgaggcctacgatgttcttagcgatcctcaaaagagagctgtatatgatcaatacggtgaggaagggttaaaagggaatgtgccacctcccaatgctgctactagtggagcatcctacttctcaacaggagatggatcttcgtctttcagattcaacccgagaagtgcagatgatatattcgctgagtttttcgggttctcgaccccgtttggtggcggtggtggtggcactggagggcagagattcgctagccgcatgtttggtgatgatatgtatgcctcgtttggtgaaggagcaggtggaggaggagctatgcatcatcatcaccatcatcatcatcacgct

SEQ ID NO: 130634 - DNA, 798 bp, Arabidopsis thaliana
cacagatccagctaaaccagaccttccacgtctacacgaatggcatttcagatctggacttgatcgctacatatggatcatcggcatgatatatgcatattttcatcccactgtagaaagatggatggagaaattggaggagtgtgatgctaagagaaggatgtcaatcaagacaagcataataggaatttcttcattcgctggttacctttggtatgaatacatctacaagctggacaaggttacgtacaacaaatatcatccctacacatcgtggattccaataaccgtctacatctgtctgcgaaattgcacccaacagctgcggagtttctccctgacactctttgcgtggctcggcaagattactctggaaacctatatttctcagtttcacatctggttaagatcgaatgtgccaaatggacagcctaagtggctattatgcattattccagaatacccaatgctcaacttcatgctcgtcacggccatctatgtcttggtgtcccaccgacttttcgagcttacaaacacgttaaagtctgttttcataccaacaaaagacgacaagaggctgctccacaatgttctcgctggagctgccatctcgctctgtttatatttaacatctctcattcttctccagatcccacactaaccatgagggactagaaacatgttgaaaaacatgaatctaaagctgcacaaaggttctttttggaacctggttaaattggttccacccccattttatattgaccattaaaatttggttttaaaggatcagtttttttt

SEQ ID NO: 130635 - DNA, 790 bp, Arabidopsis thaliana
agaaacatcaggcggtggctctccgatcaagttcagacttctccgtcttctacgcctgctctttcaaaggctatcaagacactctctaccttcattctagtcgtcagttcttgagaaactgcaatatttacggaaccgtcgatttcatcttcggagacgcaaccgccatcctccaaaactgtaacatctacgctcgtaagccgatgagcggccagaaaaacacgatcaccgctcaatcacgcaaagaacccgacgagactactggcttcgtcatccagagctcgacggtggctactgcgtcggaaacttatttaggacggccgtggagatcgcattcgaggacggttttcatgaaatgtaatcttggagcgttggtgagtccggcgggatggttgccttggagtggtagttttgctcttagcactctttattacggtgagtatggtaataccggcgccggagcaagtgtctccggtagagttaagtggccaggttatcatgttttaaagacggtgacagaggcggtaaaattcacggtggggaatttcttggacggaaactattggattacggctacgggagtaccggtcaacgatggactttgatttttttttttaaagaattaattttgttagtgtggtctttgttgattttatgttttatttgtttgttggcgtataattgttatatatagctttatttcccaaaaaaaaaaaaaaagggcggccgctctagaggatccaagcttacgtacgcgtgcatgcgacgtcatagtcagctatagtttgcc

SEQ ID NO: 130636 - DNA, 741 bp, Arabidopsis thaliana
cttgaacacttggggacttgttctctacaataaccttgaggctctgcttttgtttccccttgagctgcttataatgggagagttaaagaagataaagcatgaaatcactgacgagactgattggtactcgttgcaagtggttttacccgcgggtttatcgtgtctttttggcttggctatctctttcttcgggttctcatgtcgtcgggccatttctgcaacggggttcaccgttcttggaattgtgaacaagctgttgacagtggtgatcaatttgatggtgtgggataaacattcaacgtttgttggaaccttggggctcttggtttgtatgtttggtggagtcatggatcaacagtctaccatcaagaaaccgaatgctacacaagaagctaaaccgcaagagcaagacgaggaacaagagaaacttcttgaaatgcaggagaacaaggagagtaacagcgtcgatataaaggaaactctgaaatcagaagaggaaactatgatccatagtggttggagcttacagtggctggagtttcttcggtactgatacgatttagtttccaagtatagacctccattgtacctaggggttatgaaatccttttgtatttagagggaagagtcctccgtccccgatcccgtagttgaacaatatcgatttcttctttacattttgatgtgtttggatatttttcttgtacccgattcagatttatatgcgaatgaagaattctt

SEQ ID NO: 130637 - DNA, 532 bp, Arabidopsis thaliana
  unsure (1)..(532): unsure at all n locations
ggcccnaaggnaccaaatccttnccggaaantccancccgnannaaaagcnttnacnatntggcactttcnggaaaaaagctcggtaaataaacatgcttttaagatgcggtctacctgcaccctggacagcaaaagaccctatgaagcttcactgttccctgggattggctttgggctttccctgcgcagcttaggtggaaggcgaagaaggcccccttccgggggggcccgagccatcagtgagataccactctggaagagctagaattctaaccttgtgtcaggacctacgggccaagggacagtctcaggtagacagtttctatggggcgtaggcctcccaaaaggtaacggaggcgtgcaaaggtttcctcgggccggacggagattggccctcgagtgcaaaggcagaagggagcttgactgcaagacccacccgtcgagcagggacgaaagtcggccttagtgatccgacggtgccgagtggaaaggccgtcgctcaacgggataaaagtactctaaggataaca

SEQ ID NO: 130638 - DNA, 523 bp, Arabidopsis thaliana
gctaaactgctaagagcatgcctctggataagaggcaacgggatttgcctctgggcttaagtcctgaagcttgcttcaaggatatagtaggtcggtctgtccttcctagaattcctctccctgagcttgggaaactatatgcagctaagcttctggctcgctgttcgcagccaccaccattccggtctttgctgtgcagtcatgataaggagtcttatggaaaaagattctcacggtctgacatgcggtcttggtgcgctgctgctactactactactactccacttggagcattagagtcttctcagaaaagacttttgatattcgatcagtcaggagaccagactcgtctattacaatgtccatttcctctacggtttccatctcatgcggctgcagaaccagcgaaactctctgagttacaagggatagagaaagctttcaaagaagatggtgaagagtttcacaagagtgatggaacagagtcagaaatgcatgaagacactgaggagatcaatgcctt

SEQ ID NO: 130639 - DNA, 779 bp, Arabidopsis thaliana
  unsure (1)..(779): unsure at all n locations
cattcctcagtnatctatcaaagttcgaagagaccgacgcaaaagggacagaaacggagaaggagaaagaggcagagatgggagtagagatccaatcgccgcagaacagagctcttacaccgttgagcagctcgtcgcccttaatcctttcaaccctgaaatcctgcctgatctcgaaaactacgttaacgttacatcgcaaacgtatagtctggaagtaaacctatgcttgcttcggctctatcagtttgagcctgagcgcatgaacactcatatcgtggctcgaatcttggtcaaggctcttatggctatgccaactccagacttcagcctttgcctcttcttgattcccgaaagagtgcaaatggaggagcagttcaagtcactaattgttctatcacactaccttgagactgggaggttcccaacagttctgggatgaagctgccaagaaccgtcacattctcgaggctgttccaggttttgagcaagctattcaagcatatgcaagtcaccttcttagcttaagctaccaaaaggttccaagatcagtgctggctgaggctgttaacatggatggtgcatctctagncaaattcatcgngcagcaaagtggctaacagtggatngnttttttgaaagagggtggnaggatttcttncccaaatggatttaaccctccggggtcanggaaaananaggggggnatntnccttggccaaattcccgattttcccacccttggtnnccatttttggncctnaaattcctttngcntg

SEQ ID NO: 130640 - DNA, 510 bp, Arabidopsis thaliana
  unsure (1)..(510): unsure at all n locations
cgcttccatattgtcacacccatcaataaaattgatgtattctttggctatggntnggagataaagtaaactgactttcaaggttggagactttgagggaccaattgttattttcaaagatgtttcgttccagtaagacaattcttgtttcaacttggtttatatctttcatctaaaacatttccggctgctcttgagtcatggatgttcgaccatgaaaacttgtcagtaaaacaacaaaattgtggtctttttttcttttttcaaccttggctgcaaatcgatactggtctttgaggaggcttaaaaaaaaaaaaaaaaaaaaaaaaaaaaaaaaaaaaaaaaaaaaaaaaaaaaaatataaaaaaaacaaaattaaaatacacaaaaatacaaaaatataaaatcttntatagggcgtcctattttgaaggtccctgctttcggacgcgcacaggctactctaaattaccctgggggaaccctatttaaagccatggcccacttttt

SEQ ID NO: 130641 - DNA, 467 bp, Arabidopsis thaliana
  unsure (1)..(467): unsure at all n locations
gaaaactttaaagccatgccatcactttggtctaacgaatccgatggatcattacgagagcatcttgtggatgttgttgtgtctggttcagaaccaaagattcgggtacatgatctgacccgagtcgccgatgatggatctcggatcttgaaaggagttacgatagatataccaaaaggtatgatcgttggtgtgattggacctagtggaagtggaaagtcaacgtttttgagatctctgaatcgtctttgggaaccaccggagtcaactgtgttcttggacggtgaagntataaccaacgttgatgttattgctcttcgtcgtagagttngnatgcttttcaagcttccngttcctttttcaaagggncttttncgganaatttgnganatggcccnaattttaangggggggaaacttaanttncgggagnggtttnaaaccncccnaaggttttaaaagccntt

SEQ ID NO: 130642 - DNA, 619 bp, Arabidopsis thaliana
  unsure (1)..(619): unsure at all n locations
nnnnnnnnnnnnnnnnnnnnnnnnnnnnnnnnnnnnnnnnnnnnnnnnnnnnnnnnnnnnnnnnnnnnnnnccacgcgtccggtgagattgttgtaatcacagttcgggaaagacttaacatttaagatttacgggtttgtttgatcgattagtctcatctgggtttttctccaagttaaattctttgtttctgagttggatcaagcttcgtcttcttcgactatggaggaagacaagaagtcttccactgatcctgtgaatgtcgatgataacgaggagagagaagctatagagattgctctgttccaagtgcctgaatgctatgtttatttgatacctccaaggaaaaccgcagcttcgtacagagcagatgagtgggacgtgaacaaatgggcatgggaaggagctttgaaagtggtgagcaaaggagaagaatgcattataaaactagtagataaaaccacaggggaactttacgctcaggcatttctaagagagggggaacttcatcctgtagaagcagtaatcgacagtagcagatattttgttctccgtgttgaagaaaagatagatggtcgtgttcgacatgcttttatcggactcggattcccggaaaga

SEQ ID NO: 130643 - DNA, 528 bp, Arabidopsis thaliana
gagaagcggtcgcgacattgtaaagatctctagctccgtccttcttcctcgtagctaccctctctaatctttttttctcattcctgttcttgatagttttctagacagatttcgattaaacaaaaccgcggaacactttgaagaaatctgcgtgatttagagatggcggcttctttatcgagcagacttataaaaggaatcgctaatctcaaagctgttcgttctagcagattgacgtctgcatcagtctaccaaaatgggatgatgagattttcctcaacagtgccaagtgattcagatacacatgatgatttcaagcctacacaaaaagtccctcccgattctacgggctcacttaaagatatcgttgagaatgatgtgaaggataatcccgttatgatctacatgaaaggtgtccctgaatctcctcagtgtgggtttagctcactaggccgtcagagttttgcagcaatataatgttcctatcagttctagaaacattctagaagaccaagagttgaaaaacgc

SEQ ID NO: 130644 - DNA, 718 bp, Arabidopsis thaliana
gtcggatttcaaggagtattacgtacatatgcaagcagcaaagagaagccaagcacctgttgcgtcccagatggtggatgaccggataattcttgacaatactgtacttgaacaagtttctctatggaagaaaagcaaaggacttactgataaggctgtcactggccatatttgtttgggaaccaaatgttcataccatcagattgacgacgtgttcatatgcaaagagacgggaaatgttcatgtatgcgatgataactgcaaggaagtaatactgagtccagagggtgacctcatggtgtgtactatctcaggagtttgttctgatactttacttgtacaaactgagccagacgcagatgggtgttatgaggaagaagctgaactagaagctgaagtattcacagataaaagccgattggcccggaggcttttgaacttggctacaactgcgatgatgtgcaggaactggaacgtaccctgaggttctgctgagcaaaagtctcgaccttttgtccaatttcataaggcctactttctgtaaggtcttctctctctctctttctctttctctctctctctctgacctgattctgcctgggttctgtggggttgaaatgaatcaaatgtagctcttgttttaatcagtcagctttgtaacttatacatatatcattgtatgtgattaacattgtccttaaaaagtgttagacctagt

SEQ ID NO: 130645 - DNA, 480 bp, Arabidopsis thaliana
gactttcccaatcccaggaaaatcaaacttcgataagatagtttccaccatgtatcagcattctcgctcaggaacgtcttcttggttacactcttggtagcgctttgactggattcatcgtttttgagcagagaaaactcatccatgactccgtttccgatcctaaatctcaatccattgatcaagctcaggtgagtgatcgtattttcgggaagaaatatcgtatggaatttgcgtctctgtggaacaaagctgtggatcagacttttgaacctgcgattgagtatcttagttcacgtaaatggtagagatggataagttctttgctgaaatatgtgcctcgtgaagtcgattgttgtcgtgttcttgatgaaaaccttatctgaatacagctctgttcttgtttttgctactttcttgaaaaaagaaaatggttgtgttttactggaaatatgaagaaaagcttcttattgtttggct

SEQ ID NO: 130646 - DNA, 523 bp, Arabidopsis thaliana
cggaggaacacagcggtttctcttctcaaatttctcacaaaattttcatcaaaggtttcgactttttttgatttggtagaagaagatgccaccttcggaggatgtgaaagctatgaagatgaaagaggaggctgaggaagacaataagagcttgagttcctttgcgaagaagaaacccacgaacggtaacaatgctggttcgaagaaattgaagaaagaagagaacgatgacgatgatgatgataacaaacctatcaagtcatctgtatctgggtctcgagctaagccagtgaagaagaaggaagagattgataaagacgatgagaagaagcctgtttctaagaggaattcttctgttggtgtctcaaaggagaattagaaaccagagaaagaagaagaagtaaagaaaaagagagaaagaaaagtttatgatttgcctggtcagaagagagagcagcctgatgagagagatccacttaaggattttctacgagtcactttacaaacaaatttccactagcga

SEQ ID NO: 130647 - DNA, 747 bp, Arabidopsis thaliana
  unsure (1)..(747): unsure at all n locations
agcgtggccagttcgtgcgcctgttcatccaggcattgtccctagctggtctcaacttcttggcgacgtcactgttccttgcattgatgatagagttgcaacagcgtggttgaacgatccagagattaggaaagctattcatactaaagaggagagcgagattggaaggtgggaactttgcagtgggaaactctcattctatcacgacgcaggaagcatgatcgatttccatagaaaccttacactaagtggatatagagctctcatttacagcggggatcacgatatgtgtgttccgtttactggctcggaagcttggacaaaatctcttggatacaaagttattgatgaatggagggcatggatatcaaatgaccaagtcgcggggtatacgcaaggatatgcaaacaatctcacatttttaaccatcaagggtgcaggacatacggttcctgagtacaaaccgcgggaggctttagacttctatagccgatttctagaaggaagcaagatttaagagagctgtctcatcagtttcatattctgtgctgtatttaaaagtgatcatcttatagcaatatagaatcttgattgatttgaataagaaagatatattcttcaaatcattattcaacagagtaaaaatcatttacctcaaaaaaaaaaacaaagnnnnnnnnnnnnnnnnnnnnnnnnnnnnnnnnnnnnnnttgaatcgnnnnnnnnnnnnnnnnnnnncgtcctcaa

SEQ ID NO: 130648 - DNA, 487 bp, Arabidopsis thaliana
cttccggaattggaaaaaggcccccaacctttttttttccttaatctttctctcctcccatcataatcaccatgtcctcccataccaatctcccctctcccaaaccagttcctaaaccagatcaccgggtctccggtacatcccaaaccaagaaaccaccgtcttcctccgtagctcaagaccaacaaaacctaaaatgccctcgttgcaactctccaaacacaaagttctgttactacaacaactacagtctctctcaacctcgtcacttctgcaaatcttgtcgccgttactggacacgtggcggtgctctaagaaacgtccccatcggtggtggttgcccgaaaaccaaaaaatctatcaaacctaattcctccatgaacacactttcttcgtcttcttcttcagagtctctatcatatgagatcatcaatcttctctcgcacatgatttagtgccgatatttacaatgacactcacttgatac

SEQ ID NO: 130649 - DNA, 705 bp, Arabidopsis thaliana
  unsure (1)..(705): unsure at all n locations
gaagaaattaagngttgaagatnctcttaatgctacaaaggctgctgtggaagaaggtattgtngttggaggaggatgtactctgctaagacttgcatcgaaagtggacgctattaaagagacctctagcgagacgatgaagaaaagggttggagctgacattgttaagaaagcattgagctacccactgaagttaatcgccaagaacgctggtgtcaatggcagcgttgtcagtgagaaggttctttctagtgacaaccctaaacatggttacaatgctgcaactggcaaatacgaagatctcatggctgcaggaatcattgatccaaccaaagttgtgagatgttgcctagagcatgcttcatctgtggcaaagacattcttgatgtctgattgtgttgttgtggagatcaaggagcctgaatcagcagctcctgctggtaaccctatggacaattcaggttacggcttctaagttagcaattgagaacagagtagtccctgatgaagcaaaagccacgaccaagttcttcacttcctgatctgaaacatctttaagccaatgtaaattatatgtttttccagtgacctgaagaaacatataatttggttctgtgttctccgattcaagatcaagtttttcaatatgacaacttcactaaagagacacagtttgcagtgctcaatagacttgatttagttagt

SEQ ID NO: 130650 - DNA, 659 bp, Arabidopsis thaliana
  unsure (1)..(659): unsure at all n locations
cccccccccnaaaggaggattanccnccaagccgtacaagccaccctttcagcncngnacacnncccctncnaaggcncgacccggttncctcctttttccaagcagtcgctccggttcctttttccagtaaatggtttttttgcagggtttcctttttatcaaggaaactctaacttatctcgaaatcggaaggttgtgtgttgcttgagaatatatttaccgggtagacgagattttagggtttatcatctcctgtttcttgctgctttggtgtcttttacgagccagttatctattttatccccgtcgtttgtctttgttgggtttggttttcctcggaagggttttgtatgatatgtacgggttcaggtttggttcaggccttggttctctcagaggtttgctctggcttttgttgcaacaactctattaaagagttttttttgggtttttttttttgccagagccctcgttttttttccaggcactgtattacaatctgtatgaacactgtactaaattatgtaatgccctttgggatggtttaatgagtattgaataaaattctcaaaaaaaaaaaaaaaagnnnnnnnnnnnnnnnnnnnnnnnnnnnnnnnnnnnnnnnnnnnnnnnnnnnnnnnnnnnnnnnnnnnnnnn

SEQ ID NO: 130651 - DNA, 712 bp, Arabidopsis thaliana
  unsure (1)..(712): unsure at all n locations
gccagattctcagtgatttggatatttcgaaatgcgcaatctcagattcagggattcaagcattggcctcctctgataagctcaaactgcagatcctatcagttgcaggttgctctatggttacagacaagagcttgccagccatcgtcgggttgggttccactctattgggattaaacctccaacagtgtcgatccatttccaattccactgtcgacttcttagtcgagcgtctttacaaatgtgacatcctctcctgatcaacaattccactgtcgacctctccacttataatgtaaggtattttagtccgtccaagttcgtttatcaagtctcaactctttttcaggctctgtgatctacgcggtcccctctcgctaggctcggtacccggttttccttcttttttccaagcagttcgcttccggtttctttttttccagtcaatggtttttttgcggggtttcctttttatcaagggaactctaacttatctcgaaatcggaaggttgtgtgttgctttgagaatatatttacccggggtatacggggatttttaggggttatcaatctcccggttttccttgctgctttggggggtcttttaccgggcccagtttttctaattttaatccccggtcggttttgnccttttnnttggggtttggggtttnccccggaagggggcattntntggnattngtncggggtc

SEQ ID NO: 130652 - DNA, 555 bp, Arabidopsis thaliana
  unsure (1)..(555): unsure at all n locations
cttcctcttcttctagttgcttctttgcttctcctaactcttgcttgtctattactagacgaacgaatttgagctgtgttaacacttcggttaaatccttgcgccacagcagattcgactcgaagcataatctcgttaaacgtcgaatcaatggagattccgttgttcggagaagcaccacaagcaataatagcactgaggagacagaatcatcgtcgtcttcttcgtctgtagattgcgttggaatgggatcagacgtggaatgcgtcaataacggggaagatgaggagaatcggagctctggaatcttgagcggcggtgaaggaacgtttcttgaaatggacggttcctgaatttcaccctttcttttttcttggggaacggcgcatggtggcgatgaaggaagtgttgccccattaactgggcctttcttcgtgggccgcgtttcggtaaatnccggctggtttttttcttnncggcntttcnagtttaaaagggagaccctttncctnaggaatcaaatncttggtccntatcgncnnttttncccttttg

SEQ ID NO: 130653 - DNA, 447 bp, Arabidopsis thaliana
gtaccgattcgggattcgcgcaacgcctcacgctttcgctcgttacagtgacagtgccggtaggagtcaccaatgacgggtctgcagtggtggtgggccgagcatcattcaagatcttcttcatcttcaacgcactcgcgttgtttacgtctctggcggttgtggttgtccagatcacattggtgagaggagagacaaaagctgagaagagggtagtggaagtgatcaacaaactcatgtggttggcatcgatgtgtacatctgtggcatttttggcatcttcatacatagtggttgggcgtaagaacgagtgggcggctgagctggtgaccgtggttgggggtgtgataatggctggtgttcttggaaccatgacttattacgtggtaaaaatcgaagaggacaaggtcgatgaggaagaaggtgaagagtgctcgcaggagtggt

SEQ ID NO: 130654 - DNA, 749 bp, Arabidopsis thaliana
  unsure (1)..(749): unsure at all n locations
tgggttactgtgtgaacgggaacgngaggttgcttgtntatgagtacatgccacagggaaatcttggacagcatttgtttgagtggagtgaactcggttactctcctttgacatggaaacagagagtgagcattgctttagacgtggcaagaggtgtggaatatctccatagcttggctcaccaaagcttcatccacagagatttaaagccctctaacatccttctaggagatgacatgagagccaaggttgctgattttggattggtcaagaacgcacctgatggtaaatactctgttgaaacaagattagcaggcacattcggttatctagcaccagaatacgccgctactggaagagtaacgacgaaagtggatgtgtatgcatttggtgtggttctcatggaaatactaactggaagaaaagctttagatgattcattaccagacgagagatctcatctagtcacatggttcagaagaatcctaatcaacaaagaaaacatcccaaaggcactcgaccaaaccttagaagcagacgaggaaaccaattgagagcattttccagagttgctttgctagctggncaatnnacagccggggaccctaacaaaggcccgacatggccacgggtaaacggtccttaggccccttttttggggagtngaanccnttgtnccaagagnngaaggggntttnggatngttttnaccatggnttttcctaaggttttnaagttggaaacggggg

SEQ ID NO: 130655 - DNA, 470 bp, Arabidopsis thaliana
ctctttctcagaaatctctctctttcgcactttctgcaaatggttctcttcttcctttaagctcaatctcgccactggagtctcaatcgggaaagatctccatcttctccggaggaaaaacggatccgtaaatcgtgaatttttaaacagagaagaatcaattcaatggaggaagagaaagcttctgctgcacagagcttaatcgatgtagttaacgagattgctgcgatttctgattatcgtataacagtgaagaagctttgttataatctagcgaggagattaaagctgcttgttcctatgtttgaggaaattagagaaagtaacgaaccgatcagcgaagatacgttgaagactttgatgaatttgaaggaagctatgtgttcagcgaaggattatctcaaattttattttcctatggttgcatgttttatctttttgactggatatgttattattttttcaagata

SEQ ID NO: 130656 - DNA, 810 bp, Arabidopsis thaliana
aattcacttaattctcactcactctctttccttctctactctctgtttctttcttccatggagctcttctcactctcttctcttctcctactctccactctcttcgttttctacatcttcaagtttgttttcaaaagaagaaaccagagaaactgctacatgcttcactacgagtgctacaagggcatggaagagagaaaactcgacaccgagacttgtgctaaggtcgttcaacgaaacaagaacttgggtcttgaagagtacaggtttctccttcgtactatggctagttccgggataggagaggaaacgtacggcccaagaaatgtgcttgaaggtagagaagactctcctactctccttgacgctcactccgaaatggacgagatcatgttcgacactctcgacaagcttttccacaagacaaaaggctcaatctctccttcagacattgatattctcgttgtcaacgtctcactcttcgctccatctccttccctaacctcacgagtcatcaacagatacaagatgagagaagacatcaaatcctacaatctctcgggactagggtgtagcgcgagcgttatatcgatagatatcgtgcaaaggatgttcgaaactcgtgaaaacgctctcgcactcgtggttagcaccgagacaatgggtcctcactggtacctgcggtaaagataggtcaatgatgctctcaaactgtctcttccgtgccggaggatgctctgttctgttaaccaacgcagctaggttcaagaccaggctttgatgtgctcgtgacagtgggtccggctcatg

SEQ ID NO: 130657 - DNA, 428 bp, Arabidopsis thaliana
gacaccttctctaaactcaaattgatgatacatggtgttgatggagtcgcttcgtctgtacggacccgtgattaaaatttcccgagaggcaacacaagatatgaaggtaggacacttggagatcccaaagggcacaagcattatcataccgttactgaagatgcacagagacaaggccatatggggcgaagacgccgaacaattcaatcccttgagattcgaaaacggcatttctcaagccaccattcacccaaacgctctcctcccgttctcaatcggaccaagagcttgcattgccaaaaactttgccatggtcgaagccaagaccgttctcactatgatccttcaacagttccagcttagcctctcccccgagtataagcacacgccagttgatcacttcgatctctttccgcaatacggcctac

SEQ ID NO: 130658 - DNA, 530 bp, Arabidopsis thaliana
aattcgggattccaccccacgccccacgccagctcgatagccgaacctgccgaaactatatctacatgggaaccaagttcaattcccgtaaggaagacgtcattggcgagacgtatctcgggattcaaatatttagattctacttcaagtgcaccaagtgctctgcagagctgactatgaagacggatccacaaaattctgattacattggcgaatctggggcatctcgaaattacgaaccctggcgtgcagaagatgaggaggttgataaggataaacagaaaagagatgctgaggagatgggggacgcgatgaagtccttggagaacagaactttggatttctaaaagagaaatggtccttatagctgcacttgatgaaatgaaatcaatgaagtctagacatgctactgtgagtgtagatgcaatgttggaggccttgcaaagaaccggcgctgagaaggtaaaacgaatagaagaagaagatgaagcagttataaagtcgatatttggtaaagaagttattaggag

SEQ ID NO: 130659 - DNA, 536 bp, Arabidopsis thaliana
aggggaacaaagccggagcctcaccgcgggggggggcgctctaaaactagtggattccccgggctggaagaatttgcgggccggcctcaaaatccgggactttttgggtgagaggggaaaccaccattcggttaacttttttaccagaagctaataccttccttaccggaatcaccttccagaccggcccacccggccgtttttctatttggaaaacccaccggcgatggtcatcactgacctcctgggttccgatgactcctttgcaccggtttccgaggcagggggagaggatatcctaggaggagtaaactacgctcctgcagctgccggaatccgagaggaacctggccgacaatggggagctagattaccattggcagggcaaggtagctaatcatgtaaacactgggtcacaggtggtgaccatactcggagacgagaatgaagctgctaattacctaagtaaatgcatctactcaatcgggttaggcagtaccgactatctcaataactattttatgcctgtttattac

SEQ ID NO: 130660 - DNA, 676 bp, Arabidopsis thaliana
  unsure (1)..(676): unsure at all n locations
aacaatttgaattttcatagaatactcttaaaagcttcactgttttttataactaaattcatttacaactttatataagaaccaaaaaatcagagcgcaacttctacctctatcatcgttggaccctcaaaatttgccagaattccgacgaaaccaatcatcagcagaaatcaaaatttatccaagcacccaaacattgacaatttaacatccttgcnccttttaagcncttgggtagagatggctagagtttgtgtaatgatgatggctatggctatagctatggctatcaacatagctatgggtgatccaatagcaccatgttacttcatattcggtgactctttggttgatagtggaaacaacaatcggctttaccctctctagcaagagctaattacttcccttacggtatcgacttccagtacggtccaaccggtcgcttctccaacggaaaaaccaccgtcgatgtcatcactgagcttcttggtttcgatgactacattacaccgtattccgaagcaaggggagaagatatcctaagaggagtaaactacgcttctgcagctgccggtatccgagtagaaactggtcgtcaattgggagcttgaataacatttgcagggctagatagctattcatgtaaacactgtgtcacaagttgtgaacatactcg

SEQ ID NO: 130661 - DNA, 403 bp, Arabidopsis thaliana
accacgcgtccgaaaccaccgtctatgtcatcagttatcttttaaccaacacccttctttggtggacattctgttctttggtcggaaacatgtaatcaagaaaaagaactaactttatctgttttagctgagcttcttggtttcgatgactacattacaccgtattccgaagcaaggggagaagatatcctaagaggagtaaactacgcttctgcagctgccggaatccgagaagaaactggtcgacaattggtaatttagtccttaaaacagaatacacaattttggtttgatgtcatgagatatcatttagacttcagtttttaaaactaggaaacataaatcttttgtccatttttggttcagggagctagaataacatttgcagggcaagtagctaatc

SEQ ID NO: 130662 - DNA, 547 bp, Arabidopsis thaliana
aaattcatgaattttataagacttgcaaatgagcgaccttaacattacaattgcttaagtgataactctcaaaactttagctcttctctcataacgcttaaccagggacattgataatatacaatgcctaataactaacgatcaacttctcttattttctttatattagtcatcggatgcaatcactacatggcttttggctttcctctcttcctccttcctgaacttgatcccacaagcattgcataaactctgaaacacatttaccaatttaaaaattaataataattattaagcagcataattaatctttaaccatgatttattagttgaacattcggagactaattaccttaggaccaagaggacctcttcgccacataggagtgttaagtgcgttacaattcatgttcgtacacttcttcatcccttcaatcctccccccgcagaatccaccacaaccgcgaatccgcttcggggttgcgttttccttccaagagtttgtcatcaccgtagagttgttacgacgagctctcctagcaggaac

SEQ ID NO: 130663 - DNA, 635 bp, Arabidopsis thaliana
  unsure (1)..(635): unsure at all n locations
aaggngtgtggagcnncngcntctccctcttattcacagaaggtggtgttcgcacctccatcagggactctctcccgaaacgcaatctggcaattcttgtcccggttttggaaagatttgtggcatttcacatgactttgaacatgatccctccggagacacataaagcagtgatgggagtgattgaaccctgcaaatcaccgtagaaagggatcaaaaagggccaattaattcttcattctccaatttctctgtacagcttctgcaatagaaaagaaaaaagaccttggaatgctttggggtgatcactaactctggtgatcgcattgatgtatgatataagattataaggctgctattagtacgttagttctctcttttagagttaaactgtttgtctcggcttaggttttgtttagttgtcctttacagttttactcatacactccattctttttgtagttttcttgactaatcccatatatacaagtttgctctaccactttttttttaaaaaaaaagggcggccgctctagaggatccaagcttacgtacgcgtgcatgcgacgtcatagtctttctatagtgtgtcnnnnnnnnnnnnnnnnnnnnnnnnnnnnnnnnnnnnnnnnnnn

SEQ ID NO: 130664 - DNA, 384 bp, Arabidopsis thaliana
  unsure (1)..(384): unsure at all n locations
catattcattacgggtttctgggtatttcgatatgggaaaagagtggggagagatgctggagagtgctgataagagtcagctgatgaggcttcaagctttctatgaagacatgattggtagagttaaggacaaggtgttgcagagaaggattcaggagattatgaaagattgtcttcagtcttcagcccctaaatactagtatcacttgttgcgtgctaatagcaataccttcacttgagctgacaatagtttcgtcttcaaattctgtgtgttttgtgcaaatgatgagataaaggatttggttttggtgttaaattgtattaattggccaagtattatgtcatttttcctttncatagntttttaatanctggtccataatt

SEQ ID NO: 130665 - DNA, 547 bp, Arabidopsis thaliana
cgtccgaaaagggtttatcatccttgaaaaggagacaaatattgcttcaaagctaaaatcaaacgggcttcgtgtttacgttgaaagatttagcaacgagtgtgtaactcatgcatttgacttttacgatgatccaacgttagagatagactcttttgtccgcgatgtccaaattgatggcatcatcactgacttcccagcaacccctgcaagatacagaaagaacaagtgttacggcgaatttggtctgactacaaccggtgagctcataactttcgcgaatccaatgcttcttccaccagctgaagctccatatccagcactacttgactcagatgtgacggaaccaccattgcctgaagcaagaagtcagcctcctgcttcttctccatcaaaggcagaggaaaaagcaatagaagttccctttgcatttatagccatggctattcttgtgtgcttcttcatttcagtttagtgataagtgtttgtaaccgacttcgactgcagtatctgcaagtgaaccttatgaataacaatgtctagtact

SEQ ID NO: 130666 - DNA, 451 bp, Arabidopsis thaliana
gcagccttttagccaaaaaaaacaaacaagaattcaaaaatggctgaacaacaagatcatcacaaagagcttcagcttttaccttctccaccgtctaccgaatctccggtaaggaaacaccgaccaacagttataacaaccgaccatcacaacaatcaccaccgttcctcctccatgatccaccacgatcttgacctcaaactctccatcagcctcagctcgatctcaacagcggaggagcttccaaacggtggtgtggaggcgttgaagtggcaagccgcggagcagataaggcttgcggctatagagaaggcttacgccgagagggttagagagttgactcgccgtgagatggagatggctcagtctgagtttgctcgtgcaagggtgatgtggcagaaggcaaggggaagaagtggagagagctgagagattgaaggagagatcaatg

SEQ ID NO: 130667 - DNA, 555 bp, Arabidopsis thaliana
aatacgactcactttagggaaagctgctacgcctgcaggtaccggtccggaattcccgggtcgacccacgcgtccgagaagacgacagaagggaaagaaagtggaagagatagaagaatcggtggagaaaggtataaaaaccaacgaagaagcgacggagaccgtatcgattttagtcgacgggctagaagaccgtatcaaaaatatgttgaaacttgtagataatgctatgtgaccatgaagataatgaggcggccacgagaattgtcctaactcagatcagtaagaaagtagagaaattaacaaagaaaatcacggaggttggtgaaagtgtggaagatcatagcaagttgattgcaaaggccagacttcaagttctgcaaaagatcaaccgttaatcttttgtttaacgatgtttgttgttcaaaatccatattttagtatgttttaatcatcccattgtacctttttaaaatattatatgttttgtaatttcaccatccgagagattggttgatatgtacctctatcccgtatattcgtgaaataaagttt

SEQ ID NO: 130668 - DNA, 801 bp, Arabidopsis thaliana
gcagtaccggaccggaattcccggggcgacccacgcgtccgtcttcctccatatgcgtggctcttaaaaacctaattcacaatgtccgtcgttctcaacgccggcttcagttctccgcttcaaaacagatcacatcatgttatacagttaaagccttcgccttttgcgtcatacatatctctaaacagttcaagaaggtcactgttatgcaaaagaagattggttgtatcttgtttggatacaaatgacaattctgtcacaactacatccgtagattcttcttcttcttcagattctaataaaccagtaagtgaatcagttgaatcaagcaatggcactgccaaaaaagcaccattgacagcacgagagagactaagagcggctcgtgttcttagccgatacactgaagcaacaccgaaaccgtcaaaaccttaaatggggagccaacttcttgatgtgctcaaggaaagtgataagaaatcaaagaggaaaccgggtctacccgaagcacccacttacatgcttgatgatagcaggagagggatgccaaagagcggtcttacgtttgatttaccgggaggcttcgatattctcatcattgctttctcctttgggatcattagccccgtcatgtttgctactacttttctttggttggaaacttcgggcgatacacttcaaacgaattgttaaagttgagaatttgggaaaaaaaaatccatcccgtggtttgactaatcgtcctccccccttcttaccaaaaaggggtgggcccgcttttaaagggaatcccagggctta

SEQ ID NO: 130669 - DNA, 759 bp, Arabidopsis thaliana
actataagcaaagctggttcgcctgcaggtaccggtccggaattcccgggtcgacccacgcgtccgctcaacggtatgggaatctattggccttatgttagaaatgtgatggacatgagagcagtctatggaggttttgctgctgcattgaaggatctgaaactgtgggtgatgaatgtagttcctatcgactcacctgatacccttccgattatatacgaacgtggtttgtttggaatctatcatgattggtgtgaatcattcagcacttaccctcggacttacgacctccttcacgctgatcatcttttctcttcactgaaaaagaggtgcaacttggtgggcgtgatggctgaagtagaccggattcttagaccacaaggaactttcatagtaagagatgacatggaaacgataggagaaattgagaagatggtgaaatcgatgaaatggaatgtaagaatgacacattccaaagatggagaaggattgctctctgttcagaagtcatggtggcgtcctacagaggccgagaccattcagtcggcaatagcttgagatcaaggaaacgaagaagagtgtgggttaatatagtcgacagtcgttccttttacgatccaagtgattggttcttacatgtattagtcgaatatttgtatcccttttttgcattgaagaaagttgtatacaaaaaaaaaaaaaaagggcggccgctctagaggatccaagcttacgtacgcgtgcatgcgacgtcatagc

SEQ ID NO: 130670 - DNA, 777 bp, Arabidopsis thaliana
  unsure (1)..(777): unsure at all n locations
attaaggatctgaaactgtgggtgatgaatgtagttcctatcgactcacttgataccctttccgattatatacgaacggtggtttgtttggaatctatcatgattggtgtgaatcattcagcacttaccctcggacttacgacctccttcacgctgatcatcttttctcttcactgaaaaagaggtgcaacttggtgggcgtgatggctgaagtagaccggattcttagaccacaaggaactttcatagtaagagatgacatggaaacgataggagaaattgagaagatggtgaaatcgatgaaatggaatgtaagaatgacacattccaaagatggagaaggattgctctctgttcagaagtcatggtggcgtcctacagaggccgagaccattcagtcggcaatagcttgagatcaaggaaacgaagaagagtgtgggttaatatagtcgacagttgttccttttacgatccaattgattgtttcttacatgtattagtcgaatatttgtatcccttttttgcattgaagaaagttgtatacaagacaaaagtgtaatcttatcgtataatgagcttttgctttggtcctaaacaacccacatagaatccttattcttcttattcaagcccgcatttcctctgtgtaagccccgctgcaatcttcctctgtcaaaaaaaaaaaacaccaaaaaagnnnnnnnnnnnnnnnnnnnnnnnnnnnnnnnnnnnnnnnnnnnnnnnnnnnnnnnnnnnnnnnnnnnnnnnnnnnnnnnc

SEQ ID NO: 130671 - DNA, 1265 bp, Arabidopsis thaliana
  unsure (1)..(1265): unsure at all n locations
caaacttcagaagacaaatgaagagcacccgtccaaacgtgcaaaccttgaacgggctattaagttagctgaggaagaaatgttgaggacaaagctcgaagcaaccacaaaggcgaaggaactgctagaggctcatggttcgtggcttcccccttggcttgctgttcactggtttaaatttcagacttataccgagacacattgggaggcccatgggaaacctgctgtggagacagtaattctaaaggtgacggaagcaaaagctcaagctgaaaagtgggctgaaccacatgtcgaaaacgttaaaactaaatatattccagccatcaagggaaccgttactatacatgttgagccacacttccgaacactatccatcaaagctaaagaggcttaccattcatcaaagagtgctgtttcccctcacattgtcacggttcaagaatttgtagacccctgttatcaggaggccaaaaagttcagcaagccatatgtcgaccaagtggccacgaccacgaaaccacatgttgataaaatgaaggttgccatgaaaccttacacaaccaaggtgatcatcgtctatacagagttccttgaatccgccacaacttatcacaatcaggtccaagcccatgttgaacgaaaactgaaaagccatgagctgacggagccttttgctaccaatgagtttgtttggtttgcggcctctgcattgttggtatttcccatcttcgttgcttacagagtgctctcttctctcttctgcacaaagacaaagaaacctgttaaacaccctcatcaccatggtcgtcgtaaggccaaaagggctcacactgacaagtgatattcattgttccacgctctcaaaatagtcgaggtcacgaggttaaaacgccattgttgttggactgttctaaagtcagctagctcaccggacaggttgcttgttgaatgaagggaaagtctcgagttggtgtctgatgggtttttagaggctcgttgtgcacaagtgttgacttctttcctttattattttgtattgttttggacaatttatttcagcatttttacacagaagattagacattactagagaaattctagcaaaagcttggttgtattttagtgtatttttctattttacgtggatatatattgcgatatctttaatttcataaaaactcttcaaagtgcaactnnnnnnnnnnnnnnnnnnnnnnnnnnnnnnnnnnnnnnnnnnnnnnnnnnnnnnnnnnnnnnnnnnn

SEQ ID NO: 130672 - DNA, 405 bp, Arabidopsis thaliana
cccttttctctctctctcgaagatatcgcctttaattccttcttcttcttctgatttcttcaaagattcatttcttagagatctcagcttctgtaagagtaggctagctaccaaaaaaaaagaaatagaaaaaaacattgatgcttaatcagcagttcttggtgtttgagacacatgtctccaataatactcagtgagatctttctctctgggtttatgttaaattccacaatcaggcgcaggacccatcttgttcaatctttctctgttgtcttcctttactggctttactatgtctcatgatctctgaacttatctccagttttatatctatacgcataattacaacaaaaccctagtttcttttcaaatttctcttcttcgtttttcgtcatctgggtcctg

SEQ ID NO: 130673 - DNA, 512 bp, Arabidopsis thaliana
atttttcattcccttgttccggcgataacagtctcagtggcgacaaaccctattgccgagccggctcgcattttcctctagctatcgcaacgcctctcgctctctctccccaccggtttacataaagatggaaagtagcttgtatgatgagtttggtaactatgttggacctgagattgagtctgacagagatagtgatgatgaagtagaagatgaagatctccaagataagcatcttgaagaaaatggttccgatggcgaacaagggcctgggggttctaatggctggattaccactatcaatgatgttgagatggagaaccaaattgctcttcctgaggataagaagtactaccctactgctgaggaggtttatggtgaggatgatgagaccttggttatggatgaagatgagcagcctcttgagcaacccattatcaaacctgttaaagatattagatttgtggtgggggtcaaagatcacgcaacgtatgtgacaacacatgttttta

SEQ ID NO: 130674 - DNA, 527 bp, Arabidopsis thaliana
cttgcatttcactttaacaaaacctcaagttagagttgtgagtgttcagagttcagatcgattgaaactctcagttgctactcaacagaaattggacttttggtttgttgagatgtattgtttgaagttgctttgttccactagtgtaaaataacattctcttctctgcatctttagacttatcaaggaatcaaacccattttatcagtgcaggtgacgtggatatatgaagcagatgttttggggaaccagagttctgtaaatagaaaccttcacgcgacgttgaaaggtttttgagacgaatataggaggagaagatgggatgtgtttcttcttgcttccgggtcgaggacattgatgagtacatgaatccaaacagctctgtctataggaactgtccctgcataagatgccttgctcataatttccttaacctgtatatttcggtcttcagaagaggggaaactcgctctctcccatcttcggttcaagctactgcatcgataacttcctcttcttcacacgat

SEQ ID NO: 130675 - DNA, 606 bp, Arabidopsis thaliana
  unsure (1)..(606): unsure at all n locations
atcaaagctgccactaaaaactttgatgagtcccgggtgcttggtgttggtggtttgggcaaggtttacagaggagagattgatggcggaactacaaaggtagccatcaagagaggcaacccaatgtccgagcaaggtgtacatgagttccagactgagattgaaatgctttcaaagcttagacatcgtcatcttgtgtccttgattggatactgtgaagagaactgcgaaatgatcttagtctatgattacatggctcatggtacaatgagggagcatctctacaaaacccagaatccttctcttccatggaagcaacgtcttgagatatgcattggagcagcccgaggtttacactatctacacactggtgcaaaacacacaatcatccatagagatgtgaagacaacaaacattctattggatgagaaatgggtggccaaggtctctnattttggtctatcgaagactggtcctacactagnccacacacacgtaagcacagttntgaaaggaagtttcgggttatcttgacccngagtattttcagacgggcagcaacttgncttnngaatccggtngtntnnctcctttggnggttgttct

SEQ ID NO: 130676 - DNA, 732 bp, Arabidopsis thaliana
  unsure (1)..(732): unsure at all n locations
cgggggggcccagggcgcccgaaaaaaacagggtttctctgatattttgttttgggaggctgcaactggcaaaaacagggaagagcttttcgcagctaatgtttttatgctcaagggcaatgttgtatcgacaccaacaattgcaggaactattttgcccggagtcactcgaaactgcgtaatggaattgtgtcgtgatttcggctaccaggtcgaggaacgtacgattcctctagtggactttctcgatgcggacgaagctttctgtactggcactgcttccattgtgactagtattgcatccgtaacctttaaagacaaaaagaccggattcaaaacaggggaagaaacattggctgcgaagctatacgagacgttaagtgatatccagacgggtcgggtcgaggataccaagggatggacggtggagattgaccgccagggctgaaagttgaaactgtaacttgatgctaaatatgtgtgtgtgtgtatacaaaacttatgtaagaaacatctgaagatgtctctgatctttgtgattgtgatgatcatgcatgtcctatcgttgcgatgtattttataaatgttcgtctgtaagttatttaataactatggctttttgctttatccaaaaaaaaaaaaaaaaaaaaaaaaaaaannnnnnnnnnnnnnnnnnnnnnnnnnnnnnnnnnnnnnnnnnnnnnnnnnnnnnnnnnnnnnnnncgtcctaaa

SEQ ID NO: 130677 - DNA, 708 bp, Arabidopsis thaliana
  unsure (1)..(708): unsure at all n locations
ttttattatctctctctttctgcgtgttccaatttcttccacaaaaccctaggtttgtgttaaaccctgaaattcgtgtaacctttcaacaatctcttcaattttgttttcgattctgaatccattgtttacgaatctctcatctaaagctacattcttcgttaaatcgtttttaatcgactcgctcactcgtgagttgactcgtcagctgtttccataattgcttattgaatttttatacgatgatgtttcaatatggaagaaactagaggaatttctgatccagagaatgggagttcgagttacggcggtaaaccgccgaatccactctccttctcttcttcctccgccgctgctgccgtttacaggcaaaccttcgacggcgagcgatcgttggcgccgtgtaataagaggtcactggttcgacactcatctctcgtgaagacaatggtgtcagatatatctgttgagaatgagtttactatagagaagaacaagtctgagtttgttcctgctacgcgttctggagcttggtctgatattggctccaggtcaagcatggaagatgcttatctatgcgttgataatttcatggatagctttggccttctgaattttagggtggnccaagtgccttctaatgggggatttaatggccatnggtgggaanaatccncctgggtttnnantgnccccatntncccgggg

SEQ ID NO: 130678 - DNA, 697 bp, Arabidopsis thaliana
aaataaccgctcactaaaggtagcgcaagctggagctgcgccgcggtggcggacgctctagaactagcggatcccccttgctgcttgacttcgcggccgcctttaccgttctgtctaaattgaagaatttttttatcacaaatcctcagatttcttgatctccagatcccccgaatcaatggtctctcatcgcatggaagattcaggaaaaaaaatcagagtttctcttctttggaaaggaaacacatactctgttgagatcgattctggagcttctctgaaagatttacgttacgaattgagaaagttaaccggcgtttcatcggagacgcttcgtttgatcgttccaagggtgaatgaaatacgatcaagcttgatgttacccttttctgatgaacactcgagcttgagtttgcaggaatcaaacatcattgaggatgaaactatcagaatgatgggagtgtctgaagaagaggtcgaaggtgtcctaaaagaggcagtgtctgacatgaggattctttgctttgaggaagatgaaagaacgcctcctcaaaaaaagtcgcatgtttcgcgcgccttcctttaagctttccgcaaggggacttaccattcttctgggggatttttccgccacttttttcagacttccccgggttgttaggagtttaaaaccccttcccgccctttctggcttggc

SEQ ID NO: 130679 - DNA, 639 bp, Arabidopsis thaliana
  unsure (1)..(639): unsure at all n locations
acggacgcgtgggcttcagcttcgaccattttcgtcttcttcattcagtgttgagtccgcgtttacctgtgagctcgaagaaagtgacgatcaatgggaaccctaggcagagcattttactcggtcggtttttggatccgtgagactggtcaagctcttgatcgcctcggttgtcgccttcaaggcaaaaattacttccgagaacaactgtcaaggcatcggacactgatgaatgtatttgataaggctccgattgtggacaaggaagcttttgtggcaccaagcgcctcagttattggggacgttcacattggaagaggatcgtccatttggtatggatgcgtattacgaggcgatgtgaacaccgtaagtgttgggtcaggaactaatattcaggacaactcacttgtgcatgtagcaaaatcaaacttaagcgggaaggtgcacccaaccataattggagacaatgtaaccattggtcatagtgctgttttacatggatgtactgttgaggatgagacctttattgggatgggtgcgacacttcttgatggggtcgttgttgaaaagcatgggatggttgctgctggtgcgctttgtacgncaaaacaccagaattccttctggagaggtatnggg

SEQ ID NO: 130680 - DNA, 462 bp, Arabidopsis thaliana
  unsure (1)..(462): unsure at all n locations
cgggggggttgggtttcttctcccttcctacatcctctctcttctctttctctacactttcatctaatggccggcctgagatggagagagtggtggaacacgatggccttccccacccggcgtatctggaatcgtttcaccgttcgcgtcgggtttcgacacagcggacttttgaggttagaacatgacgtgagttcttgcgagtatgaagacatacacataatgtggaatttgttacacaagaatgaagatcttacacgcgtaccaatccaacaacaacaacaacagaggaagaaaccttgttggaatcttcttggttcgtatctttgccaaagattctgatccgttttatgatataaaccaaaccattgttgtatttgagagagccttgacggggtcccttgcagtgtggtgtggtttttttnncaatttcgnaantaannnatccggggttnngggttt

SEQ ID NO: 130681 - DNA, 585 bp, Arabidopsis thaliana
  unsure (1)..(585): unsure at all n locations
acacttcaaccccagagaatttctagttgcttgcgaaatgcagaagtgaagtgtgtaaggagcttggaataccggaggagcaatgtgagctatctatgggaatgtctggtgactttgaactagcaattgaactgggaagcacaaatgtgagaataggatctactattttcggggcgagagagtatcctaagaagtaatgatgtaaactactgagtgatgagattgattctaagtttgaacatcaaaaccagtttcagggaagaataagagcttaggttttaatgttgaaatcatgtagatcttctctcttcttttgttttgcattgtatttggtgatgttgcttgtaagttgtaaccaaggtacattattactatttttctaatttcatggatataaacacatgaaagaagaatatagaatcttgtctttgctacgttactagtgagaagtagttaaaagggtgtcacaaccacttgttactattcaaaaaaaaaaaaaaaaaaaagnnnnnnnnnnnnnnnnnnnnnnnnnnnnnnnnnnnnnnnnnnnnnnnnnnnnnnnnnnnnnnnnnnnnnnnnnnnnnn

SEQ ID NO: 130682 - DNA, 525 bp, Arabidopsis thaliana
  unsure (1)..(525): unsure at all n locations
atttttataagatatcttcacatacacaaaaacatttattgtacagtgcacaagtgatcgaatatttgattctttttcatgatcagagatctgatctaaatggagtatgaccgtacgttgaacttgattccatacggactacaaggagtaagagaggaggaagaaatcgaagaagacgatgaagagagcatgacgttgtcgtcagtaccagaaaacgaaacgtcggagtgttcttcgcctccggcgacgtatcctccaatccctcctcggcctaaaacaccgagagagccgatggagtttctatgcagatcatggagtccttctacttctgagatctctttagctttatcatctcagaaatctgataaacaactcaacaaaaaccctaatatttttcagtttggccgattgtcacctttctcttgggctcccgttagcaccacccaccggcgcttaacaaacgggaaacgctagcgagtgcgggttcacgcgcngaagancggggaccgtttcggaaanttggtt

SEQ ID NO: 130683 - DNA, 449 bp, Arabidopsis thaliana
gaaatgctccgcctgcttcattcggtttggactcttctctatacttgtcgtctcctatcatcgcaattcatcttcccccgtctggtgtgttaaaccggagaaatttggagtttcgccggaatcttcctctgtctattgcataattgcctctgtctctgatcaaaagttgatcgtacttggattcccgatctcttccttctagattaggtcctggaatcggcttcttaggtgctcctcgctttcactgcccccgatctcttccttctcaattagggcaagaacgagcggacgtcagagaatcaattacgattctgagatgatgaactcgaggattacatggatcatcatcaagcgaacaggtatgaaaagatgggaacgatgaatgattttggtttctcgaagaagaaggacgtgagaatagagcgtattttgatttgtcatgaatgaag

SEQ ID NO: 130684 - DNA, 716 bp, Arabidopsis thaliana
agaacaagcagaggaatataactttttttttctttttcctttttgcttttttacaaccaaaaaaataaagcaagccgtagagagcaagagacggtgtaaagatgcactacacacgcatctcgccggctttagtaccatctctatcaccaaccgccgcggctgaatctagcggtggtgggacgatgatagctactgttttcatggcccttctcctcccctgcgtcggcatgtgcatcgtcttcctaatctatctattcctcttgtggtgctccacacggcgtcgtatcgaacgccttcgatttgctgaaccggttaaaccggtcacaggtaaaggcctttcggtgttggagctcgagaaaatccctaaactcaccggaagagagctagccgtaatagctagatcaacggaatgtggctggtttgccttgaagatatagagagtgggcaatcgactcggctagttcccggttgcaaccatggggttcaccaattatgggctgatacggggcgatctaaccacacggtttgtccagtttcccgggccgagcgggccccgcacctacctcaatgtaatgaaaatcaaagtccatgttagaaacagaattttcaaaaacattctttccttcttttttactcgttttgtgtacttctcttgtttttcccttttcttagttttgtgtaagcgttatagagaaaaaagtttccaggttgtaact

SEQ ID NO: 130685 - DNA, 572 bp, Arabidopsis thaliana
  unsure (1)..(572): unsure at all n locations
gaaaagagagagagagatctctggctctgtatcgctcgctgctcttcctcccacagatcgaaaaccatgaatcctgagtacgactatcttttcaagctcctgcttatcggggattctggcgtaggcaagtcttgtcttcttttgagattctctgatgattcttatgtagaaagttacattagcactattggagtcgattttaaaattaggactgtggaacaagatggcaaaacaattaagctccaaatttgggacactgctggtcaagaacggttcaggactattactagcagttactaccgtggggcacatggaattattattgtctacgatgtcacagatgaagaaagcttcaataatgtcaagcaatggttgagtgaaattgatcgttatgctagtgacaatgtcaacaaactccttgttgggaacaagtctgatcttactgaaaacagagccattccttatgaaactgccaaggcttttgccgatgaaatcggggttcccttttatgggggctaggtgcaaaagatgcttcaaaacggtngnccagggtttcatnggcaatgtntnna

SEQ ID NO: 130686 - DNA, 611 bp, Arabidopsis thaliana
actggatgcttgctttattctgtggattttctatcattggcaagaacacttgagaaacttcagattaagagaaacatggccaagcttgagctttataggaacttcaccaatgcactcgctatctctgttctgctctctatcgcttggattggttttgagctatacttcaacggaactgaccctctaatcgaactctggcgaatggcgtggatcattccagctttttggaatttactctcttatggtctgttagcagtcatatgcatcctttgggctccatcaaataatcctacaaggtactcatacttagcggaaacaggggatgagtttgaagaggaaggtatctcattgacaggtagtggaattaagagtacagaagatgttgaaaggaatgaacttctatttgggcttccagacgacgttgaagagggcaaacgtgagtaagctccagatagcaagcgttagatagtccatacctcgccgagtagtttttagtgtatgtaaccttatgtcttttatcctttgtacctgagtaagttgtttactgacctttaaggacttgtttaccagatcgaagttcttttagtcttatagaaagatttacagactgc

SEQ ID NO: 130687 - DNA, 482 bp, Arabidopsis thaliana
tcgacccacgcgccacgcataccgagtgaggttcacattaccgacaaaatggggccggctttatcatcctcctctctgtttttctcttccaagacaacttctccgatcagcaatctcctgatcccgccatctctccaccgcttctctctaccctcttcatcttcctccttttcctctctctcttcttcttcttcttcttcttcttctctcttgacattctctctgaggacttctcgaaggttatctcctcaaaaatttaccgttaaggccagctccgtcggtgagaagaagaatgtacttatagtcaacaccaacagtggcggtcacgccgtgatcgggttttacttcgccaaagagcttctctccgccggccacgccgtcaccatcttgaccgtcggcgatgaatcttccgaaaagatgaagaaacctcctttcaaccgattctccgaaattgttagcggcggaggaaagacggtgtgggg

SEQ ID NO: 130688 - DNA, 513 bp, Arabidopsis thaliana
ggagtcagatacagttccctagatcgagaatctccaggcgctttgtaatacctgtttagtatatctttgtcaagttctctgtcagagatttaccgggaatcgatcagaagatatgaactgggttcaacgcaaaatctacctttataatgtcacattcgggctctacatgcttgattggtgggaacgatacctcttcaattctttggtggttgttttgatgtggttcgttttatacaacgggactcgctacttttcggagcttttccagaggcatttgacatgaaaacatgtcttgttcctcgcacagtagagcacgaaaagcctagatcatccaaaggcatgttcgtttggttccaatttctgagacgtataccatcataaatccctctttcggcgtcacctttgtttttgtcaattttcctccaacggctctaggacagcgcctatgtctctatagtatttgttcccatgtgtttgcgattaacagaaaatgttttggagactcgtaagatc

SEQ ID NO: 130689 - DNA, 563 bp, Arabidopsis thaliana
  unsure (1)..(563): unsure at all n locations
ccgatcgtcggaaatctctgatctctctcaggatcgcttgttcgctacgcagatctcacctgccatgactcgaggaagtcaaagagagcgtgaccgtgaaagggctctagctcgaaccggaggcaaaggaaagaacaaagatgatggattaactcctgagcaacgtcgtgaaagagatgcaaaagcattgcaagagaagactgcaaagaaagctgctcaagccgctgctgcagctagttccggaggaggaggaggcaaaggaaacaataagtgagaaaaaatgatctatgcttcgatgtttgtaactgtgcttttgaatatgaaagtttggtgtttgtgttgagaatgttttggcttcgtttggtttgagtttgtatcaaaacttagacttggtgatgtactttgattaaaccaatgattactcttacaatatctatgattacaagtacatttggccaaannnnnnnnnnnnnnnnnnnnnnnnnnnnnnnnnnnnnnnnnnnnnnnnnnnnnnnnnnnnnnnnnnnnnnnnnnnnnnnnnnnnnnnnnnnnnnnnnnnnnnn

SEQ ID NO: 130690 - DNA, 857 bp, Arabidopsis thaliana
  unsure (1)..(857): unsure at all n locations
taggaacactatagaagagctatgacgtcgcatcgcacgcgtacgtaagctcggaattcggctcgagctttgacaaaaccagggaaagagacagagagagataatggcggctaaactaatctgttcgtctttaacagtgcattcaatggcaaataagaagccatcaccttctgctgcaacaagaacaataacctcaaagaagagcacagcgactccacaggtgaaactgctgacaagagtcgagcagctcaagcttctgaccaaagccgagaaagcaggacttttgtctttagcagagaaatcaggtttctctctatcgaccatcgagcgtcttggattgctgaccaaagcagaggagttcggcgttttgtctgccgccacaaacccggaaacgcctggaacgttattcactttgagcctcggtttactccttcttggaccggtttttgcatatgtggttcctgaagattacacttgggaagtagtgattcaggttcttgtggctctactctctgttcttggtggctctgctgcttttgctgcttctggttttgtctccaatttgcagaaatctgattagcccgatcgtttttttttttgtatcaaatatatttacccggtgtagcaagagacttttctgcatttaagatgaaaactttataatgtatttgatctacattgtatcaaccagtcattttcactattttctatctatgtaaatggtttcatatacagaaaaaaaaaaaaaaaggnnnnnnnnnnnnnnnnnnnnnnnnnnnnnnnnnnnnnnnnnnnnnnnnnnnnnnnnnnnnnnnnnnnnnnnnnnnnnnnnnnnnnnnnnngtagnnnnnaaatca

SEQ ID NO: 130691 - DNA, 561 bp, Arabidopsis thaliana
  unsure (1)..(561): unsure at all n locations
atcgagagatgttgagatctaatcctaataattcgcttctcctnatgaattacggcaagtttttgtatgaggtggagaaagatgcagagggagctgaagagtactatggaagagcaatactggagaatccaggagatggagaagctttatccatgtatggaagattgatatgggaaacgaagagagatgagaagagagctcaaggttactttgatcaagctgttaatgcttctcctaatgattgtatggttttgggatcatatgcacgtttcatgtgggaggcagaggatgatgatgatgatgatgaagaagaagaagaagaagaatggatggctgcatcaccactcatggtttctgcagtttagagactaacccgacgaagatgaagaagaagtaatggagactaagattatgtatcaagtatcacccttttttttttgtctatttcactgtctttttactaacttttgttgttataacctgaagtgttttgaatacatgtttgttgaaagtaaacgtatgttacctttttataagagaattatagtgcttctgtttttt

SEQ ID NO: 130692 - DNA, 571 bp, Arabidopsis thaliana
tttgattcaatcactcaccggagaagaagaagaagctatgccggtggtcaaagctccgctcggtggctactctgggaaattcagtccattctacgagtcacgcctcgccgtcgctacagctcagaacttcggaattctcggaaacggccgaatccatgtcctcgagctcgctcctggagctccaggcgtaactgaatccgtctcgtacgatacagccgacgctgtatacgacgtatgttggtcagaatctcatgactctgtgctcatcgccgcaattggtgacggctcagtgaagatttacgacacagctcttcctcctccttctaatccgattagatcattccaagagcacgcgcgtgaggttcaatctgtggattacaatcccacgcggcgcgattcgtttctcacttcttcgtgggatgatacggttaagctttgggctatggatcgtccggcgagtgtaaggacttttaaggaacatgcttattgccgttatcaagcagtctggaattctatacatggtgatgcgtgggcttcagctgatggatgattgtacattaaggacttgggg

SEQ ID NO: 130693 - DNA, 537 bp, Arabidopsis thaliana
  unsure (1)..(537): unsure at all n locations
aangaatggtgacaacaatttcttttatttctttcaaaatttttgcattggaacactttattttacagtcaaaggtttatgaagttctatgatctttctcaatgtagacaaagcaatgacagcttctgagaaataacattgccgtaatatataatgcaaacgtttattgtaatagtaaagctcataagcagaggcaaaacaatctgtgatcattttaacatatcccactactaatttcagtaggtaaatagttcagagtaaagtgtctttaaaaggattcttaacgtgtctctcaagcagccaaactcttggggggcaatctcaaggacattctcagacagcccattagcagacattatcatttccaattgtgccttggctaggaccttgacgggtttcatcgtaccgcttccacctcgaaaaggcagacaccatacgagaagcaacctgagggttcaatttgtctaactggacaacaatgtcacccaagaacttgtaacctgatccatccttggcatggaaattcactggggaacc

SEQ ID NO: 130694 - DNA, 570 bp, Arabidopsis thaliana
  unsure (1)..(570): unsure at all n locations
ttncccattcaatttcttgcccanatcggtgccccntncgtgcccgttnatccccgggcnnttccagaaanttccgggngccccccccatttcccccgggccaagtccgccaaaaggagccaatccccggcggaattccatgcccgagaaagtttccgacatgctcaaggaagcatggaacaaattcaactcaggggacctctttggaaaaaacccctgagataatgtttttggaggagtgtgttgttccgtcttcttagcgcggaaagatgaagcatgtggcattccattcggaaagcccaaaaatggtgccccaagttggaagcagagagttgtccgatagagtatgtattcccccagactgattacccatcactgcatcatcatataccacgcagcaactgggcattcttttttttgttgctaatttttccttctcattaccctcttcttcaagagtatgatgtcaaatgtattgatgttgaattctgtatcaaaaaaacacaatacttgagagctgtgtattcttgtttccaaactatttatatatgcatatatgaacattctttt

SEQ ID NO: 130695 - DNA, 799 bp, Arabidopsis thaliana
  unsure (1)..(799): unsure at all n locations
gagaacttgagaaaggcctcttcagcaacaaacattgttgatgatctcagttgcgaatatttggggcctcccaatctggtgggtttcaagatgttgatggagaaactgaagagagacgacgtgccaggctggaacgtcaccagaggacacaggagcgggctgcaaaagcacttgctgagaaaaatgaacgtgatcttcaagtacaaagagaacaagctgagaaagataggattgggtgggaccctggatgttgagatacgacggtggggtgcagggaaggagggaaacttgcgtgctctgctttcaacattacaatatgttctttggccagaatgcggttggcagcctgtatcgttgaccgatttaattaccggtgcatctgtcaagaaagtttacaggaaggccactctctgtatacatcctgacaaagttcagcaaaaaggagccaatctccagcagaaatacattgccgagaaagttttcgncatgctcaaggaagcatgggacaaattcaactcagagggactctttttgaaaaaacctgagntaatggttttttgagagtgtgtttgttcggcctctnggggggaaagnatgaaggcatttgggcattcanttcggaaaggccaaaaattgggtgccccaagntttggaaggcagaaaagtttntcgntaaggggtattntnttnccccaggcttgtttaccccntcanttngaatcattcatnttnccccggnggaacttgggaatnttttttttttgtngnaaaattttccctcccaattnccccctttttt

SEQ ID NO: 130696 - DNA, 480 bp, Arabidopsis thaliana
  unsure (1)..(480): unsure at all n locations
tggaggttgcaggtcactgtgtgcggcagtggatcttgctgcatcaggtataaacatgaccaaagtggaagagattcagactctgaacgattactgcaaaccattgcttgagtttctgagctcgcttggctcagatgacggtaaggtgattgtggttgctcatagcatgggaggaatatccgctgcacttgctgctgacagcttcgcttgtaagattgccgctattgtctttttgacagctttcatgcccgacacaataaacccacctgcttatgtttacggaaagctgctcagaagcattccacaagaggaatggttggacaccacgtgtgtgaacctccggggaacctgattttcccctacagtatacctctttttgggaccaaagtttttggccaagaaaatgtatcaaaactctccagttcaaggtcttgaagtggtgagcattagtgagggaaacccgtngtncaancaatctgg

SEQ ID NO: 130697 - DNA, 531 bp, Arabidopsis thaliana
cgaagatattatttttcatggattgagcaatgaagaggacgataatttcgaaaagatcgcgatacaatggacaagttctcgtacaattcgtatccagattcagctgaatcgtcgccaagatctcgcgatgtcgaatttgaaaatccgtcgccatgggaggaccagcagcagcagaactacaaggtgaagctcatgtgcagctatggcggcaagatccagcctcgtccacacgataaccagcttacttatgtaaacggcgataccaaaatcatgtcggtcgatcgtggtatcagatttccggctttagtatcgaagctctccgccgtctgcagcggtggtggtgatggaggagaaatctcgttcaagtatcagcttccaggtgaagatctagatgcgtttgatttcggtgacctaatgattgaggatctggagcacatgatgcatgagtacgatcggttgcttcgtttgtctactaaaccagctaggatgcgtttgtttctcttcccgtcttctcccatttccggcggattt

SEQ ID NO: 130698 - DNA, 670 bp, Arabidopsis thaliana
tgaacaaggtggccataatgtacctgtggccgctggtgcaggtgacaccaacatgtgcggaggcattgtgcagatgttttgggataaaatattaggtagatgcttggactttgatgatcaaattcgccagacctctctcaagatagtggaagttgtactacgtcaaggcctagtgcatcctattacgtgtgttccttatttgattgccctcgagacagatcctcaagaggccaaccaaatgctggcccatcatttactaatgaatatgcatgagaagtatccggctttttttgagagccgtcttggtgacggacttcaaatgtcctttatcttcatgcaatccatcagccaggtcacttcagaaccaaatcaaagtcttcagcaaaagggttcaacaaacatgttgggcaaaaatgatcatgctagtagtactctcacccaagctagacttggagtctctaggatctacaagcttatccgtggaaaccgggtttctcgaaacaaatttatgacttcgattgttcgcaagtttgataatccaacctggaatggctcagtaatatcgtttctgaagtattgcactgaaacccttgcttactttcattcacattaccttgtgaaccactctattttgatattccataaaccgagttattcatatttcgtctgt

SEQ ID NO: 130699 - DNA, 597 bp, Arabidopsis thaliana
  unsure (1)..(597): unsure at all n locations
aaaaaaaaacgaggcgtaacaggaaggataagaagcaggggtccatcatcaaatacggcagtgtagcaattgcgttttcgactttatagagatattttcatagagatggtctcgaagctaacaagttgacaaatttcttcgttataagagagatagatgagttgcaggagagtgctgaagtcgatacaagccttggcggctcatagtttactcttctgtttcacgcttttattggtgcttaaactcgatcacaccgtctcttcctcatggtggatggtgtttttcccgctgtgggcttttcatgcagttgttgcaaggggcagattctctcttcctgctcctgttgctccacgtaaccgtcattgggctccttgccatgctgttgtcgcgacaccgttacttgtagcatttgaattactcctcctgtatataacctcgagagtcttatgctncgttggccaccagctgtcaagtttgaagnattgctttcttaaccattgttggngttttgaataanaaaancttggaggcaatttgngaannttncggncatttatccagggggcngnggcaagaaaacctnatttnnaantnngc

SEQ ID NO: 130700 - DNA, 479 bp, Arabidopsis thaliana
atctagagagctagagaaatattcagtggtcggagaatggcgtctctcaaaattccagcatatattcctcttcccgaagaagactccgagcagctccacaaggcattcaaaggatggggaactaatgaagggatgatcatatcaattttggctcatagaaacgcaacgcaacgcagtttcattcgtgccgtttatgctgctaactacaataaggatcttctcaaggaattagacggagagctttctggtgactttgagagagttgtgatgttgtggactcttgatccaacggagagagatgcgtatttggccaatgaatctaccaaattgttcaccaaaaacatttgggtcctagttgaaatcgcttgtactagaccttctcttgagtttttcaagaccaagcaagcataccatgttcgctacaagacctctctcgaggaagatgttgcataccatacatctggaaatatccgaaagct

SEQ ID NO: 130701 - DNA, 563 bp, Arabidopsis thaliana
ctgtctaacaatacactaccacacactttcacgctctcttctctcacacctttcttcttcctcaccaaaattcttctctctatgttcttcttcatcttctagctctctcatctcttcttctcgccatagcttcaccttccttctcaagctgtacagttaaagcttaagattaattttcgttaattttaaattcgaagaaaagatgaatcactttgcggttcaaccaaacgcgttcgctgctggcggagatttgagaagcagctccgtttcagttgttgaaagagatcaaaccaccgtcgtttgtccaaaaccacgtcgtattggtctccgtaacaaccatcaccatccttctcgatctctccgttgttacttcagtcatcaattggagctttgtgaatccaaagcagagactgatatcttagatatcatactcaccaaggatggttatggtgcagaacaagttaataagcaggtaatagactcgccgtccccgtttttatgtgggtcgccgccgggcaggggcgcccccccattaacacaggatgctcgatttcgagatgaga

SEQ ID NO: 130702 - DNA, 436 bp, Arabidopsis thaliana
ctcaaagtcaactccggatctcaagtgaaagactcatcccgaattgcacctgatgctactccctcatccccatcgtcgtctctgtctttattcaaaggagtgttaccgaggtattttcagctcggagtggtcggtggctcagttcaggttggttgaaggaactcagtacattagccccctttggccatcaaaagaacaccgttgttattcttggcatggatgggagcttctacagatgccagtttgatccggtgaacggcggtgaaatgtctcagcttgagtaccacaactgtctgaaaccgccttcagttttctaaaagctttactacttatactcttttggtccttctctctctttatatctctctgcaacttaagcggtgagatatggtgtatagttttgtgtatataataatgatgggtcgtcctataattt

SEQ ID NO: 130703 - DNA, 751 bp, Arabidopsis thaliana
gtccaaaccttttcctaagcaagaggaccctgtcacctcgagttttggagagtcaaatagatgccaaaaaggaactggaaaaatgtcttaagacaacttgtgaggagttcatcatgtcagtaactaagctagttgtggatcctatgctttcatttgtgacgaaggtcacagccataaaagttgctctttcctccggaactcagaatcacaaagttgattctgtcatggctaagccgctgaaggaacaagctttcgcgacaccagataaggtggttgaacttgttcaaaaggtatacgctgcgatacaacaagagttgcttccgattttagcaaaaatgaaactctatttgcaaaacccatcaacaagggcccttacttttcaagccgatcaagacaaatatagtggaagctcatacgcaagtggagtctttgctcaaagctgagtactcagctgaagaacaagccaatattaatatgatctccattcaggatttgcaaacccaactcgacaatttcctttaaggtcatggctcaatcgatgtttttgtgatgtccgtacttcctctggttatatcttatataatgactttgattcttttgactccttttagctactttacaagagttcgctttagaagaatacatattattttgtatccaagaactcatacatcttggtctctctacattcggccgccccgcggtcaaaaagtgtagatcatatgctaatataagactagctatcaagttc

SEQ ID NO: 130704 - DNA, 497 bp, Arabidopsis thaliana
cttagggctaagagtttagagaaaggttgggacttgaatttgggtgaaatggctaggatttggaaaggtgggtgtattatcagggcggttttcttggacaggatcaagaaagcttaccagagaaacccgaatttggcgagcttagtggttgatcctgattttgctaaagagatggttcagaggcaagctgccatggaggcgagtggtgggtcttgctatatctgcctgggattagcacaccaggaatgtgcgcaagtttagcgtatttcgacacttacaggcgtgctagattacctgcgaatctggttcaggcgcagagagatctctttggagctcatacatatgagagaaccgatcgtcctggtgcataccacactgaatggactaagcttgcaaggaagagtcagtaaagcatggacacagtcccttgatttgagggctttatttcatcatagaacacgaaaacaaattgtttcagcttatttttgttgagttat

SEQ ID NO: 130705 - DNA, 429 bp, Arabidopsis thaliana
  unsure (1)..(429): unsure at all n locations
cttccgaagagattgtntccgccggcgaatcatcagagatcgaggaagcggttgcaagtctaaccatgtnttctaacaagatttttttgacgagttccgatggcgagtctttcgagatcgacgaagcggtggcgcgtaagtttctgatcatagtgcacatgatggaggataactgcgccggtgaagcaattccgcttgaaaatgtcaccggggatatcctctccaagataatcgagtacgcgaagatgcacgtcaatgaacctagtgaagaagacgaagacgaggaggcgaagaagaatctagactcgtggggacgctaagttcatggaaaagctagatctngagacccatcttcaaaatcattctcggtgccaactaccctaaanttcgaaggacttcttcggnttcnctagccanaccggtttcctg

SEQ ID NO: 130706 - DNA, 553 bp, Arabidopsis thaliana
gctggtacgcctgcaggtaccggtccgtttttcccgggtcgacccacgcgtccgtacggctgcgagaagacgacagaagggtacggattacggtacctttagaaagagaagcttccatatatcacagccatggtggttgtcactcacatctccacttccttccaccaaatctctccttccttcttccatctccgtcttcgtaatccctccaccacttcttcgtctcgtcccaaactcgacggtggtttcgctttgtcaattcgagcttacatagagaaaccaaactctttctccaccttcgctaacaaagtcatcggttctcttcccgttatcggactcctcgctcgaattatcagcgatgaaggcggcgttggtagagatctcgtcgatttcgctgagtttaggaaacgagttgggaataaatgtactcctgatgattctagggctttctatgagttccaacagcgacgaggcaaggcaggtgagcctttgtatgtgcttctgtgttgttggggtgctgcagtaggtgcaggtcttctcaaatctgaagaga

SEQ ID NO: 130707 - DNA, 406 bp, Arabidopsis thaliana
ccttctttgatctcttcaggaactggtaatttttcagcagctaggaacaatatgattggggaaatcgagaaccgatcaacattcctcttagcagtaaaagcggatgtggagacacaaggggactttggacagtcgttagcaactgaagtccgagcttcttctttcaccgacatagaagatctcttggcgttcgttagctggctagatgaagagctctccttcttggttgatgaaagggcagttcttaaacactttgactggccagaaggtaaagctgatgcgctacgagaagcagcttttgaatatcaagatcttatgaaactggagaagcaagttacgtcctttgttgatgatcctaatctctcttgtgaacctgctttgaagaagatgtacaagttgctagaga

SEQ ID NO: 130708 - DNA, 576 bp, Arabidopsis thaliana
  unsure (1)..(576): unsure at all n locations
ttttagaaanacaaaaaaaaaggcggagctttttcgagaaatttgttgcttacccttccctgtgatattccttgggatctgctttacagttttatacatacacatttgattggaccattggttcggtattcttaaacgaccggagatttatccacacaacgtcttctcgcagccaaacacatcaaactacaacatgttcttcttgtgtagaaaactctcactttcacgattccgacaccattntcctttcagactccgtcgttttcttggggaaaacccaaatccaactacccatttctttacattacccgacaatcaaacaaaacgaccagagaagtcgagactcgacggcgtagaacacaaaaccctaaaggtaaatggcataaacatgcacgtggcggagaaacccggttccggntccggagaagatccgatcatactnttcctccacggatttccggagctttggtacacgtggcgacaccagatggttgccgtctnttccttgggataccgtacgatcgnnccggntcttngtgggtacggagacacagaaagngccagnnaaagttnnag

SEQ ID NO: 130709 - DNA, 352 bp, Arabidopsis thaliana
  unsure (1)..(352): unsure at all n locations
ggaaaacaccgggccgacccacgcgnccggngagagaagaaaagaagagaaaaattttgggtggcattggngnganganggaggcgagaccccgccggngggcacncnccgcagccccccaagcagnaacagaggcggagccaggnnggangaagaacnncnacaaggacacgngnccncaggccgaagacaaccgccgngaacaagncaaacnccnctacaaacgccacaagaacaccgcnnncnctnggctccgnaacaacnnccaagacngcgccgnngagncaagngangcgncgcnnnngcngganncgacaagaagagagccaggagagaaagaacacgacaggag

SEQ ID NO: 130710 - DNA, 447 bp, Arabidopsis thaliana
gtggacttggatgtctcaagtgttcctgaagtcctcaggcctctttatgagtcttccaaaatccttgctcaaaaaatgactgtcgctgctctgagacatgtgcgccaaattgctcaagagactagtggagaagtccagtatagtggtggacgccagcctgcagttttaaggactttcagccagagactctgccggggtttcaatgatgctgtaaatggttttgtcgatgatggatggtctccaatgagtagcgatggaggagaggatattacgaccatgattaactcttcctctgctaaatttgctggctcccaatacggcagctcatttctttccaagttttggaagtggtgtgctctgtgccaaagctctatgcttgtgcagaatggtccaccccttgtattgattcggatcctgagagaacaccgagctgaaaggcagactatg

SEQ ID NO: 130711 - DNA, 793 bp, Arabidopsis thaliana
  unsure (1)..(793): unsure at all n locations
caaagggtgtcccatggaagtaacccccaagggtggggggccgctcccatagtaataaatgcagcgggtcaggaatacccccaaagggtcagaagttgtggtgcggtggcccttcccaaaagccccccccaggattttccaaggccaagtttcccggaaacgcgggaggcgcacaaaactcaattccgggaaaccccttacttccaacagcagcaccagcaacaacaacanccaatacttagcggcggttatgaaccagcaacgatccatgggaaacgaacggttccagccgatgatgtacgctagaccaccgccagctgtcaactatatgccaccacaaccgcaaccgcaccaacaacatccatacccgtatccatatccgtatccaccccagtatccgcctcccaatggtggccagtattctgattacttcaatggcgagaacacatcaagctgcaatattatgtgaacaacaacatcaaaactttccatagtttgtgtccggtctgtgattatacatggaaatgttttttttttcataattattgggggttcttagaatccttttttttcctccaccggatcaaatcctaaattatattaggatttttttttataatttgtgatagttcttaagtaattttatagaatcataatatataaaatcaaacgaatattttatattcagtacttgttttttnnnnnnnnnnnnnnnnnnnnnnnnnnnnnnnnnnnnnnnnnnnnnnnnnnnnnnnnnnnnnnnnnnnnnnnnnnnnnnnnnnnnnnnnnnnnn

SEQ ID NO: 130712 - DNA, 512 bp, Arabidopsis thaliana
acgcctgcaggtaccggtccggaattcccggcttgacccacgcgtccgtaccgctgtgagaagacgacagaagggggaacatccggcggatgcggcggtacgatcccaaccaggagactctcaacgctctccgcggctccaatatcgagctcgtgctcgatgttccaaaccctgatctccagcgccgcgcctcctcccttgcgggggccgacacatggggccgcaacaacgtgccgcaactatgcgaacggcacatgccgcgtcgtctctgtcgggaacgaggtccagccctcagaccaagccgcgagctttggcctccccgcgaggcagaacctggagagagccggtgcaagctctcgggagcaaggcccggacgggggatcgaccaccagaggcattgaccggggctccggcgggaagtgggagcgctgccaccggaagggtgagaggtaaaccagaccgcgggatagtgtacgtggaaagcaaaagaccgtccgtggcccggacatctt

SEQ ID NO: 130713 - DNA, 456 bp, Arabidopsis thaliana
  unsure (1)..(456): unsure at all n locations
cctgcgacccgcgttcgaagtcgtggcgctttaccaacaacggaacatccggcggatgcggctgtacgatcccaaccaggagactctcaacgctctccgcggctccaatatcgagctcgtgctcgatgttccaaaccccggatctccagcggctcgccctccgcccaagcggaagccgacacatgggtccccaacaacgtccgcaactttgcaaacgtcacatttcgctacatctctgtcgggaacgaggtacagccctcagaccaagctgcgagctttgtcctccccgcgatgcagaacatagagagagcagtttcaagcctcgggatcaaggtctcgacggctatagacaccagaggcatttccgggtttccgccgtcaagtgggacgttcacaccggagtttaggagctttatcgcaccggtgataagtttcttgtcaagcangcaatctcct

SEQ ID NO: 130714 - DNA, 818 bp, Arabidopsis thaliana
aagaagaaaagctttgagaagccatggatacggaaactgagttcgataggatactattgttcgaacaaattcgtcaagacgccgaaaatacctacaagtcaagtcctttagatgccgataatctgactagatggggaggagttttactcgagtcatctcagtttcatagcatctcagatgcaaagcaaatgattcaagaggccatcacaaagtttgaagaggcattgttgattgacccaaagaaagatgaagcggtttggtgtattgggaatgcatacacttcatttgcgtttctgactcctgacgagactgaagctaaacataactttgacttagctactcagttctttcaacaagctgtggatgagcaaccagataatacacactacctgaaatcactcgaaatgacggccaaggctccacagctgcacgcagaagcttacaaacaaggcttaggctcacaaccaatgggtcgcgttgaagctccagcaccgccgagctcaaaggcagtgaagaataagaaaagtagtgatgccaagtatgatgctatgggttgggtgattctagccattggtgttgttgcttggatcagtttcgcgaaagctaatgtgcctgtctctcctcctcgttaagtagactcgttaggagactttgatgaagtttttcaatttttgaggttttgacagttggagcttgttgtgtaagatttttagttgtactacgagtactttactcttgaaagaagatagaataaaatgtcctttttttactttaaaatgggagagaaagggcaccctttcccttatcgggggggcggg

SEQ ID NO: 130715 - DNA, 622 bp, Arabidopsis thaliana
  unsure (1)..(622): unsure at all n locations
acgcgtccgtcgctttttgctatttccttgtaacttaaaagaagaaaaaatgagaggtagcggagcagggatcgccggcgttttgccggggttgtgtgctattcatcgccggaacaatctccgcctttgaagacatagagaggttgaggatttggccgttaccggcacaagttagccacggtgtgctcggagaatgtatctaagtggagatttcaagcttgttacggagggaagcaaatatggagacgcctcagggattttgaaagaaggatttgatagaatgcttggtgttgtgaggctgagccacgtcatctccggtgaccggaattcttcaggcaccggtggatctgctttgcttcagggacttcacgtcatcatctcctcctctaccgatgagttggaatatggagcagacgagtcgtacaaattaagtggttccatctccagagaagccgtctttatgcacaacttgagggccaagagtgtttatggggcattgcacgggtctacagacattttgccagttatgtcattttaaatttgaggaaaaaggtcattggggttcttaatggctccatgggatatcatagnccnancctggttctntttanccgnggccttt

SEQ ID NO: 130716 - DNA, 543 bp, Arabidopsis thaliana
  unsure (1)..(543): unsure at all n locations
atttctcttccacaaagagtcctaacttcgagttgaaacaaacaccatttctcatctctatctcagaaagaacaaaccatttcgtgttctttctttctctattctcataaggaaatataattcctgaaactgttgagttcttgtgaaaggaaataaaaaacatgatgatgggcaaagaagatctaggtttgagcctaagcttagggttttcacaaaatcacaatcctcttcagatgaatctgaatcctaactcttcattatcaaacaatctccagagactcccatggaaccaaacattcgatcctacatcagatcttcgcaagatagacgtgaacagttttccatcaaccggttaactgcgaggaagacacaggagtttcgtcaccaaacagtacggtctcaagcaccattggcgggaagggaagtgagagagagggattctccggacccggcgttggctccggcgacgatcacgacggggtcactccggttcgggggtcnnngggggccccnntttnganancgggggggaacgtggggngg

SEQ ID NO: 130717 - DNA, 741 bp, Arabidopsis thaliana
cacatccaccgtttataccgcccattactcaggtgcggtctagcgttgggcgcgcatcgatggatggctgcattacaacgtcaatgcgaatgcctcacgattctcatgtcctccactgtttccacgttccactaatccatcccctataaactgcaatgggagaaaaagcatgctaaagctagcgaagaggatgactgataatttctgtggaggggtttgtgcttcgtcgttacagaaatggagcaaactcaacgttggcaacgtcgacgaagacgttaggataatgactaggaagagtgtaaacaatcctggcgagccccctgggataattctaaatgcggcgacgtcagtttggatgccggtatctccgaggcggttgtttgacttccttggaaacgaacggcttagatcggaatgggatatcttatccaacggtggaccaatgaaagagatggcccatatagctaaaggccatgaccgttccaactccggctgcctcctccgtgccagcgcgataaatgcgaatcagagtagtatgctgatattaccaagagaccagccatacacgcttgcaggaaccggttgccctggtaccccccctggtggatatccccacccaaatgcaaggctgttgaatgaaacggcggggagaatttttggcttaccgtggccccttcctttgtctttcgaggaaataccgcccattctttcccttaaacggggccaacgggcttgggtccc

SEQ ID NO: 130718 - DNA, 470 bp, Arabidopsis thaliana
aaaaaacttagaaagcagagaagagttaaagtgttagagagagagagagactgtgatcggagatgtgtagcaacaaagcaagtccggtcgtcggagaagaaaaacagagtacgagatcatcgaagaggatcaagaagagaaaaaacagagaagctaccaccaccatggaggataagtcttcttccaatcttgacgcgtctcgtaagatcagaacaaaaacgaaaaaacccaaatttctcagtctcaagctcgagctcaacacttctcacgagatcaacgtgaatcccagaagcaagaagagcaagaagaagaacaacaacaaaaaacagagcaagaagaaagaaccggatacgacgccgtttaaggagaagaagagagcagagactactactacactggggggaggagagaaagaagaagagcaatacgacaccgttgcagcttacctctttcaattccgccaccgacag

SEQ ID NO: 130719 - DNA, 563 bp, Arabidopsis thaliana
  unsure (1)..(563): unsure at all n locations
gataatagtagattatgtccaaggcagtttgtgtatcatccactagatcctagcctaatgggagtggggactttggatggcgagggggttgttctcaatcacgaaagtgggaaaattttccgttacatcccatctaatggatctcaaagtaccatcttgggactttgttggctcaagatatatccatctatggttatagctggctcagccaatggctcattgaagctgtacgacatccaaaaagcgtcatccacggttactactagcagtcattccacttctggttctgtcacttttgatgagtttgaccaattaacgtcggttcatgctaattcgacggaccaactatttctggctagcgggatactcgaaggatgttgctttgtatgacatttggtaggggaacacgcctacaggtttttgctaatatgcatcaagagcatattaaccgtgggtgaaaattttcggaccattncccgtttctttttgcggctttcttctttcgntaaaantgtaagcttttgggatttnagcaagagccatcccgccatgnnaacccgttt

SEQ ID NO: 130720 - DNA, 443 bp, Arabidopsis thaliana
atcagatgaaactttggaatccgagcccctgcacatgattgtaaatcctgacgatgcaaacgagaacagagtagtcaatggggcagatactgaaattggtgtttccaacttgagccatgtaaacgcagccatgagtcatgttattcctgaagagcaagcttcgctgcagggagatattcttattgatatcaatgaccgggttcctcgtgacttcctctctgaaatattctcacaggcaatctcagaggatacatccactgtccggccatatcctcacgatggagctgctgttagcatgaatgtgcaaaatcacgatcgttaaaactggtcatattttcagcagctggctgaagatcagtttatccaaagaagatgttgtacttgaccaagctgattctcgcattccatctgaccgtaaagatggtggagagagcttcagattg

SEQ ID NO: 130721 - DNA, 770 bp, Arabidopsis thaliana
  unsure (1)..(770): unsure at all n locations
gctcgatctcaagctgaagatgccctgaacaagtttcaaagcatagcaaagaaagatgagggaacaatccaggaactgaagacactgatcaaagaatgcagagctaacagctgcatagagcatgcgaccgggattatggaggaagagagggctccagagaatctgtcgaatggaatgtcaactatatcactaaacaatacagctgcgcaggtggaggagaagtacctgttagacaaactggatgtgtatgaatctgcggttggggattcaaacacgaaaacagccccaaagattgaacggttcccaccggcattacaatctataccgcgtaatccgattgttctagaccttgcctacaactgcatcgacttcccagttattgaaaacaggatgaagaaaaaaggaggcttctttagtagccgaatttcttctctctggtaaaagctttaaaccggctttctctctaaggttaaaaaaggatctcggattcattctccctttttatttaccagactcagaaacttgttgttgctctttcgtagcttctgaaacgaaatgcatgagatttctgttaaatttattttgtcacagaatcacaatttagacattttgttcttccattttagtgacacttggaattttggaaatagagaccagttttattggtnnnnnnnnnnnnnnnnnnnnnnnnnnnnnnnnnnnnnnnnnnnnnnnnnnnnnnnnnnnnnnnnnnnnnnnnnnnnnnnnnnnnnnnnnnnnnnnnnnnnnnn

SEQ ID NO: 130722 - DNA, 617 bp, Arabidopsis thaliana
  unsure (1)..(617): unsure at all n locations
cgccgtcttcttcaaacgccgattcaatcttcttttagtccccggcgaccagagcgtcggtatcttctagaaccaaacacgtggcggacggaaaccgctcgattctccgagataactcgtcgattagctccgatccctttagattcctctgagaccgaatcgggtaatggcaaacccaaggtttcaaatttatgtgtggctttaagatatcggcgaggatttcgtctactaagtggaagagtagctttctattgcatcgaagagagagattttccggtgaatttctaggtctggttgatgtaacagcgaaatgttcgaggaagtagaagattgatggatcaagtgggtgtgaaggagagaaccatttagcgtatgagattggtgtgtctctgtcgattcctgttcttcttagggttcttgttatgtactctaattcgcggccggggttggtnaatgtggtgttgtnattggctcggaaactagggncnctgatnatnatgcctgttcttggggttnggttccctancctttaaggttcctnaaaaccatgnntaaccnttaaanttaaccttgggnatggggaangggaagagggttttcccgttttntnggttaac

SEQ ID NO: 130723 - DNA, 790 bp, Arabidopsis thaliana
  unsure (1)..(790): unsure at all n locations
cgcgtccgcggacgaatcatgactctgcttccgatttcaatcttcttcttctttttattttgcattccttcgccattaatcgccgccgctaacgatgacgatataccgacggcgtacactctcctccaaagctacaactttcccgtcgggattcttcctaaaggagtggtgtcatatgatttagataaatctactggtcaattccacgcgtatttcaacaaatcgtgcagtttcgctcttcaaggctcttaccaattggattacaaatcgacaatctctggatacatatcggagaacaagatcacgaagcttaccggcgtgaaggtgaaagttctcttcttgtggctcaacatcgttgaggttattaggaacggagacgaactcgagttctccgttgggatcacatcggcgaacttcgagatcgatgagttttacgagtcgccacagtgtggttgcggatttgattgcaaaacgaagacgaagactttgggaagaaacccttttgtttcttcggtttaaaggttaagacttcttattgcagaatctgaactctttggatgatttatgttctttctccaatcatttaatttttcaatcaatgctttgtttgtatctcttcttaggatcgaaccgataagttgtatttatgaaccgatcaggaataaaacagtggtggaaaaagttaattcttnnnnnnnnnnnnnnnnnnnnnnnnnnnnnnnnnnnnnnnnnnnnnnnnnnnnnnnnnnnnnnnnnnnnnnnnnnnnnnnnnnnnnnnnnnnnnnnnnnn

SEQ ID NO: 130724 - DNA, 646 bp, Arabidopsis thaliana
ctctttctccgatcgatctgctagacgatgacgatgagtttccttctataaaaccagtaactacgagatttgatttataacaatcatgaaactctggtcatgtttgaaaatccagcttcaaatagtcctcatcttcgtaaatctagtagcaaatctgtcttcattgatcctggtttaaacggacatttaggtgaaatgggtgaccttaaaggttcaaattcaccacttcatataacacctatggttccttctcctatcttcctcgggagatttaaggtggttttgggtctgttttgggctttatgttgctgcaagattggatgggattcagttatgagaatgagtatcgacctgcgagatttatttttgtatgaagcgtttctttattacaatcctcttcttcttgtgacaatgatggtttggctgtggggagtgaacttatgggtgttctctcaaggaagtgttaattattccaaagtctttgatcttgatcataaccaccttactcatagagagatgtggaagtgtagcatgtggatgacaatcattgtcccaactagcatgacagcgtatctatatctgtattctcatggggaagtatctttggctgcttcacaaccggtgctcctgtacattgcttttgctt

SEQ ID NO: 130725 - DNA, 964 bp, Arabidopsis thaliana
  unsure (1)..(964): unsure at all n locations
ggaancccggncgacccacgcgtccgggggatacagagagaagccaaaccggattgccgcacgaacggcgtcgggttagtccgacggaggaaccatgtcctcgtctcttcttctctccggttctactgtatcttcttcgtttatcgctccatctaagccttctctcgtacgaaattccagtaagacatcactgttaccatttcgtaatgtttcgagaagcttcaaaaccgtcaagtgcaccgttgattcttcatatggaggcaatgttcccacgttccctcggacgagagtttgggacccgtacaaacgtctaggagttagtccatatgcttccgaggaagaaatctgggcctctcgtaactttcttttacagcagtacgctggacatgaaagaagcgaagagtctatagaaggagcctttgagaagcttctcatgtctagttttatcagaaggaagaagactaaaatcaatcttaaatcaaagtgaagaagaaagttgaggaatctcctccgtgggctccaaagctcttcccgatttcgttgaaatgcctcccatggacactattttcagaagacttttcctctttgccttcatgggtggttggagtatcatgaactctgcagaaggcggtcctgcgtttcaggtggcggtatcattggctgcgtgcgtatattttctgaatgagaagacaaagagcttggggagagcttgctttatcggaaatggagccttagtttccggggtggttctccggttcgttaatcattcccatgattccgacgtttctcattcagcctacatggacactcgagctcctaacatcactggtcgcttatgtgtttttgtttctttcttgtactttcctcaagtaagttacgttgtggttttatccaaactctttttgttcttttcgcccagacatttacaaaaccttaaggaaaaattagtgaaagttgttaagtg

SEQ ID NO: 130726 - DNA, 1141 bp, Arabidopsis thaliana
  unsure (1)..(1141): unsure at all n locations
gaagattactactaaacagagtcttttttgacttgccaaaaacacatctgtctctctctctctctttgcggatctgaaatggcgattcctgttatcgatttctccaaactcaatggtgaagaaagagagaagacactgtctgaaatcgctagagcttgcgaagagtggggattttttcagctggtgaaccatggtattccattggagcttctaaataaggtgaagaagctgagctcagattgctacaaaacagagagagaagaagcattcaagacttctaatcccgtgaagttgctcaacgaattggttcaaaagaactctggcgagaagctagaaaacgtggactgggaagatgtcttcactctcttggaccataaccaaaacgaatggccatccaacattaaagagactatgggagtatacagagaagaagtgaggaagctagcgagcaagatgatggaagtgatggatgagaatttgggtttgcctaaaggttacataaagaaagctttcaatgaaggaatggaagatggagaagagacagctttctttgggactaaagtcagccattaccctccttgtcctcatcctgagctagtcaatggccttcgagctcatactgatgcaggaggtgtcgttttgcttttccaagacgatgaatatgatggccttcaggtcttgaaagacggcgagtggatcgatgttcagcctctacctaatgccattgttatcaacactgggtgatcagattgaagtccttagcaaccggaaggtacaagagtccgtggcccagggtgttgccgaagggagggaaggaaccagagggcctatagcttcccttctacaatccggcggacaaggcggcgataggggccagccccgggggccggaagagggagggaagttnagaagatctatcccaaagtttgtgttgggagattccatgggatggtttttncaacccagaagtccatgncctaaaanagnccccgtttccaacctggaaagcccccccaaaatganccaattnaattaaatttttcaaggaccannccccgggtttncnnaccccctatggatttnccctnaacganaaaatccncaatttnttnggaaaaaatttgggcnngncccccagggt

SEQ ID NO: 130727 - DNA, 653 bp, Arabidopsis thaliana
atctggtgttcttctcgtacttgcggattcctccgaattgtttcttcacagtttcttaacgcttggaagtatggtgagtgagagaagagtgcatccggattgtataaacgcttcaaatccttatcacgagtgtgtcgagtattgctttaagaaaatcgctgaagcaaaggccagattcgagaagcagaacactggattagctaaagttcacgagcagacgagggagccgctcgatgataaaagaatagaggaagatagttcagaagaagaagaggaggaagaggataaccgagaacctcaagtagatgtaactcaacttacagggagacaaaagaagttgtttgagttgagacttaagatgaatgaagcaagaaaatccaatcagacggatgtcgggagtgaaaagaagaaaatggaagcaccaacagagacattaggaatctcataacagaaatggttggaggggaggaagaaaaagattgggaaacttcttgatgctaatggtttagatatgacacaggcttatatgctcgatactcaagaagcagctgaatcaaaatacaaaaaatgggaaaaggaacctacgcctgcgggttgggatgtctttaaccagaagacgttatacaacgcatacaagaaacggacaaagaaca

SEQ ID NO: 130728 - DNA, 783 bp, Arabidopsis thaliana
  unsure (1)..(783): unsure at all n locations
gagctcccaggccggggggggaggaccncanccggcgagnagnatcgnnacagaactangagcagactctccaaaaacacccagtcatgggctctgtggatattccctcgggtgggcacgttgaagttggagaccatgaagatggaggaattaagcctgatatgttggtatctttgactgccccaaaattatgtgcaaagagattccgtggccctcatcactttttaggggggagatttgtaccaccttctgttgcagaaaagtataagctggagctccctagttacccagggacatctatgtgtgttagaattggtaaacctcccaaagttgacatatctgctatgagagtgaactatgtctctccagaattgcttgaggagcaaggttgaaactgttcctacggtccagtttcgtaaatggtttgatgaggcagttgctgctggattgagagaaacaaatgctatggctttgtctacagcgaacaaggacaaaaaaccctcatcaagaatggttttactaaaaggatttgatgagaatggatttgtctggttcaccaactacgaaagtaaaaagggttctgatttatcagaaaatcctagtgcagcacttcttttttactgggnaattttgaaccggcaggtaagaattgaaggnccagtggaaagaatacctgaggcagaatcccnggataccttccatagccggcctagagnagccantttgggccattgtagcagcagagtcctgtgacctgcagnatgtcntncgcgattgagacta

SEQ ID NO: 130729 - DNA, 941 bp, Arabidopsis thaliana
  unsure (1)..(941): unsure at all n locations
gcagtaccggtctggaattcccgggtcgacccacgttctccctcctctgctctctcatctacttcctctgtatattcttcgcacaaaattaagtttctaaatccagtttctgacaatggaaacaaaccatttatacactttgtctacacttgttgttatgctgctagtgtcagtgacaccgacagtgacatcaaaagacgaggttgtttcttgtacaatgtgttcttcatgcgacaatccatgtagtcctgtccaatcatctcctccgccaccttctcctccaccaccgtcaacccccacaaccgcatgtcctccccctccttctcctccaagctccggtggcggtagctcttactattaccctcctccttctcagtccggtggaggcagtaaataccctccaccatacggtggcggtggtcaagggttattactatcctccgccgtattcaggaaactatcctacgccgcctccgccgaatccgatcgtcccttatttcccgttttactatcatactccaccaccaggttttggctcagatcggtttatgagttcttactctattatttttgctctttttgctgtctttctctgtttagtgtgacggaaaatagtcggaaattcgccgggaaaatgacgaagaaaaagtcgaaataatgtggcagatccgtagatctataaatctttagatttctttgatcatggaaactaaatgatgttggatcttttactttcttcgatctgttttaactttttcttttgttgttgacaactttgtattcacattgttcttgattattaatatattaattactcgttaaaaaaaaaaaaaagggcggccgcgttaaaggatcccagcttacggacgggtgcctgcgacgtcannnnnnnnnnnnnnnnnnnnnnnnnnnnnngaaatcatacccaaagggggcgcggc

SEQ ID NO: 130730 - DNA, 752 bp, Arabidopsis thaliana
gacctcccagcccatttaaatgtctggcaaaaggtctgtttaaggtaacaagggctcgtctcagcatctacgacccacaagtcactgaagagcagatccaaagagacttaaccatgaacaaattcgactgggaccacccacttcatctccagcccatgagccccaccactgtgaagcaagtctcagtcgcttgggacgcatacactgcaaccaaagacgcccacggtatctgcattttaaccgagtgggacgagttcaagaaacttgatttccagcggatctttgagaatatgcagaaaccggcttttgtttttgacggtagaaacgtggtcgacgctgataaactcagggagattgggtttattgtttactccattggtaagccattggaccagtggctcaaggacatgcctgctcttgcctaaacaacaaccaaacctcttccttagcttttttctccattttttccgaattctcatgagtttttccatatatctttaactacagtatgtttgatcaataattgtttcttttgttcttcctattatgaattcctacagagattttaggtttggttcttgttggtaattatgtaccttgggttatcaaatattgtaagcttttcgaatattactttcataatataaaagttttcccaagttaatttctaaaaaaaaaaaaaaagggcggccgctctagaggatccaagcttacgtacgcgtgcatgcgacgtacatagctgttgtatagtg

SEQ ID NO: 130731 - DNA, 802 bp, Arabidopsis thaliana
  unsure (1)..(802): unsure at all n locations
tgcttgaaaatttctccccccttttcttttttttggacactttccccatagttcattcgaaaccttaaaacaagttttgaggaanaaccaggaccaagagagttgtgtttttgattgaagcaaaagtgttttagtgtctccttccaattccttccgaaaagagaaaagagaagtatcgttgcagtgaaactggttatcgtattcctttcaaatgtaaagaggttagagaagaagtggatgcacataagaaaaatggagaagaagaaacacaaaatgatcaatcgaataacaatgacgaagaagcgaaaacaaggaatctgttggatgattcatcaccggcgacgaaagtgaagtctcagtcttacaaaacttatagaagctgtgtgccatctgcagacgaagagaagttatcagttcttggttttgagtcgattatgctaggactgtttctgttaagcggagctgctatttacatcagaaagagacagacggtaccgatgcttggggtatcatcaagtggaagattgcaaggcaattctcggttttgaaagaaccatttctcggtatgtaaaagctttcatctgctcactcagaaacagatttaacatttgtcattgtctgttgaaagatgagatatgtttgagtgtatagaatagctttagggggacttcatataattgggactacttgtttcatatatggcaaccatgtttggctttgatgatgtaactttgcttatcgtctctgaactgcggccgcgaattcgagatcaagcttatcgataccgtcgaccggagggttg

SEQ ID NO: 130732 - DNA, 574 bp, Arabidopsis thaliana
  unsure (1)..(574): unsure at all n locations
nnnnnnnnnnnnnnnnnnnnnnnnnnnnnnnnnnnnnnnnnnnnnnnnnnnnnnnnnnnnnnnnnnnnnnnnnngcccacgcgtccgtacggctgcgagaagacgacagaagggggaagaagaacatcacaaatggcttcccagagttcttcactttttctggttatcttcttcatcttcatctacgcttcttcaattccatcctctattctcgccagagcacatgaacatgacggagatgaagagatcagaagcgttgggcgtagattccttctaggtttcaaagaaactccaaaaggaagtaatatcaccttcgcttgttctccttcaggtccttgtgtctcttgcaattcctccgaaaagagaaaagagaagtatcgttgcagtgaaactggttatcgtattcctttcaaatgtaaagaggttagagaagaagtggatgcacataagaaaaatggtgaagatgaaacacacaatgatcaatcgaataacactggcgaagaaccgcaaacaaggaatctggtggatgattcatcaccggcgacaaaggggaagcttagtcttcaaaacttat

SEQ ID NO: 130733 - DNA, 464 bp, Arabidopsis thaliana
attctgtggccggcgatttccctcccgatccacttctcgcctccggagccttcatctcctccgccggtgacggaaccctagacagtagtgcgaaacgacgaccgattcagggaggaatcggaatttctggttcgggagagagcgtacgcatcgggatggctaacggcactgatcaggtgaatcatcagacggaatcgaagtcgcggaagcgtgcggcgcctggagataattggttgcctcctggttggagagttgaagataagattcgaacttccggtgccacagctggttcggtggataagtactattacgaaccaaatacaggacgtaagtttcggtccaggactgaggtgctgtactacttggaacatggaacttctaaaagaggcaccaagaaagctgagaatacatatttcaatccagaccattttgaaggccaaggaagcaatagagtcaccagaacc

SEQ ID NO: 130734 - DNA, 638 bp, Arabidopsis thaliana
  unsure (1)..(638): unsure at all n locations
accacagctaataacatgaatagcttcttttttcatcgatctcgtgttcgncacctccctcgatgctctcttctccatcaacggcgacgcaataaacacaggagacatcccaaatctcttctcaaaattcttctgcgacatcaacgacgatttctcaagctcatcatatccctcaagcccttcttcaatatcttccaaatcaaaaatcgcctccgtcgatgatcgttttctactatagctgctcatcgttttatcatcactcttcttcttagtcttcttctttagtttcgagaacaagctcttgattcctgatgtcttcttcgaccaatcttatttgtgattacggttacctccgccgcaacaacagcagatccacgaccgccaacaatcacaggtcattttctttcgtttttccgntaccggaggtcatatccgtataatgctggtctattggatacacatcctgttcctacatagnnctggtcttgggattccactaaggctctaatgnttatctgtnataacaaaaaccaggttttanggggtttgaattngnaatcgggggtttggtaatgaaggctncatcgagaggcggtgttttgntggganggncgtgnntcgttcgcgaangtggggtc

SEQ ID NO: 130735 - DNA, 514 bp, Arabidopsis thaliana
caggggacatatagagagcggaagacatcccgaatactacttgaaatactctgttgaaaatcttgaaaccgcagtgttggatttcttcgaaggatataccacagccccacatttgagacggtctcagtgaaaaaagaagattgaaaaccccataaaactttcctttttcggtttgcccacattagaattacccatttatatcattctttgaattcattccattttcatgtggtggcagtgttgagattgttttccaggcttctggtgaatagtctctctctcttttgtacttgtaagcatatttgttgtgtgttgtttgtttgttaccaaatttcattactccattgttgatataaatgtttgtattttgtgacttttgttgcactagttccttcataaacccatctaaatgcaatttgattttttaagatttaaaacaccaaggccgaccgctctagaggatccaagcttacgcacgcgtgcatgccacgtcatagtcttgtaagtgtcacct

SEQ ID NO: 130736 - DNA, 776 bp, Arabidopsis thaliana
atacgactcactttagggaaagcacgtacgcctgcaggtaccggtccggaattcccgggtcgacccacgcgtccgtacggctgcgagaagacgacagaagggatctgtgaggaagtcacttggtgttggggacatagactttgtctcctgcagtacttcagtctatcaggcaatgcttgtagattggatgaggaatctcgaggttggaattcccacgctcttggaagatggaatcagcctccttgtgtatgctggagaatatgatcttatctgcaactggctcggtaactcgaggtgggtgaatgcaatggagtggtcagggaaaacaaactttggggcggctaaagaagttccgtttattgtggatggcaaagaagcaggcttgttaaagacttatgaacaactcagtttcctcaaggtgagagatgcaggacacatggttccaatggaccagcctaaagctgcattgaaaatgctgaagcgatggatggagaattcacttatcgaagatgctactgtgactgttgctgctcagggaggagaggaactggttgctcagatgtgatcacatcttcttttgcgttgcatgaaaacaaaaggcagcaaacataaaacaatgtgtgagcaattgacgttttcttctgtaatttgatctcataagtcataagaaagatacagtatatgtaggggttgcccaatttcgttataaaatcaaactctgctgacaccaaaaacataataattactacgaaatgtgttatctatgtttgtttccg

SEQ ID NO: 130737 - DNA, 1128 bp, Arabidopsis thaliana
  unsure (1)..(1128): unsure at all n locations
gaaggatgctcctgttgtaatttggttgacgggagggcctggatgtagtagtgagttggctgtgttctatgagaatggtcctttcaagatcactagtaacatgtctcttgcttggaatnagtatggatgggatcaggtttccaatcttctgtatgttgatcagcctgttggaactggtttcagctacacgacagataaaagtgatatccgtcatgacgaaactggagttagcaatgatctttatgattttctgcaggctttctttgcggagcaccctaagttggcaaaaaacgacttttatattactggagagtcatatgctgggcactatatcccagcttttgcttcccgagtccataaaggaaacaaggctaatgagggagttcatattaacctaaagggattcgctattggaaatgggcttacagatcctgcactccaatacccagcctatcctgactacgctttggaaatgggtctaatcacgcaaaaagagcatgatcgcttagaaaagattgtcccactgtgcgaactatcaatcaagctttgtggaactgatggcacaacttcttgtttggcatcatatcttgtctgcaactctttgttcagtggtgtaatgagtcatgctggtggagtaaactattacgacatcaggaagaagtgcgtgggaagtttgtgctacgatttctcaaacatggagaaatttttgaatctgcaatctgtgaggaagtcacttggtgttggggacatagactttgtctcctgcagtacttcagtctatcaggcaatgcttgtagattggatgaggaatctcgaggttggaattcccacgctcttggaagatggaatcagcctccttgtgtatgctggagaatatgatcttatctgcaactggctcggtaactcgaggtgggtgaaatgcaatgggagttggtcaggggaaaccaaacttttgggggcggctaaagaagttcccgtttatttgttggatggcaaaagaagccacggcttgtttaaaagccttattgaccaactcaagtttcctcaaagggtgggagattnaagggccanatgggtcccaattggcccngcctaaaagctgcanttnaaatncttnagcggntggtt

SEQ ID NO: 130738 - DNA, 451 bp, Arabidopsis thaliana
atcaaaatcgtcgctctctgtttgctggcgtaacttagccttgttcttcttcttcatcgcgatatctccggtgtcttcttcggctccagcagaagaagaagctctctgtatccatccatatcgaaaaaccagagatcggaggaaggagagagagataccaatctctgttgctttggttttaagggtttagaggagatgtcaaaccacccgaagatcacatcggcgcatcagaatgtggaggagaagctaagggaacttcaggagaggttctgtcatcttcaagctgctaggaaagaagggcggcatggtgaccttgcgcttttagaagcccaaatctctcagaatattcgggagtggcaagctgaactcactgctccttctcctgaatcttctctgttgggtgaaggtattagccaattccttgaggagtttgctcctctgttgaaattag

SEQ ID NO: 130739 - DNA, 487 bp, Arabidopsis thaliana
  unsure (1)..(487): unsure at all n locations
ggtatttgaccggatttgtgaatattctcgtctatgtacgagatcaataaattccggcttggagtcggactgttcctaccggctatgtccggttctctgtctcgctcttagcgagattcgatctctattctatctatacatcttcaccgtatttctttgtttatcttccaatttctctctgtttccccaattgatcgaggagtaatatcttcatcactctccttttgctcaaatcgtgtgagcaaagatggatcttagctacaccaaattgggtgtaactggtggtggagcttccccggattggtgttaccaagagaattttgaagcaactttatagaatcgaaccaaaagaatttcggtgctatctatctttttggattggagatcggcggaagggaaaaggattttacattcgttctaggaccagatccgccggtggtagtcagaatacggcgatgtccggcaccgttaccggtgntgctttagg

SEQ ID NO: 130740 - DNA, 754 bp, Arabidopsis thaliana
  unsure (1)..(754): unsure at all n locations
cggcccggaattcccgggtcgacccacgcgtccggggagagataactgcagggtacttaatgaagaaaagtgcaaagacaaatgggtggagtaggcgatggtttgttctgaatgaaaaaactggaaagcttggttatacaaaaaaacaagaagaaagaaacttccgcggcactgtaactttggaggaatgcagtatcgaagaaatttctgatgatgaaggagaaaaatcaaagagctcgaaagataagaaatcaaatggaccggattcaaaaggaccaggccttgtatttaagataacttgcagggttccatataagactgtacttaaagctcacaatgcgttggttctcaaggccgagagcatggttgataagaatgaatggattaataagctgcaaaaggttatccaggcccgaggaggccaagtgggtagcgcttccatgagacaaagtctttcagaaggctcacttgataagatggtaaggaaaccggtcgacccggaagaggaattacggtggatgtcccaagaagtacggggttatgttgaagctgttctcaacagtctagctgccaatgttccaaaggctgttgttctctgtcaagtggaggaaatccaaggaagacatgctgaatcagctatacagctctatcagcgcaattngtaatngnggnttnaatcatttnttcaagaggtcagaacgtcaaaaanggngggcccttnccngnaacagtccnctnttntntcaaagcnact

SEQ ID NO: 130741 - DNA, 649 bp, Arabidopsis thaliana
ctaagatgatatacgtatacatgcatattgcaaaaatcagtggtcccataccattttgagtcatcatgagcgtatgagagtaaattcttctcacatattaataacaacccttcaaagttataagatttttagagagagagctaccacgttttcgtatctccgggaacgatggatgaatcaagtattattccggcagagaaagtggccggagctgagaaaaaagagcttcaagggctgcttaagacggcggttcaatctgtggactggacttatagtgtcttctggcaattttgtcctcaacaaccgggtcttggtgtgggggaatggatactacaacggtgcaataaagacgaggaagacaactcaaccagcggaggtgacggcgggagaggcggcgttagagaggagccaacagctcacggagctttatgagacacttttagccggagagtcaacgtctgaagcaagagcatgcaccgcattgtcaccggaggatttgacggagacagaatggctctatctaatgtgtgtgtctttctcttttcctcctccatctgggatgccaggaaaagcgtatgcaatgaggaagcacgtatggctaagtggtgcaaatgaagttgacagtaaaactttatctagagctattctc

SEQ ID NO: 130742 - DNA, 637 bp, Arabidopsis thaliana
  unsure (1)..(637): unsure at all n locations
gcttgcttctctcggaaattgtgctacatatctcgtgaagaaacgaaccgacagtaatgctccttggatctttgatgtgaactatatgaatttggcagcatctataatatatggatatgcaataattgtgcctctgggattttattttgcactccgttatatggggtccaaagctgatcttctaagattctggtgcctttggggatactctctcttcattttcgatccaacctctcttccattgcttattccagtagagtttctgagatgggtgattatactcttagctggtagtgcatgcgtcgtgttttggtgccctgaatctacggtcttacctcgagacgaacaatgatatcacggctgtaatggctgcagcatttggtctgcaaatggttctttcaatcttcatcaaggtctggttctttccttaatctccatgagacggtcaacaccagacaaaacatatatatgtaaaaacctttagattntgatgtgctgcggtagaactaagaatgtcgttaccagaaaatgaaacccacanagtagaagaaggaacatatncgctaaatcattcggtttcgtttttactggcggattttcatcgttgcttgtaacggatgggtttttcattttttgg

SEQ ID NO: 130743 - DNA, 619 bp, Arabidopsis thaliana
ggatcttgatactattgagtggcttgaaggttatttgcaaaagcaagatgtgcctatggttagtatgtcacatgacagagcctgtcttgatcagttatgtactaaaattgtggaaactgagatgggtgtgtccaggacatttgagggtaattattctcagtatgtgatctcaaaggctgagtggatcgaatctcagtttgcagcgtgggaaaagcaacagaaagagggcgactcaactaaggacttgatcgccaggcttggtgctggtgccaattctggtcgtgcttccactgcagaaaagaaactagagaagcttcaagaacaggagctaatagagaagccatttcagcggaagcagatgaagattaggtttccagagcgtgggacaagtggaagatcggtagtcaatgttaaaaacattgattttggtttcgaggataagatgctatttaagaaggctaatctatcaatagaaagaggggagaaaatcgccatccttgggccaaacggttgtgggaaaagtacgttattgaagctaattatgggtttagagaagcctgtgaaaggtgaagttattcttggagagcacaatgtactgccaaactactttgaacagaat

SEQ ID NO: 130744 - DNA, 779 bp, Arabidopsis thaliana
  unsure (1)..(779): unsure at all n locations
ctatagggaaagctggtacgcctgcaggtaccggtccggaattcccgggtcgacccacgcgtccgatgggtttgagattacggttccagatgagcatgctgtggatctagcaaaagcaatcttggagaagtccgagggtaaggtaaggcttacgggtctaggagcaagagacagtctcaggttagaagcaggactttgtctatatggaaacgacatggagcaacacatttctcctgttgaagctgggctcacatgggccatagggaagcgtagaagagccgaaggtggatttcttggcgcggatgtgattctccagcagcttaaagatggacctacaatcagaagggtcggtttcttctcctcaggaccacccgcaaggtcgcatagcgaggttcatgatgagagtgggaacaagattggagagatcacaagtggagggtttagcccgaacctgaagaagaacatagccatgggatatgtgaagtcaggtcagcacaagactgggactaaagtcaagatcttggtccgtgggaaaccatatgaaggcagcatcacgaagatgccattcgtggccaccaaatactacaaaccaacatgaaatgtgtgtctccttcgtccatgactttgtctcttgcttctgttaaatgacttgtgtttttcttctgttctgttttggcctgaaaaatgtacgatattttgccaagagggcattgcttatttcatttttattggaatnnnaaaaaaaaaaaaaaannnnnnnnnnnnnnnnnnnnnnnnnn

SEQ ID NO: 130745 - DNA, 447 bp, Arabidopsis thaliana
gggtcctttggctgctccagtgcttcaacacctgactaaagaagacttgagcaagctttactttggcaatttccagattctggacattaatggttccacatgtttccttaccaggactgggtataccggggaagatgggtttgagatttcggttccagatgagcatgctgtggatctagcaaaagcaatcttggagaagtccgagggtaaggtaaggcttacgggtctaggagcaagagacagtctcaggttagaagcaggactttgtctatatggaaacgacatggagcaacacatttctcctgttgaagctgggctcacatgggccatagggaagcgtagaagagccgaaggtggatttcttggcgcggatgtgattctccagcagcttaaagatggacctacaatcagaaggggcggtttcttctcctcaggaccacccgcaag

SEQ ID NO: 130746 - DNA, 426 bp, Arabidopsis thaliana
tcttgctttatcaacagttcggtaactacgacaaagaaaaacaggcgggaaaccaaatcaatggaggattcttagctttttctctgtaactcccattatcgtatcttcagcttagtgagatagatggaggaaattggcggcggaagcatcagcagcaatggtgtggtgatgaagaaggaaggattagggttttctaaaaggggaattaaaatagagaatccttttgcttttaaggctcttcaagtcttcactggatttggcgttggttgtggagttggtattggtagtggtgcacctttgaatctcggtagtattccaatggtgggggaaattttgaattcagctagaggagcaaccaatgtattttcgggtgccacacaccacgtgaatggcgctgtacagtatagacaaacttgttcctgctct

SEQ ID NO: 130747 - DNA, 456 bp, Arabidopsis thaliana
ggaggagaacacaaatccaattcacactggaaactgttgggtcggatcctgagtgatatttcgagaccgatgatgtggaagaacattgctgggttgtcgaaggcagcggcagcggcaagaacacacggatctcggcggtgcttttccacagcgattcctggtccttgcatcgtccacaagcgtggtgctgatattcttcacgatccatggttcaataaggacacaggttttcctttgactgagagagatagattagggatacgaggcttgcttcctcctcgtgttatgacctgtgtacagcaatgtgatcgtttcattgagtcgtttcgttcgctagagaacaacacaaaaggagagcctgaaaacgttgttgcattagctaaatggaggatgttgaatagattgcatgaccgtaatgagactttgtactaccgagttcttattgataacatcaaa

SEQ ID NO: 130748 - DNA, 430 bp, Arabidopsis thaliana
ctttcgttagtttttccaatttcggattcggccttgttgagaatatatttacgattttaattgagagattttgtgacagctcgagtgtcaatggagggtgtggtgcacggaatcatcgagacacaccatgttgaacctcttgagattctccttcaaggtctttgtggtgttcaacgcgaacgtttaagagttcatgagttatgcttaagaagcggcccaaatcttgcagttgtgtcatcagaagttaggctattatgtgatctcgatcaacccgaacccacatggacggttaaacatgttggtggtgcgatgagaggtgcaggagctgatcaaatctctgttttggttagaaatatgattgaaagtaaagtaagcaagaatgctttgcgtatgttctatgcactccgttacaaactagaccatgagcttc

SEQ ID NO: 130749 - DNA, 479 bp, Arabidopsis thaliana
cctcatcccaagactgtttgcttacgctgttctacagcctcttcctcgctacttccaaaaccagagcattattacacctctcctcatcacctcttgttttgtgttctgtctccatgttcctctctgctggcttttggtttataagtcagggcttggtaatcttggaggagccttagctctcagtttttcgaactggctttataccattatccttggatctttaatgtgcttctcctctgcctgttctgagacacgcgcaccgctctccatggagatatttgacggcattggagagttcttcagatatgctcttccttctgcggctatgatttgcctggagtggtggtcatatgaactcataatattactctctggtctcttacccaacccacagctggagacttctgtgctctctgtctgtcttcaaacaactgcgacagtctattcgatacatcttgcaatcgcagctgcagcaagca

SEQ ID NO: 130750 - DNA, 654 bp, Arabidopsis thaliana
  unsure (1)..(654): unsure at all n locations
cgagcatttaaccaaaatcagatgcactttgactttgacttttgtatccgttctgcttattaatagaaatctgttttctcatctctcccccgtcgtgccgaaaaagtttccattaaaagaaaacttcctacaatgtcatcacttctctatatcttcctcctcttggccgtcttcatcagccaccgtggagtcaccaccgaagcagccgtcgaaccagttaaggacatcaatggaaaatctctcctcacaggcgtcaactactacatcttgcctgtaattcgcggccgtggaggcggactaaccatgtcaaacttaaagaccgaaacctgtcccacaagtgtgatccaagaccaatttgaagtctctcaaggcctaccggttaaattctcaccatatgacaaatcaagaaccatccctgtctcaactgatgtaaacatcaaattctctccaacttcggtctggggatttggccaatttcggcgggacggcggaacaatggttcatttcaacttttggcgtttaagggaagtcccgggtcagaaaacggttgataactggttcaaggtcggcaaatttgaaaaggtttacaagttcagggttttcccccctggcgaattttttaaaggccattttggggngttggggtttttcaag

SEQ ID NO: 130751 - DNA, 849 bp, Arabidopsis thaliana
  unsure (1)..(849): unsure at all n locations
cgtcgcatgcacgccttccttagcttggaattcggcttgaggaaaagaaaactttctaccatggcattaattttttttttttttcttcttttgggccggtttattaagcaacggggggttaacaacggagccagccgcgaaccaagttaaggccttaaagggaaattttttcttaaaaggggtaaattactactttttgcttgtatttgggggccgggaaggcggcctaaccttgtaaaacttaagaaccgaaacctgtccaacaggggtgatccaggaccaattggaagtctttaaaggcctaccggttaaattctcaccatatgacaaatcaagaaccatccctgtctcaactgatgtaaacatcaaattctctccaacttcgatctgggaattagccaatttcgacgagacgacgaaacaatggttcatttcaacttgtggcgttgaagggaatcccggtcagaaaacggttgataactggttcaagatcgacaaatttgaaaaagattacaagatcaggttttgtcctactgtctgcaatttctgcaaagtcatctgtagagacgttggagtgtttgtgcaagatggaaagagaagacttgctttaagtgatgttccactaaaggttatgttcaaaagagcatactagaagatgataaaacaaattccacaagaatttacaatgcttttgtaacaccattaataataaataagaacaatgcttgtttctgcaaaaaaaaaaaaaaaaaggnnnnnnnnnnnnnnnnnnnnnnnnnnnnnnnnnnnnnnnnnnnnnnnnnnnnnnnnnnnnnnnnnnnnnnnnnnnnnnnnnnnnnnnnnnnnnnn

SEQ ID NO: 130752 - DNA, 789 bp, Arabidopsis thaliana
  unsure (1)..(789): unsure at all n locations
cagatgcagttacacactatttgagaagaaagttcgcattcttgtgatggatacagagactgtatctaggctttatgagacagagcttttgcatgacatgaggaaggtcgtcgacctttgggacctcttggcttacggcagctgtatctgcacataaagtttgtcatatgctttgcatcccaaggtcgctacctatcgaggaatttgcacaggggtactaatgagataatatttaaagcgttagcagctttcaccgcaacagggatagatccatatagtgagctgccagaagacgattggttcaatgacatatgtgtggatgcgatggaaagattgagtggcaagacaaagggcaacaacggggatgtccacagtccgactgcttcagtgtcagctcagtctgtttcatcagcgagatctcatggcagctattgaaaccaaacccatcttacatttgttaagaaggtgaatggtcaataacttttgatcttctcttttcagctctgcttttccaaaagctttctattttgtagagtctccagttgttgatgagatgattttgggggcgtgtaaatgttgttgagttgacatgtttgttttcttgtattggtcctctctctctctcaatggatgcattctttgggttaaaatattgaagagagtgttgatctttcttctctatgatacactctctttctgttttggtattggatcagatgtagcgcgcccgagcgtccgagatctagataacaggttcattaaacccgtagnccggaggnnnnnnnnnnn

SEQ ID NO: 130753 - DNA, 518 bp, Arabidopsis thaliana
  unsure (1)..(518): unsure at all n locations
cttgatcagactggtcagaggacagacgacctaaggagacctttggacagacaaaatcgtantcctgaacaacgagaatggaagaggcgtttacttagtactgttgacaagttaaaagatgcgttttgtcgccagcatgccttggatctcatttttactgaggaaggagatagccatctgtctgcggatatgtacgtaaacatagatgaaaatggcgaggatgtggacttctttccatctctgatattccaggaactttttgccaaacttaacaggatggcaagtctagcagcagatatgtttgtaggaagagaaagattcgccatatctttgttgatgcgattaacagagactgtgatcttatggctttctggagaccagagcttttgggatgacattgaggaaggtcctcgacctttgggacctcttggcctacggcagctgtatttggacatgaagtttgtcatatgctttgcatcccaaggtcgctacctatcgaggaatttgcacaggggaac

SEQ ID NO: 130754 - DNA, 645 bp, Arabidopsis thaliana
  unsure (1)..(645): unsure at all n locations
taggagcactatagaagagctatgacgtcgcatcgccgcgtacgtaagctcggaattcggctcgctaaagaaaaaacacttctccaaacttttcatctccgatatctctttaactaacatgtcgaataatcaagctttcatggaattgggatggagaaacgacgtcggatcacttgctgtgaaagatcagggcatgatgtcagaaagagcaagaagtgatgaagatcgtctaatcaacggtctaaaatggggctacggctactttgatcatgatcaaactgataattatcttcagattgttccagagattcataaagaagtagaaaatgcgaaggaggatttattggttgttgtccctgatgaacattctgaaactgatgatcatcatcatattaaagatttttcagaggggtcagatcatcgattttatctgaggaacaaacatggggaccccaaaaaacgtcgtatccaggtcttaagtagtgatgatgaatcggaggagtttacaagagaagttccttcagttactcgaaaaggttccaagggaggaggagggccgggggttgggattaagattcggaccttcagaactcgtcccaattttcccaagcggcaagtttggtnttcaagccctgggtttnnanc

SEQ ID NO: 130755 - DNA, 931 bp, Arabidopsis thaliana
ctaaaatggggctacggctactttgatcatgatcaaactgataattatcttcagattgttccagagattcataaagaagtagaaaatgcgaaggaggatttattggttgttgtccctgatgaacattctgaaactgttgttcatcatcatattaaacatttttcggcgcgatcagatcatcgatggtagcggagaaacaaacatgagaaccccaaaaaacgtcgtatccaggtcttaagtagtgatgatgaatcggaggagtttacaagagaagttccttcagttactcgaaaaggtttcaagagaagaagaagagacgagaagatgagtaataagatgcgtaagctacagcaactcgtacctaattgtcacaagacggacaaggtttcggttctcgacaagaccatagagtatatgaaaaaccttcaacttcaacttcagatgatgtcaacagtgggggtgaatccttattttcttccggcgacattaggatttggaatgcacaaccacatgctgacggcaatggcttcggctcacggcctaaatccggcgaatcacatgatgccatcgccgctaattccggcgttaaattggccattaccaccgtttactaatatttcatttcccacattcatctagtcaatctctattttcttacaacatcatcatccagcttccttctcctcagtctccttcacgggttggttccctaatttcccaagtttcttgggattttttttcccatgcggtgtggaggccatcggtaaagtaagtagctcgttaaaaggttattgtgaaatgaccggtggcttattaaggggggaaagaggtccaaattaggacagtttgtgtgaaccatttgtgtcatatacttttttttccgggtggttttgtatattaataataatcaaaaagttaaaactttttgtat

SEQ ID NO: 130756 - DNA, 519 bp, Arabidopsis thaliana
  unsure (1)..(519): unsure at all n locations
agctggtggacgcgattcggaaggtgttgggttgatatatctatatgaggtttagcttctgttccaataaagatggtgttttggagttgcttgtagcattagatttgaacggcttccttgtatttgttagcgcgcacaatttagttcgtaaaaattcattcgacagcccaatgttgcaaaagtgggacagagataacttgcagaatatatatcgttgttgcttctactatgggaaacttttggtggttgatgtcaagattctagtaaaggaacttaaaagcttgtgacaagatcataacacataaaataggagttttgaatttagacacaattaaatttttttttttctcttttctcaaagtgtaactttatgtatcatttaaaagaaccatacatggaatgccaaacacttgtttagcccaaaaaaaaaaaaaaagnnnnnnnnnnnnnnnnnnnnnnnnnnnnnnnnnnnnnnnnnnnnnnnnnnnnnnnnnnnnnnnnnnnnnnnnnnnacaatcg

SEQ ID NO: 130757 - DNA, 533 bp, Arabidopsis thaliana
agagagagaagacacttagtaaagaaggtctgtgtgctgttctctccgaaattcctttttttggtctcgagggtttttcagactgtgaagagacatagctgtggcaaagatgagaggacctttaggagcagtgattggaagatatacttcaagtgatgggagtgctccaaatgatgggatcatcaagcacaatagaaagtgcagagatattacgtttctcatcatcttcattgccttttgggtttcaatgattgtcaattccagctttggtttcaaccaaggcaacccattaagactcacatatggattggactatgaagggaatgtgtgtggtagcaagcatcgtcaccgtgaccttactcaacttgagcttagatattggttaaaccctaaccaagtttatgaaagtggtttgaaagatggggaacttaaattggctaatgctagaactatttgtctcttggattgccctgcaccttctgatgatactctcaactgggtatgtgactatcctgacggcgagattcgtctca

SEQ ID NO: 130758 - DNA, 522 bp, Arabidopsis thaliana
  unsure (1)..(522): unsure at all n locations
cttctatcttaaaacttcttacctaaaatagaaatttgattttttgagaaatggcttcaaaaatttcagcctctcttgtcattttcctcacattcaacattctttttttcactttaaccaccgcatgtggcggtggctgcagttccacccctaaacccaaacctaagcccaagtccaccggaagctgccctaaagacactctcaagctcggcgtttgcgccaatgttctcaaggatcttctcaaaattcagttgggaacaccaccagtgaagccttgttgttcgctcctcaatggtttagttgatcttgaggctgccgcttgtctctgcaccgccctaaaggctaaagttttaggcattaatcttaatgttcccgtctctctcagccttcttctcaatgtttgtgggcaagaaggttccttccggcttcgtatgtgcttgatatatctatccactcttcgattggttatatggtttttttgggtacaatncttnaggtttcccaattnnagttnggggtttt

SEQ ID NO: 130759 - DNA, 414 bp, Arabidopsis thaliana
ccgctcaaggatcttctcaaaattcagttgggaacaccaccagtgaagccttgttgttcgctcctcaatggtttagttgatcttgaggctgccgcttgtctctgcaccgccctaaaggctaaagttttaggcattaatcttaatgttcccgtctctctcagccttcttctcaatgtttgtggcaagaaggttccttccggcttcgtatgtgcttgatatatctatccactcttcgattggttataatgttttaaattttctttccatgtttttctttgattaatattctttgaattttcccattttcagtgttgtttctacttcttgtactgtttacattttaaattaaattgctcagaaataagaaaaataaagtgattataaaaaaaaaaaaaaaaaaaaaaaagggcggcc

SEQ ID NO: 130760 - DNA, 461 bp, Arabidopsis thaliana
cgaaaacacacacccctgaattgattgtgttcgtggatctaccaatgataagattatcacctggatttgcagtcaatcctcgttttcgatccgattcctttgtcaattcccagaaaccgccttttctctccgtccaaatcgggtcacagcggaggaatctctctagaatcggatcggagaacggcgacggcgtcgctttcgatgctgtagcttatgaggctgatcggttgagcctcgacgcggcggcgatggaggatatggcggagactgcaaagaaggaactagaatcggatccagatagtgacccgaaagcgtggaaatgggttatccgaaagaagatgtgggatctcatggaaagctcggaactacgctatgagccctagacctgttcatcatcgaatccctaatttcgtcggtgcatcggctgctgcaagaaaattagccgagcttgatgcttttcg

SEQ ID NO: 130761 - DNA, 482 bp, Arabidopsis thaliana
  unsure (1)..(482): unsure at all n locations
ttancgttgagggaccgggcccgaatttccggggcggcccactcgctccgcccggaagtccccacacaagcaagcattcagatggatcccaagaacctaaatcgtcaccaagtaccaaatttcttgaacccaccaccaccaccgcgaaatcagggtttggtagatgatgatgctgcttctgctgttgtttccgacgagaatcgcaaaccaacaactgagattaaagatttccagatcgtggtctctgcttccgacaaagaaccaaacaagaagagtcagaatcagaaccagctttggtcctaagagaagctctaacaaagacaggcacacttaaagtcgaaggtagaggtcgacgaattcggatgcctgctctttgtgctgctaggatttttcaattgactagagaaatgggtcataaatctgatggtgaaactatccagtggctgcttcaacaagctgagccatcgattattgcagctact

SEQ ID NO: 130762 - DNA, 548 bp, Arabidopsis thaliana
ggggaactatcgaagagctttgacgtcgcatgaccgcgtacgtaagctcggaattcggctcgaggatgtaaccaaagtggccgtcaagaacttgcttaacaataggggtcaagcggagaaggaattcaaagtagaagtggaagtcattgggcgagtacgacacaagaatcttgttaggcttttagggtattgcgtggaaggtgcatacaggatgctcgtgtatgactttgtcgacaatggtgaggtggagcaatggattcacggtgatgttggcgatgtcagcccgctaacttgggatatacgtatgaatattatactggggatggccaaaggattggcgtatctacacgagggtcttgagccaaaagttgttcatcgggatattaaatcaagcaatatcttacttgatcgccaatggaatgctaaggtttcggattttggacttgctaagctcttggggtctgagagccagtatgtgactactcggggtgatggaactttcggttatgtagcaccaaatacccttgcaccggatggtaaacgagaga

SEQ ID NO: 130763 - DNA, 543 bp, Arabidopsis thaliana
aacaaactcaatcccagcctcctcctcctccgtcttctcccttattccctgtgcgtttaggcccccaattttttcaattaatccctccttttctcctcttaatctgaatccgaagcaacgcataatccataacaaagtctggaaaatttcttccgggataataaagagatccattaggagtaaattatctgacaagagaatacaaagggcaatttcattttagttgaattagggatttgggctcgtcatggctcctggaggcagtgctttgaaagaagtcatggaatctaattcaacgggaatggattacgaggttaaaacggcaaaagtggaagttaataataacaaacctacaaagccagggagtgcagggattggaaaatatgggatccattcgaacaatggtgtttacgagcttcttgaatgtcccgtctgtacaaatttaatgtaccctccaattcatcagtgtccgaatggccacacattatgttcaaactgcaaactgagagtgcagaacacatgccctacatgtcgctacgagct

SEQ ID NO: 130764 - DNA, 394 bp, Arabidopsis thaliana
tccaagcttctttttttttttttgttagctgcgtttttcttctagctagctctctgcttgtcctcgggaataatggaggaggagctgcgtgttcggctgaatgaccatcaagtgtcaaaggttttccctgtgaagcccaaatcaacggcgaaacctgtttccgaatcggagactccggaatcgaggtactggtcctccttcaaaaatcattccacacctaatctcgtctcctccgtagccgctttggctttctctccggtccaccctcactccttggccgtcgctcactccgccaccgtctgcctgttttcctcgcagtcgctttccttctcccgccgtttctccttccgcgatgttgtcttctccgtctgtttcccgtccgacggagcttttt

SEQ ID NO: 130765 - DNA, 630 bp, Arabidopsis thaliana
  unsure (1)..(630): unsure at all n locations
ctctnnnnnnnnnnnnnnnnnnnnnnnnnnnnnnnnnnnnnnnnnntacggtccggattccgggtcgaccacgcgtccgcgagaaagacgacagaagggtacggctgcgagaagacgacagaagggggcgccaaaagaaaaatggatatgtcgcttgcgttatcgacggcaccaatgagtaggacgattatctctgccacgaggcggtcccaagtttcacaacctaaagctaagaaagtcaagccggcgaataagcggccaacgatgtcgacaagcggtttctccggcggaacgacaaaggagttgacttggaagtgcgtagaaggttgtggagcttgctgtaagattgcaaaggacttttcctttgcaacacctgacgaaatcttcgacaaccctgatgatgttgagctgtatcgaagcatgatcggagatgatggatggtgtctaaactacgacaaagctacacgcaaatgctctatttatgctgatcgtccatatttttgtcgggttgagccagaggttttcaagtcactctacgggattgaagaaaagaaattcaacaaggaagctgtcagctgctgcattgacacaattaagacgatatacggccctgattcaaagaattggata

SEQ ID NO: 130766 - DNA, 501 bp, Arabidopsis thaliana
ggaaccctcccttggatggctcccgagctacttagtggaagcagcagcaaagtttctgaaaaggttgatgtgttctctttcggaattgtcttatgggaaattcttaccggtgaggaaccctacgccaatatgcattatggggcaattttcggaggcatagtgaacaatacattgagaccaaccgtgccaaactactgtgacccggagtggagaatgctgatggagcagtgttgggctcctgacccatttgttcgacctgcgttcccgggaataagccagacgtctccgcaccatgtcctcctctgcgggccacacaaaaccacacgctgtcaaccaaccaaatccacaagtaatcctatcaattttattaattcgctgggtacggaaattccgtaaaaaaatggggttggggtttaaaatatttccctgctggggttttttcgggattctgaggggcgacaagtttcaaggatgggtgtggatttgtccaagaaaccctaa

SEQ ID NO: 130767 - DNA, 422 bp, Arabidopsis thaliana
ctggttttttggttctctcccaaatttatttgaatttgacatttgatttgatttctcgaacgtagtgatttcctccgtacggcgtctccggtgaatcgaatttcatcatcgccgacatccctaaaagagtgtctatctattgattcactttcttcccaaattcttgttccctcgaattgattgacgaggaagagatttgtatttgatctgatatctcagattccaggatgaaaagaggagcccttagacgaagggctagggatatctctgttatgcttgttgtacttgtttgtgcaactgtagtcatatggacatgggatagaactccaacctcggcctttcttccacctgaaagtcactatctaaagctgcaatcagaagaaaaggttgagaaattacctactgcgctgaatactgaaact

SEQ ID NO: 130768 - DNA, 1419 bp, Arabidopsis thaliana
gctctatacgactcactttagggaaaggctggtccccctgcaggtcccggtccggatttcccgggtcgaccaaggcgtccgcccacgcgtccgcccacgcttccgcgcgatcctagcggttggccattaccaaagtggcgggggggaaatactctctatggggttcaattctctcaaaccttctcttggttcttggcacttccctcttctttggtggtatcgccaatatccgccgcgagcagcggttcgaccggaaacaagccgatgtgaacttcttcttgctgcttatgggcctgttgggtcatttgctgccattattgttaaaatatgcagcaaccggcgaagtatcgacctctatgattaacaaaatgtcgctcactctgtcgcggacaagcagcatagttatgcttattgcttacattgcttatctcatcttccagctctggactcaccgccaattgtttgaggcacaacaggatgatgatgatgcatatgatgatgaggttagtgttgaagaaactccagtgataggattctggagcggatttgcttggctcgttgggatgacaatagtcatcgcattgctatcagagtatgttgtggacacgatcgaggatgcatcggactcatggggactatcagtgagtttcataagcatcatattgcttcccattgttgggaatgcggctgagcatgctggagccatcattttcgcattcaagaacaagctcgacatatctctaggggttgcgttgggctctgcaactcagatttctttgttcgtggtcccattgagtgttatcgttgcgtggatcctgggaataaaaatggatctcaactttaacatccttgaaactagctctctagctttggccattatcatcacagccttcactttacaggatggaacttctcattacatgaagggactggttctattgttatgctatgtcatcatcgcggcgtgtttcttcgtcgaccaaattccccaaccaaatgatttggacgtgggacttcaacccatgaacaatttgggagaagttttctcagcttaaagttatcaaatgacttgtaaaaaaagaagaagagaagaaatcagcaaattatgatttgattgattcgtcatccaaaaacggagagactttgtcagagggattcctcaagcatgaatgagggagggagcttgatgaagacagaggttcttggtgtttaagaaatgatcacattaatttctgtttgctttctttttctgtttgttgttggcatttttaagtttttcttgtatattatatgttcttttgctgagtaatgtggactatattttctgatatattcgtttaccttaggaaaaaaacaaaagggcgaccgctctagaggatccaagcttacgtacgcgtgcgttcgacgtcataaatcttg

SEQ ID NO: 130769 - DNA, 374 bp, Arabidopsis thaliana
  unsure (1)..(374): unsure at all n locations
aaaagagatagctatagagacacacagtttttncctgnttacacanngaaagcactgcaaaaggagtgtcatccagatggtaggaacgtaatttgcggccactttgctaattgggagctacgttcaatggtcatcgtcgatagaagtatgttgggatcggacagttcggtgactgattatccaggaaagattccaaaggggattgatcttccaagtgatgctgttgtagatgataacaacatcaaagttgagtgattctttatgatggacactgcattgtcttcaacttttctatttatctatacacaaacaccttctttgctggatgccaccctcttattagtattactattgactatcgagttaaagatctt

SEQ ID NO: 130770 - DNA, 1027 bp, Arabidopsis thaliana
aatttggtcgcactgcaggtcccggttcggatttcccgggtcgaccacccgtccgggaagatgttgttggatggtttaacgagcatgctcagaagcttcttgagcttcatttagcttctggttttacaaagtgtcttacttggctcagaggcaacagtcgaaaaaaggaccatcatggtttgatccaagagggtaaagatttggttaattacgctctcatcaatgccgtcgccattcgaaaaatcctcaagaaatatgacaagattcatgagtctaggcaaggacaagcgtttaagactcaggtccagaaaatgcgaatagaaatccttcagtcaccgtggctctgcgagcttatggcgtttcacatcaatctgaaagaatctaagaaggaatctggagctactataacttctcctcctcctcctgttcatgcattgtttgatggttgccctttgactttcgacgatgggaagcctttactttcctgcgagctctctgattccgtcaaagttgacattgacttgacttgttcaatatgcctggacacggtgtttgatccaatacctctaacctgcggtcacatatattgctacatgtgtgcttgctctgctgcatcagtaaacgtagttgatggcttgaaaaccgcagaagcaactgaaaaatgcccgctttgccgtgaggatggggtttataaaggtgctgttcacttggatgagctcaatattttacttaagcgaagctgcagagactattgggaagaaaggcgtaaaacagagagagcagaaaggttacaacaagcaaaggaatattgggattaccaatgccgaagcttcactggaatatgatatagtttgatttgtggcttcttaagtgagattcttgattttgataataagatagtaaaaataatcttaattttgatttgctttcctctgtgagtgtgtttccttgcacagagagtgacgatttctttgtgaaaaaactgaaaactcttaagcattaaatatggtttataagtttgcataaa

SEQ ID NO: 130771 - DNA, 540 bp, Arabidopsis thaliana
  unsure (1)..(540): unsure at all n locations
cctctcctcagccactntgaaccgagtctgcngctatattaacntaacaatggtgcaagactttccccactgagtttccgttgggttaatgtaacaagacgtagccaatgcgcacatccaagcatttgaggtcccttcagctaatgggcgttattgtttggtcgagcgtgtcgttcaccactccgagattgttaacattctacgtgagctttacccaaatctcccactacctgaaaggtgtgtggacgagaatccctacgtgccaacgtatcaagtgtccaaggataaaacgaggagccttggcatagactacatacccttgaaggttagcatcaaggagaccgtcgagtccttgaaggaaaaaggtttcgcacagttctgagaaagcatttgagccaatggatttaatccagattagataaagtatttggaagactatttcagaaataatatttggaacatgtcaatgttctcaaggagatattagtatgttcttgtgtactttattgttgttccatcaaatgagttacttttcctttt

SEQ ID NO: 130772 - DNA, 481 bp, Arabidopsis thaliana
  unsure (1)..(481): unsure at all n locations
ttcctccgtccccttcccctaatccccaaaactcacatataaaaatctctccttttttcatcgaagcatataacacaacaccgacaaggagattcctttaactatggcgaagaaagcaagaattgttataatcggagctggaatggctggtctcacggcggcgaacaagctctacacaagctccaacaacaccttcgagctctcagtcgtcgaaggcggttctagaatcggcggtaggatcaatacctctgagttctcatcagagaagattgagatgggtgccacgtggatccacggaatcggtggaagccctgtttatagaatcgctaaagagactggttctttagtctctgatgagccatgggagtgtatggattccaccattgataaagctaagacctttgctgaaggtgggttcgagattgagccttncattgttgatccatctctggtttggtcactgctctcatggaattagctc

SEQ ID NO: 130773 - DNA, 671 bp, Arabidopsis thaliana
  unsure (1)..(671): unsure at all n locations
gataaaaacagctccnccanattcttcaggnatcattgaanccagtaantcaagttncaaccaccctttgggcttgttcgtcccatgctgccctctcccgcatcttaaaagttggatatcctacctgccacccacctgtggccgacttcacttgcctccttccacaagtgattggaaaccgcacaagagtttgaactccaattcacggagaggcttcctaccaggtacttgaaaccctgaacccaaagagaaaatgggacggaaacctgtcagggaaaagcagagacaatgagccccacacgtggagaggaagacggtaaaagtgaacattacagagattgtatcagtaacaccttgtgctgatctcactctacctcctggtgctggtctctgcattgataccattcatgccccagttttcttggttgcagattcatgggagtctttagatggatggcttgacgcaattcgtttggtttacacaatttatgcgagagggaagagtgatgttttagccggtattatcaccggttaataaatacttcatttaatatgactattttgcttttttatctgtagttttgtgatgtattatgatcttagcgaaatttttttgtcattttcaaacgctttttgggaccctttttcgtattttcatcgaatacatttat

SEQ ID NO: 130774 - DNA, 624 bp, Arabidopsis thaliana
  unsure (1)..(624): unsure at all n locations
cgnnnnnnnnnnnnnnnnnnnnnnnnnnnnnnnnnnnnnnnnnnnnnnnnnnnnnnnnnnnnnnnnnnnnnnccacgcgtccgcccacgcgtccgtacggctgcgagaagacgacagaaggggatcaaccagaacttttattcaaagagatctatacaaacagaactcaccaatcttatctctttccttctccaccttgctttccaatctcaagctttaactctccctgaaaatgatgataaacgcaaagaagctcatgaagttggccaagaaatggcaacaaagagcagccctcaagagaaaaagaatttcatttcagagatcaagtattactactagcagccaaacagctgtagaaaagggttgtttcgtggtttacacggctgataagatccgtttttcatttcccttaagttacctaagcaacactattgtccaagagctcttgaaaatatctgaagaagagttcggtctcccgacggaaggaccaatcacattgccattcgattcggcctttttagagtatctcatcaatctgatccaaagacgaatggatgaagatacagaaaaggcttctgtattggcaatctcaagtgctagaagctctttcaaccacaacaacat

SEQ ID NO: 130775 - DNA, 846 bp, Arabidopsis thaliana
  unsure (1)..(846): unsure at all n locations
aagcaggctaatactcctggnttcaaggtctacgcaaaacaagtgaaagccaatgctgttgcccttggaaactacctaatgagcaagggttaccagattgtaaccaatggaactaagaaccaccttgttctctgggatcttcgccctcttggattgaccggaaacaaggttgagaagctctgcgatctgtgcagcattacattgaacaagaacgcagtatttggagacagtagtgctcttgctcctggaggtgtaagaatcggtgcacccgcgatgacatcgagaggattggtggagaaggactttgagcagataggagaattcctgagccgtgcagtgacactgacgttggacatccaaaagacatacggtaagttgttgaaggacttcaacaagggtttggtgaacaacaaagatctcgatcagctcaaggctgatgtcgagaagttctcggcgtcttatgagatgcctggattcctcatgtctgagatgaagtacaaggattagagatctttctctatatgcaagagtaatcttctattattatctaccatatatataaaatatgcttttgtaggatcgccttaaaggcgaagagatgaagatgcaaacagtaaaaaaaaagggttttcttttcagctatttcttcttgaatgttttttttctttttcttttggtttcttattgaaattgttgtatttttgttggcttttttctaataatatcagcgagtttttcttaaaaaaaaaacaaaaagnnnnnnnnnnnnnnnnnnnnnnnnnnnnnnnnnnnnnnnnnnnnnnnnnnnnnnnnnnnnnnnnnnnnnnnnnnnacaatnnnnnnnnn

SEQ ID NO: 130776 - DNA, 514 bp, Arabidopsis thaliana
  unsure (1)..(514): unsure at all n locations
ccactacttactactacccaatccccaaaagctttctactttcttctcctcgtcacaaacgaaacgctaatctcatcttctgctccaccaaacccatttgctctcctcctcctccttcgtcttcttcttcgtctcctctgcaaacgacgacaacccatcgaagccaaaagcagaatctgcgtctacccacgtttgaagattcgtttcttctttaccaatttagctctcccaccgaagacccaggattctctaaccggatcccggaacaattcgacggagagccacgcgaattggtgttgccgagagtagaagacaacaacaaaagggttggcaatttcgtcgaacatgtggtgggcagatcttgaaagcggctcttgggcaacgaatcaatatttgagggtatcggttttcttcggtctcccgttggttgttaaagatcggcaatttttttcttccgaantttttctgttnaaannntttaagacanatttantnggaagcntttagaaaaagg

SEQ ID NO: 130777 - DNA, 787 bp, Arabidopsis thaliana
  unsure (1)..(787): unsure at all n locations
accggnnggaannccggggcggcccacgcgtccgaacaaaacaaaaatgtatttcgccgccatagcttcttcacgacaaagctttttgtcaaacaatttcagtttccaacacagttttaaacccaaatccaatgttaacctcactcgtcctaattcaatctgttgtaaatcttcacaccacgacgacgaaactgattcttctcggaaaaatgaaaaatcagctggcgaagttggcaatcgcgacgctagcggttggcgttttggctttgggaagtgttggggatgcgtttgcggccaaaagcggtggaagaatcggcggtcaagcgtttcggtcttcagctcctcgtcctcctcccagaattaacaatcgatcaaggaccaacatctacgtgaatcctcaggttgcaccacctttgatcggtggctatggatatggttacggaggttacggatggtcaccgttttccttttttgcccctggtcctgcggtggcagtaggtgttggcggtggctttgacctcctacttctcttcatgttttttggagccgcttcagccgtcgctagaaactttttccgatcaagaaatgatgaagatgacgaagccgactattagaggagaaaaaggagagaggcttatgtaacaatagtcatacatacgattgtgtaaaaaaatatgatggaagaagccggatatatgtggaattcttgnatttagtaaaaaaaaaaaaaaaagggcggggcggccgctctagaggatccaagcttgcgtacgcgtgcaatcatagt

SEQ ID NO: 130778 - DNA, 1041 bp, Arabidopsis thaliana
  unsure (1)..(1041): unsure at all n locations
ggcccttctgcagtaccggtccggaattcccgggtcgacccacgcgtcccaaaaatggagtcatcagtgaaacccaatcctttcctctccttctcttctttcattcaccaccagtgtacccgcttcagctccgacctctccgcccgaatcgaagacacgaaacgattcgccgaaaccctagctactcgacgtttctctcttcctactccgccgcctttcgcctccgtctcacaatccaagtctggaaccccgacgacgacgttgagtccatctcttgtcgctaaagctctcgctgggacgtcggtgtttacagtcagtaacaccaataacgaattcgttcttatctcggatcctaccggaggcaagtctatcggtttgctctgttttcgacaagaggatgctgaagcttttcttgctcaggcgcgacttcggagaagagaattgaaaaccaatgcgaaggttgttcccattactctggaccaggtgtacttgctaaaagttgaagggatttcctttcgcttcttgccagatccaatccaaataaagaatgcgttagagctcaaatcctcaggaaataagaatgggtttgatggagttccggtttttcagtctgagcttcttgttgtgaggaaaaaaaatagacgttactgccctgtatatttcagtaaggaagatatagagagggaactttctaaatatacgagagcatcaagaggagatcaacaaattatggttgggagtctggaagatgtgttgaggaaaatggagatgagcgagaagaattcaggttgggaagatgtaatattcattccaccgggaagaagttatgcacaacacatgcaggatttgatcaaagagtaaaaccataatagacacaatgtgtgtatttttacttgataaaaaaaaacagcctcttttgagattttgcaatattatcaattgcccaaagaaaaaaaaaaaaaaagnnnnnnnnnnnnnnnnnnnnnnnnnnnnnnnnnnnnnnnnnnnnnnnnnnnnnnnnnnnnnnnnnnnaacggaatt

SEQ ID NO: 130779 - DNA, 562 bp, Arabidopsis thaliana
  unsure (1)..(562): unsure at all n locations
ccacgagtccggccacgngtccgcgactttaaacatcttccaatctctgaaagcccctctcttttctccatttcgtgcttcatcatattcgtcgtcgcttcgggtcttacctctcatggaagggaacttcttcatcaggtctgatgctcaacgagcacatgacaatggcttcatagccaaacaaaaacctaatctcaccacggctccaacagcaggtcaagctaatgaaagtggctgttttgactgcaacatctgtttagacacagcccatgatccggtggtcactctctgcgggcaccttttctgctggccttgcatttacaagtggttacatgttcagttatcttctgtctccgctgatcagcaccagaacaattgccctgttttgtaaaatccaacattactatcaccgctttcggtcctctctatgggaggggcattgtcttcgccctcttccacggtttgggttcaagaacatgcagactttncnctggaannccgganacttntcaatagccttcggatncgttncntnggataantttncccagtttaaaaaaac

SEQ ID NO: 130780 - DNA, 453 bp, Arabidopsis thaliana
  unsure (1)..(453): unsure at all n locations
gtaatttcaaaagtacaatcatggaccagactcttacacacaccggatcgaagaaggcttgtgtcaggggtggcgacgggaaacttagcctctattctcatcaagcatttgcttcaaagtggctacaaagttaacactacagttagagatccagaaaacgagaagaaaatagctcaccttaggaaacttcaagagcttggcgacctgaagatcttcaaggcagatttgactgatgaagacagtttcgaatcctcattctccggctgtgaatacatcttccatgtcgcaactccgatcaactttaaatccgaagatcccgagaaagacatgatcaagccggcgatacaaggagtgatcaatgtgttgaaatcttgcttaaaatcgaaatcagtcaagcgtgtgatctacacatcttcagctgctgctgtttccatcaacaatctntctggaacc

SEQ ID NO: 130781 - DNA, 432 bp, Arabidopsis thaliana
ctcaaatgttcttaagaaatttcgaaacttttcacattcaccactcgattgaaccgggcccggttattcaatggatccagaggaggggtccgagattgccttcttcgacgttgagacgactgtaccaaagcgaggtcaacgcttcgcgattctagaattcgggtcaatcctcgtttgcccgaagaagctaacggagctccgaagctacacgactctcgtccaacctgcagatttgagtctcatatcttccttgtccgtgaggtgcaatggtatcaaacgtgacgacgtcgctttggcacctctgtttgccgacatcgctgatactgtcgacgacattctccatgggaggatttgggcaggccataacatattgaggtttgattgtgcacggatcagagaagcatttgcagagattggtcgtaaccacccgag

SEQ ID NO: 130782 - DNA, 463 bp, Arabidopsis thaliana
ctctctctctctctgcaatggactctctggtagcgagctacgcttcgtcggacgaagaagaagatcttcaaccacgtcgagaagctttcactgtaaaatcctcagaaccttccgcttcgtctctattctcagctattcctcaacctaaagaactcaaatcctccgaagatggtgatttaggctcatcttcctctcgaggaaaatcttcttctttcctctcatctctccctcctcccaaatcctcaatttcacggaaaaaaaaatcccaatccgtcgtcaattccgaaacgtgtcgtccagaattcaggcttccagtaaaaaccctagaccgggcaaattcttgccgacgaagacgacgaagaagaagagaaagctaggaagaagcgtaaacagatggaatctgcttccgcatctcacgattcatcagtaagatcgttcttatccgccatgcctgcacctaaat

SEQ ID NO: 130783 - DNA, 795 bp, Arabidopsis thaliana
  unsure (1)..(795): unsure at all n locations
aaattcncaaagtcagagctaaagcaaccgaggtattgtttaaaagtcccagtagtgtagcctctttggaacctaaatacaggggctagggtataacaactgatatgctcaaaggaaatgcttcgtctttgaatgctgatggagctgtactgaatgaacaaagcagagctctaccaaattcagccatacctacctctgagcacaatcagactacggaagctaatcaagccgtcaaagaaacaggagttttacacactagatctcgtggagttggtttggaggagacatttatctccacacaaggagtcaagccatctgaagatacgaataccgctcctcaaagtggaactgctgtagatgacttcaatgatcaagatggcgattttatccaacctacttctactatcggaaacaccacaaatgctgtcttggctcttggggcaactttggatcctactgggaactcttgcatccctaaagatgtgtttgaaacatcaaaagaagctgatgaaataggcgcatcacgtcatacttctaacggtttcccatcttcatcacctagttcaccagcggttatggaaggtcaaccaaaacccacaccaccagaagaaaccaaggcttctaagcctatagctgaaattnatggtgatgatatgncagtagggaatggctcanatggtgcaattaataacggaagcaaatgncagccacttaaagtgcctctaaacagttnaaaggaccccntttangaagagttggttcccaggggggcccnnttttttcctnactttnaaa

SEQ ID NO: 130784 - DNA, 466 bp, Arabidopsis thaliana
aatttctccaattcattgatcagatcagccatggaagacgagattgaattgaaaactgctccggctgattgccgggttcctacaacaaatcagagactaggcactgcttcactcggtacatcgagtttcacaggtgtacaactgcaaagggagaggagtctaatgactgtgaaaggtttgccaagtattaccgtgccctctgtcctggagaatgggttgacaagtggaacgagcagagggagagtggaacttttccaggtcctctttgaaccaagccttcaatcttgatgaagaggcaatcaagtccgtaataatacatggtttcaaagttaatttcttgcttgcgtgtgtatgttttggccttattatttcctctctagtgtaagtgttttattgggatgtctaagaaaggccaatcaaattataatatgaaaacattcgcttaataaaaataatttatcttata

SEQ ID NO: 130785 - DNA, 335 bp, Arabidopsis thaliana
cctgatttccccactcgacgctgatttcttctctgcttctgtaatttctccaattcattgatcagatcagccatggaagacgaggcactgcttcactcggtacatcgagtttcacaggtgtacaactgcaaagggagaggagtctaatgactgtgaaaggtttgccaagtattaccgtgccctctgtcctggagaatgggttgacaagtggaacgagcagagggagagtggaacttttccaggtcctctttgaaccaagccttcaatcttgatgaagaggcaatcaggtccgtaataatacatggtttcaaagttaatttcttgcttgcgtgtgt

SEQ ID NO: 130786 - DNA, 835 bp, Arabidopsis thaliana
  unsure (1)..(835): unsure at all n locations
ggactggcaaaggatggtccaagaggagaccaaacacatgtgtctacacgtgttatggggacttacggatacgctggtgcagaggatgtcatgacagggcatttgacatccagaagtgatgtgtatggattcggtgtacttctccttgtgatgctccttgggaagagggcaatggacaaaagcagagcttgcagggagcattcccgggtcgacccacgcgtccgggcacgacctcttttgaatcacaacaaaaagcttttgaggatcatagaccctcgaatggatggacagtacggcactaaggcgttgatgaaagtagctggtttggcataccaatgcctaagccaaaacccgaaaggaaggcctctcatgaatcatgttgtagaagttcttgagactctcaaggacgacggagatgctcaggaggaagtcatgactaatcttcatagtaggggaaagtctgtaaccttatatgaagcttctagcgattctcaaggcacaagagatgggaatggacagaggaggagaagaccggaaagtggtagaagcaagagcgaagccgcggtcgacactgaaaaatatgtttctactctttcggaaccggatactaccaaaatttaagactcaagacagaatgattccccagtgatttgagcctgtaagatcacaaagtaccccagttggcttaaaatgtataaataagttgcgtcctagaaagatgattgctaaagaattgggggggcggccnnnnnnnnnnnnnnnnnnnnnnnnnnnnnnnnnnnnnnnnnnnnnnnnnnnnnnnnnnnnnnnnnnnnnnnnnnnnnnnnnnnnnatt

SEQ ID NO: 130787 - DNA, 445 bp, Arabidopsis thaliana
  unsure (1)..(445): unsure at all n locations
cttctcaggctcccattatctttctctattttgcaaatcagtatgggtaagttcacaaccattttcatcatggctctccttctttgctctacgctaacctacgcagcaaggctgactccgacgacaaccaccgctttgtccagagaaaactccgtcaaggaaattgaaggagacaaggttgaagaagaaagctgcaacggaattggagaagaaggatgtttgataagacggagccttcttcttcacaacgattacatttatactcagaatnancaaggcccaaggttctggaattagaggcatttaatttacntaattaccntttaccaaacctaacccnggangaancttccnggttttccgggnccgggccttttttggtntggggtttgggttaagggaaaccnncgaattttnaaaggtccatggggaattttggaanggc

SEQ ID NO: 130788 - DNA, 496 bp, Arabidopsis thaliana
  unsure (1)..(496): unsure at all n locations
tttagttagtaactccacgactactcgtcaaagacatcgggcaaaccaaggccaatcaagattgggacagaattcagagagtttagttagtaacaccacgactactcgtcaaagacatcaaacaaatagaagtgcaactcctggttctcctcaagcttggccagcactaaaccgaggcccggcagaaatatcaattacaagcagggtacaatcttctggtgcttctgctcaatctcaatctaggcaccatgacagagttgaaagtactagaactcttgcttctgcagttccacaagatgctcgtaccacagttggtggatgctcatctggttctcctctgagttccgccaatgcaacaaagagggataatcatcactcgtcttcaacccctaaaatgtctgaaacaagatcactgggganttnctaattctagttctcctcaaatttccgctgtgaaaatngnnggnnatcatccccngtgaantgcnggggcctt

SEQ ID NO: 130789 - DNA, 485 bp, Arabidopsis thaliana
taatgctgcagtcatcagaggtgcattgagagcagtgagaccagagctgcttacagtaattctaccccaaagtttgaaaaaacaacctcctgagagccaagaactattgtctaaagtacaaaacgtggtagaaaagccacataatgaccatttgccattgttagaagccagcaggttgtgtaatatggacatcatatcacaagttcaacaagtgatctgcttcgcgtttcatgacagtaagcttcttatggagacatgtcaagaagccaaaaatctgcgcaagattgtcactctcttctacctcgattgattcacattcactctttattttcttctcgttacaaaacagagaagataatcctccttgtaaattatgaatcttgattaaacaaacacacacaaccacaattatattcttttgtctaaattttgaaacacatcaaaaaaaaaaaaaaaaaaaaaaaaaaaaaaaaaagggcggccgc

SEQ ID NO: 130790 - DNA, 648 bp, Arabidopsis thaliana
  unsure (1)..(648): unsure at all n locations
atccaaattaggtaaagtaggtcactttgtggtagctgtcttctacacaagaccagaagagaggcaaacagaggaatacgcttctgcacaatgacagaagaatacgaggttgatgagcagaagcaagctgctgctgatgtgttgtttagttattccaagtttgcaatggcctgcattggtaaccatactcgtcctactgacatgaggttgcatttgatgaaggagatctctggaatgccaacttctctgaaaggaagagactcttctagagcagcttctcctgatccacttggcgaatcatcaagctccggtactgccaggctagatataacggatagtttcagggcactttgattttagtttttctccacttgtcagggtctcataagatatatgctagtggattacaggataagtatctgtggccgaggaacctacttatcaagttttaacttttgatttcgcccatgatagtgtcaaatgttattaatgctgtattcccagatgtgngttctgaaaaaataaatgctatgctgcnactcgaggcggcccgaattcngcgaatttccnaccggatgtggngccgccaagaagaatccccccgggtgacccccctacccangggtctaaaaacgggagtcacctggc

SEQ ID NO: 130791 - DNA, 640 bp, Arabidopsis thaliana
  unsure (1)..(640): unsure at all n locations
tccgctnggtccncagggncntgccnctttgacncaacctggaagcaggtcaaaggcaactgcnttncncaagaaggggcncggtagagggttcagacccggaaccttagggctgaaaaggactatttctactttgaacggtttgatcaagacggtcggctggaccggagaccattttctataactcctccataccatacccggtcgatacagtctccggatgagattatcaacgctagtggtaattatcaggatcgtgctggtgcacctaaaggtttgcttctagcaataaggtcaccgtttgatcggttatttactgggaagaaaaatgccggtgagcgttcgtaccttcaatccggcgatgcgagccctgtctaggcgaattactactattggggttattaagaatattctgaaataaagaaaatctgtatatgtattttctttcttctagtttctttatgttatatgagaaattcaattccttcaccaatataatgcatctgttactgaaatagtaataaaggaaaggaccatttcgttttatcaaaaaaaaaaaaaaaaagggcggccgctctagaggatccaagcttacgtacgcgtgcatgcgacgtcatagtcttctataggtcgtacctaa

SEQ ID NO: 130792 - DNA, 486 bp, Arabidopsis thaliana
  unsure (1)..(486): unsure at all n locations
ggtacgnacggtgatacgcatnaagcttgnatcatcgcaattacgcgcgccgctgaagtagttggtggtggtttcggacacaaatcttggaacacaagctttgatcccgaccaagcttatgatgagttctgtcttttattccttagagcgctctttgatcccacacttgactatatcctcggtgtcaagtggagttcctgagtgagagtatctccaggatcccatccgccagaataattcatacagagagatgctttgcttgcttcataggtttctcatagtcgatactagtgttgtgttcctgtacttgaatgtgtgtactgctttgggttgtacccattcggttgtggaagaaatgttttatactcaagcaaggtcacgagagtgagaatttggggattaagtacaacctgaatgatgttttagcctatcccctagnatcctgccngcttgaatcttaagccgnnnntnanggggaanttcaat

SEQ ID NO: 130793 - DNA, 743 bp, Arabidopsis thaliana
acttttatttccggaacgacccacgcgtccggatctaaaccggatctgaattatggcgaacgaccaagttgatgctccttgatcactggccaagcatgtacgggatgaggacgaagatggctttggctgacaaaggagtcaagtatgagcacaaggaaacagatccatgggttaagactcctttactcatacagatgaacccgattcacaatgaagattccggttctcatccacaacgggaaaccttttagcgaatctcttattcagctagagtactttgatgaggtttggtcccatgcatccccaatccttccctctgatccttaccagaagtctcgagctagattttgggctgaattcatccgacaaaaagcttctactacccatcatggaaggtatgggcaaaaaatgggcggacgaacatcgcggccagtcatataaatgaatttcttcgggaaccacttcatatgacgcgttacatacctggagcctgtggacgaccaaaccctttatttaccggtgggttgaaagtcatttctggaataaccctatgagcatatcgcaatttacatgggtgtatatcctcaccagccttggtgctacaaaccgtctcactgggcacaaaaaatctttgggtggaaatgtccacgtcattcttgataaagccaggaaagtatctccccttaatacttttggaccttcaccgtgtgggttaccccaaaaaaagagggtggtgtttcttg

SEQ ID NO: 130794 - DNA, 910 bp, Arabidopsis thaliana
taaacacaaagagttgaaaacattaaatcgatatatcagaaactaaaccggatctgaaaaatggcgaacgaccaagtgattcttcttgattactggccaagcatgttcgggatgaggacgaagatggctttggctgagaaaggagtcaagtatgagtacaaggaaacagatccatgggttaagactcctttactcatagagatgaacccgattcacaagaagattccggttctcatccacaacggtaaaccgatttgtgaatctcttattcagcttgagtacattgatgaggtttggtccgatgcatccccaatccttccctctgatccttaccagaagtctcgagctagattttgggctgaattcatcgacaaaaagttttacgacccatcatggaaggtatgggcaacaatgggcgaagaacatgcagcagtgaagaaggaattgttggaacatttcaagacacttgagacagagctcggagacaaaccttattacggtggtgaagtatttggatacctagacattgcattaatgggatactacagctggttcaaggccatggagaaatttggtgaattcagtatcgaaacagagtttcctatattgactacgtggaccaagaggtgtttggaaagagagagtgtggtcaaggcattggctgattctgataggatcattgagtatgtttatttcttgaggaagaaatttggagcagcgtagcaaaatggtttgggtttcaagaagactgtaattttctgtcttttataatgtttcatgtgaggtttgtaattgttatttctgtcgttttgttgaaagtatgataaaccgtaataacaaaatgtctactgtacccttttaaaatcggcgacaaaacaactcaatttaaataaaccggattagcttcagt

SEQ ID NO: 130795 - DNA, 925 bp, Arabidopsis thaliana
  unsure (1)..(925): unsure at all n locations
aaagaagctgaattgattcaccaaatacacattataaagtttcaatctgtttcttcttttagggtttgggagatttttaatcggagatctcgaaaagatgatagatttcagtcgaatccagaaagagcttcaggactgcgagagaaaccaggattcttcgggtatccgggtctgccccaaatccgataacctcacccgactcaccggaaccattcctggtccaatcggtactccttacgaaggcggtacatttcagatcgatatcactatgccagatgggtatccatttgagcctccaaagatgcagttttcaactaaagtttggcatccgaatattagtagccaaagcggtgcaatatgcttggatatcttgaaagaccagtggagtccagctcttactctgaagacagctcttgtttcaattcaggctttactctctgcacctgagcccaaagaccctcaagatgctgttgtagctgaacagtacatgaagaactatcaagtgtttgtatcaacagctcgttactggactgaaactttcgccaagaaatcttctctagaggaaaaagtcaagagacttgtggagatgggttttggagacgctcaagttaggagtgcaattgaatcaagtggtggtgatgagaatctggctctggaaaagctctgttctgcttaggatctatcaactcaagcctcattggcgctagatatgttatttatttggtttataactcttatgtgctatgtttctgctcttgcctactgataagagtgaaactactttataaagattattaaatgcaaaaaaaaaaaaaaaaggnnnnnnnnnnnnnnnnnnnnnnnnnnnnnnnnnnnnnnnnnnnnnnnnnnnnnnnnnnnnnnnnnnnnnnnnnnnnnnnnnnnnnnnnngagagctgaagtatca

SEQ ID NO: 130796 - DNA, 730 bp, Arabidopsis thaliana
gtcaatgaccttcagcatgtaaacttgtctgaggaagctgatgaaataacagggtacgatgatgagttgccaagagaacccgtcgtgttgaatgagcaagcaacatcttctgctaaagtagatgccatcttgttttctcctggaatggaagctgcgaaaaaggatatatcctctctaagtgctgctgcaaccacagcccagctggttagtcatggtctggttgcgataccattcctcagtgcatttgttggtctgagagttctcaatctctcaggaaatgctatagttagaataaccgctggtgctcttcctcgaggtttacatgcattgaatttgtcgaagaacagtatctcggggattgagggcctacgtgaactcactcggcttcgagtattagatttgagttacaaccgaatactgagacttggtcatggtctggcttcgtgctcctctctgaaagaactatacctagctgggaacaaaatcagcgaaatcgagggtcttcatcgacttttgaaattgacggtcctggatttacgcttcaataagttttcaaccaccaaatgtcttggccagctcgctgcaaattacagctctcttcaggctataagcttggaaggtaaccctgcacagaagaatgttggtgatgaacaactggcaaagtacctcttggcacttctgccaaatttgctatactataatagacaaggcactaaagatgctcggctcg

SEQ ID NO: 130797 - DNA, 455 bp, Arabidopsis thaliana
tttgtgttttagaaatgaagattctgctcccgtgaatccggagcattttgtgcctgaggaatgagttaagccagatcaagattctccatgtacagataaaacagattggaaggcaacttttcaaaaggctgcagatgcagttttgaaggccattgggactcgttggaaggtaccatggactgtcgagaccattgtgcaggtaatgcttctgtgggtagccgctttctggttcattggttcatggatgatcccattcatggctcatatatcaggtttccacaaagaatccctaacatttagaggccaagctttgttcagtctgataaccgatgtaacagaaggcctagccgggattgctatcctccaccgttgcctctccatgttccgtccacttgcaagtgattgggtccgctttacccttaaaggaaactggcaactagatgttatcataggct

SEQ ID NO: 130798 - DNA, 475 bp, Arabidopsis thaliana
gtatttggagtatcggcgaagtcaatgcaatgctcttacgacgacagaggaaatagtgtcccaacaatccttctcaggatgcaaaaacgtctatacactgaaggaggtcttaaagcagaaggaattttccgaataaatccagacaacggcaaagaagagcatgtccgtagacagttgaactgtggtgtggtaccacgtggaattgatgttcattgcttggcgggtttaataaaggcgtggttcagggagctacctacaggagtgcttgatgtgttgacaccagagcaagtaatgaggtgtaacacggaggaggattgtagccggctagtgatacttcttcctccggttgaatctgcgattcttgattgggccatcggtctaatggcggatgtggtggagcatgaacagtttaacaaaatgaatgctcgcaatgtagctatggtctttgctccaaatatgactcaaatggcagatc

SEQ ID NO: 130799 - DNA, 422 bp, Arabidopsis thaliana
  unsure (1)..(422): unsure at all n locations
tatttgggggtgacgaaaagagcccgcctttgttttctaatttttggtaccagaatttttgaaaatccccaaatttttttggttctcttcttcataatcgttgaattagggttttacaatttcgagtttccccaaatctgaaatttgagtttttttttttttcttgacttttcacgttttgattcgcctgttgtttgggtttgaaatggcgactgaaaccctagatgagaagacaccggaagtgaattctccggcgaaggaggaaattgatgttgttccgaatgaggagaaggaggtagagaaagaaaacgtggattcgccgagaattggcgaanggacggaggagaagaaggaagatgatgaagagggtgaagcggaanaaggagaattnggtgngaaagataannaagacgatgtagaaa

SEQ ID NO: 130800 - DNA, 499 bp, Arabidopsis thaliana
aagatcaacttcttcttcttaccaaaactgtcggcgtcgtctcctctaagctcctcccatggaagcagaagaaggtcatcagcgtgaccgcctctgcgactattgcgactcctccgtggctcttgtctactgcaaagctgactccgccaagctctgcctcgcctgcgacaagcaagtccacgtcgccaaccaactcttcgccaaacacttcaggtcacttctctgcgactcctgcaacgaatctccctcttcccttttctgcgagactgaaaggtctgttctttgccagaactgcgactggcaacaccacaccgcctcttcctcccttcatagccgcagaccccttttgaaggatttaccggctgtccctccgtgcctgagttgctggccatcgttggcctcgatgacctcactctcgattccggattgctttgggagtcacctgagatcgttagcctcaacgaccttattgtttcgggcgggtcgggtactcataact

SEQ ID NO: 130801 - DNA, 429 bp, Arabidopsis thaliana
ctttttatttcttttatcgttttttatgttgggaagtaaaatgaaaggcaattcttaatctaatctaatattgattgaatgtctgagcattccgagactttcatgagtatatatccaaagtatcttaggtccttttcaaaactattaatttaaatctctctccggctatccaatctaattgaagactcagtaagtggaactaaattagtagtggcaagtaaagatttacagatttccctccactactttaagttttccttgaatctgataggcaaaactttaggttagagaatagaacctcgcgagccaggggcttagaataatgaaaagaaagtataaagagtcttttcctacgtttgttatttaaagtttgttgctgaggcggcacccggatttgaactggggaaaaaggatttgcagtcccccgcc

SEQ ID NO: 130802 - DNA, 539 bp, Arabidopsis thaliana
ggccggtcaagttctggcttgaaagcttatgctgaacttagtttctgatttccaggagaataaaccgttggctctagacccaaaatttgtgcaaggtctcggcagtgtgctttctgactcaagcttggacaaggaatttatagccaaagcaataacactacctggggagggagagataatggacatgatggccgtggcggatcctgatgctgttcatgctgttagaaagtttgtacgaaagcagcttgcatctgaacttaaggaggagcttctaaagatagtcgagaacaataggagcacagaagcttatgtctttgaccactcaaacatggcgaggcgtgctttgaagaatacagctctagcttatcttgcatctctcgaagatccagcatatatgggaacttgcactgaacgaatacaaggtggccaccaatttgaccgaccaatttgctgctttggcactctatcccagaaccctggtaaaacccgtgaacggacattcttgcccgacttctatgaacaagtggcagggacgatta

SEQ ID NO: 130803 - DNA, 803 bp, Arabidopsis thaliana
  unsure (1)..(803): unsure at all n locations
gtcaatattgtgaagaacaaagtcgacctatttctagtagaacacgttggagaagggtcagacctcatattccgtttgttaaacccagaccctgatttacgtcctagcgcaactgaagtgctactccatcctatgttttggaactcagagatgagactgtctttccttcgtgatgctagtgaccgagttgagcttgaaaatagagaagctgattctgaaatcttgaaagcaatggagagtacagctccagtggctataggagggaaatgggatgaaaagctagaacctgttttcatcacaaacatcgggcgctacaggcgttacaaatacgatagcatccgtgacttgttacgagtcatcaggaacaaactgaatcatcatcgagaacttcctccggaaattcaggaacttgtcggaacagttccagaaggattcgacgagtactttgctgtacggtttccgaaattgttgattgaagtctatagagtcatctctctgcattgtagggaagaagaagtattcagaaagtacttcaaatgcgacatcatctaaaagactgtttcgcttccagcactttatatgttagttattgtatgtttgtcattgttatataacataacttaactgatatctaaatgtttaacgtataacttaaactgcaacatatgtagtatttatatatgtatatatctcttcaagtaaaaaaaaaaaaaaaaaaaagnnnnnnnnnnnnnnnnnnnnnnnnnnnnnnnnnnnnnnnnnnnnnnnnnnnnnnnnnnnnnnnnnnnnnnnnnntttaatcg

SEQ ID NO: 130804 - DNA, 462 bp, Arabidopsis thaliana
  unsure (1)..(462): unsure at all n locations
gggggacccacgcgttcggatttgaagccaggatgcagtttatgaccaatccaacctacaccgccatggggcancgcgccattaacaagatgccggctattgaaatcgtcccaacccgtaaacatgtccgcttggctgctgtggatctgttggcttattctcacatggataacccgcagagtcctgatttcttgttagggaagctggaagaactggacccttttgttgaacaaatccgcgaggaaacactgaaggagacactgtgtcatggtattggatacttgcatgagggtttaagcagtctggatcaggagattgtgacacagctctttgaagctggacggattcaggtttgtgtgatgagcagttcattgtgttggggcactccattaactgcgcatttggtggtcgtaatgggaacgcagtattacgatgggagggaaaattcacattctgattatc

SEQ ID NO: 130805 - DNA, 418 bp, Arabidopsis thaliana
ggaacatgctagacagttgttggtttctagaccttagttgctaaaagctgttttcctggcgcaggtaatgcttgggattgtgagtccgcaagtgttacagtcgccaaatattgttcaggccccaagtcatatgacagggtcttcaattcaagatgcgcaattatctggtcaaaaccttttaccgccactggcacaaaggtcacagcagctaagtcgtgctccccatagtcagtatcctgtccagcaatcttctaaacaaccttttagtcagattccacaactagtagcacaaccaggtccttcttctgtgaatcctcctcctagatcccaagttaaagtcgaaaacgctccattccaacgccagcaagtggttccagcttccaccaacataggttatagtagtcagatttcagttccg

SEQ ID NO: 130806 - DNA, 940 bp, Arabidopsis thaliana
tactgggcaccccccccgaggtcgacggtatcgataagcttgatatcgaattcgcggccgcgttaagcagctggagcagttgaaagcagaggagaagatattgaagaaacagaggaaagaagagaaggctaaagccaaagccatgaagaagatgactgaaatggactctgaatcatcttcttcgtctgaatcaagtgatagtgattgtgataaaggcaaagttgtggacatgagctctttaagaaacaaggctaaaccggttcttgagccgttacaaccagaagccacagtagcaacccttcctaggatccaagaggatgcaatttcttgcaagaacaccagtgaagcattgcagattgctctacaaacatccacaatttttccttcaatggccaatcctggacagacattgaagacggtagaagcggtttcagtggttggattaccattgaatagagtagaagtgtgtatgggagggaagtgtaagagatcaggaggagctttgttgttggatgagtttcaaagggcgatgacgggtttcgaaggatctgctgtggcttgcaagtgcatggggaagtgtcgtgatggcccaaacgttagagttgtgaaggagactgatgctgtgatgactgattcagttaggacaccatccaagaccctttgtgtaggagttggattgcaggatgtggaaactattgtgacaagtttctttgatgaagaatgtagcagagaaggactcggttctgtctcatattgaaagtgttttgaaacggctaatgttttatatagtgtggtgctttctcattgtacatatttaccttctcgataagtcattgatataagccatgtaattgcgataagacctgtaaagatcaacttaaaaaaaaacatctgcaaaaaaaaaaaaaaaaaaaaaaaaaaaaaaaaaaaagggcggccg

SEQ ID NO: 130807 - DNA, 628 bp, Arabidopsis thaliana
  unsure (1)..(628): unsure at all n locations
gagccaacgagatgcggcgaggagaaagagaaggttaaggttatggagaaggagaagaaggcgttgaagaagaaggcgaaagttcttaaaagtctttctaagaacttggatatgttctctagtatagggtttggtcttgatcctgaagctggtttggttggtgagattcagaccaagacaatctcggaagctacagagatattggttaagcagctggagcagttgaaagcagaggagaagatattgaagaaacagaggaaagaagagaaggctaaagccaaagccatgaagaagatgactgaaatggactctgaatcatcttcttcgtctgaatcaagtgatagtgattgtgataaaggcaaagttgtggacatgagctctttaagaaacaaggctaaaccggttcttgagccgttacaaccagaagccacagtagcaacccttcctaggatccaagagggtgcaatttcttgcaagaacaccagtgaagcattgcagattgctctacaaacatccacaatttttccttcaatggccaatcctggacagacattgaagacggtagaagcggtttcagtggttggattaccattgaatagagtaggagtttttttggggggaantttag

SEQ ID NO: 130808 - DNA, 436 bp, Arabidopsis thaliana
gttactttagaaaaccaattataaaattctcctctttcttcatcaaattccacagagcatcagtttcttctccttctccaagctctcgcatcactttcatcgatttttcctctctgcgtcgatccttcagacatcggcgtcggagtttccgacaggaatctaaaaatgtcacgtggaagaggagttcctatgatggacctgaaacgaagttatgatgttgaagacagggtggtgtccgtgtctataccatcaataatcgaagctgatgaggctgatctgtggccactacctgagattgataccaagaagtcgaaatttccttgctgtatagtttggactcctcttcctggtgtctcttggttggctcctttcattggtcatattggactttgcagagaagatggagtcattttggactttgctggatctaacttca

SEQ ID NO: 130809 - DNA, 597 bp, Arabidopsis thaliana
  unsure (1)..(597): unsure at all n locations
gtcgcaactctctatagtgagtcgtattatagactgcctggtcgatacaacagagtccagaatacgaagaatttgaggcgattgggtaagcgatgcacatcgtcttctctgtcgatgatttgaccgaatccttctggcctgttcccgctccggcgccgtcgccgggatcgtcatcgactccgtcaccgacgcagaacgtggcggatgggatgactcgaagtcaatcggagtgggcgttccacaggcttatcaatgagttgtctggttccgattcgagccctacgactaacacaatcgagagatcacctccaccggttcagtctctttcgagattagaagaaaccgttgacgaaaccgaagatgttgttgagattcagaaaccgcagaatcatcgacggctccctgttgatgatcaagggaagaatcggaatcgtgctccgtcgtctgatccggttgattcttcagctcctgttgttgttgacccaaaccagaaccatgggatcttaaaaanaaancngncgttgttgcgtcgtgttgccgcngtgtggaactgtaaaccgaaanttaagcgtnanatcaannaaanaancaaggnnt

SEQ ID NO: 130810 - DNA, 729 bp, Arabidopsis thaliana
  unsure (1)..(729): unsure at all n locations
cgcctacgtaagctcggaattcagctcgagctttgaggcgaggaggaaacggatgcacatcgtcttctctgtcgatgatttgaccgaatccttctggcctgttcccgctccggcgccgtcagcgggatcgtcatctactccgtcaccgacgcaaaacgtgggggatgggatgactctaaatcaatcgaaatgggcctgccggagggttatcattgagtggtctggttccgaaaaaaaccctacgactaacacaatccgaaagaataccttccaccgggtgaatctttttttaaaattaaaagaaaaccgtgggccaaacacaaaaatgttggttaaaattcagaaacccgcagaatcatcggcggctccctgggtgatgatcaagggaagaatcggaatcgtgctccgtcgtctgatccggttgattcttcagctcctgttgttgttgatcctaatcagtatcatgcgattnttaagagcaagctcgagcttcttgcncngctgttgctcgtcgtgtggggactntgaaaccggaagattcgagtgcttcaactagcaaatcaaaaacaaggtcaaggctccattgtgggaaaaaactnancttggngcttcaaactgtaagattttttccccaaaaaagacggaaaaggaaaccttttnttccngcccggcaaactttgntttttattccgggggtnntttttttnttcnggngtcttttttggggnc

SEQ ID NO: 130811 - DNA, 514 bp, Arabidopsis thaliana
  unsure (1)..(514): unsure at all n locations
ccggncggattcccgggggggccacgcgtccggccgggtatggtatctcgcaccactgatcagcttcatcctcttctcaaagtcccaggtaacgaggagcataaacaaattatgggcattggttttcagcaggaaggaaacaacaatatgatggtgggcaatcaattttctggtcagttccaggatcagattcctgcatctcatgcatttccccaggaccagcagagacaggttgacgcctttggccaaggaagcatgtcagacaacatttaccgtggattcttgatgcagcggccagactggaaccccaattgtactcagataggagttaccgcacagcccctgttgagcaccgggcctttgttaaatcagaattggcaatttaggagcatgtggggcaaacacaaacggtgtcggatgtacaagccaaggcagtcaaaccggggcccgngaggantcccgggcttnnnaagnggttcttantaacgggngggcaaatnatttctttggggga

SEQ ID NO: 130812 - DNA, 492 bp, Arabidopsis thaliana
gcaaattcatctatccatcatatttctctgctgctctctgctttcttcttcttcttcttcttcttcttcttcttcttcttcttctgcttagtttgattcaaaaaatctccttcctcttcttactttatctcgtattatccattaatccgtgaccctttagtctctccatcttccgcttcaacaatcagaatttgggtttggcgaaagatgctaactttgaaagtgagactaatcgtttgagtaaaaaacatgcgaattttgtgtgatgcttgtgagagcgccgccgctatcgtcttttgcgccgccgacgaagctgccctctgttgctcctgcgacgaaaaagttcataagtgcaacaagctggctagtcggcatcttcgtgtaggctgagctgatccgagtaatgcaccaagctgtgacatatgcgaaaatgcacccgcattcttttactgtgagatagatggttgttccctttgtctacaatgtgatatg

SEQ ID NO: 130813 - DNA, 1096 bp, Arabidopsis thaliana
  unsure (1)..(1096): unsure at all n locations
gcnanttaggggcccggccccttccggntccccgnaggaaggggtcnaatccgttggttcaaggnagttggctgtcctcctcccctgttncgcttgtttggttcagggnggcccaaaggggaaacgggtttccagccacccaagtggaatcttccgggggctttttggtctgatcgtggtctcagttgctcgtttcagacaccagaagcgtggaacatgaatgatgaatacagatctctgtgttatatgagacctcttgctatatgggctatacaatgggcattgacacgaacacaatcttttggagaagagaagcaaaagttagtggcaggagatgaagaagaagaaagtaatttgttgttaagacaacacaaagggttcaaagatgtggctcgttttgtgaaaatagtaccaacgagcaatgtgcatagaagccgtctccaacacacgtacgagaccgttctcaagactctccgcttgtaagcacaggatgcaacaattatatacatcataagttattatttgtcttgtgtatcattagcgtttcttgttaagtgaggaacaaaatctaaaattctgatagtaagacgtcacaagtcacactattatctctggttttgggaagacaaatcttttgaagcatgaacaacgaaaataaatataatagcttaactatcagcaacagttcaacagcttaaggtcaacagcgattacaatgaagcattcaaggagaaagagtcagattaagatccaccttttcataagaactgtcttaccctccaactgcgtgagtgcagcaggtctagcaactttgcaacatttgatgattctcttaacgtggagttgcgtaaacctggcttgcatcgtattgagcatacgcggactggggtgattgggttttcactggtgcggtccctggagcagtcgcatacactgcagcttgagttgcaggctgttgctcatatcctgtttgagtaggtgctgcttgtgaataagcggcttggcttcctggttccgnaccatatccgtnagtaaggancttganagcttgtggtgaaccanagttttgggctnagatgaccntaagcaggtgngt

SEQ ID NO: 130814 - DNA, 908 bp, Arabidopsis thaliana
cgcctgcagtgtaccggtccggaattcccgggttgacccacgcgtccgtacggctggagaagacgacagaagggatgcaaagtacgaaaaggcgaagattgtttacgagaagctatggaatggttcttacttcaattatgacgatagtggtagtggctcgagctcttcgattcttgctgatcagttggctggacaatggtatgcacgagcgtgtggattgaagccgataacgaaagaagaatggataaagaaagcactagagacgatctatgagttcaatgtgatgaaagttaaaggagggacacgaggcgcagtgaacggaatgtcaacggaaggaaaagtggatgcaaattcgttggtttcaaaggaagtttgggctggtactacttactctgttgcagcttgtatgattcaagaagggcaaagagaaaaagggtttcagacagcaagtggaatctacgaggctatttggtctgatcgtggtctcagttgctcgtttcagaccccactagcgtggaccatgaatgatgaaccccgttctctgtgttttatgaggcctcttcctatatgggctatacaatgggcattgacccgccccccatcttttggagaagggaagccaaagttagtggcaggagatgaagcacaagaacgtcatttgttgttaagtcaacccaaagggttcaaacatgtggctccttccctcaaagggagggacacccccctaatgtgcataaaagccgtctccaacacacgtacgagaccgttctcaaaactctccgcttgtaagcccaggatgcaccaattatatacatcataagttattctttgtcttgtgtatccaaaaaaaaaaaaaggaattaacccacccagcgaacgctctagaggatccaagcttacgcacgcgt

SEQ ID NO: 130815 - DNA, 736 bp, Arabidopsis thaliana
gggatattttcccgggggtcgacccccaacgcggtcccaaaaacttaatttatattcacaggctgccgtgtaccttctccatccaaagatggcaactatagctactggtcttaacattgcaacccagcgtgtcttcgtcaccagcgagaatcggccagtttgtctcgccggtccggtccatttgaacaattcgtggaatcttgggtcaagaacaactaaccggatgatgaaacttcagccgattaaagcagcaccggaaggagggatatcggacgtagtggagaaaagcattaaggaagctcaggagacttgtgcgggcgatcctgtgagtggagagtgtgtagctgcgtgggacgaggttgaagaacttagcgcagcagctagccatgctagagacaagaagaaggctgatggttcggaccctttggaggaatacttgcaaagacaatcctgagaccaacgagtgccgtactttcggcaactgaagcgatcaagatcctgttccgggttcatacggtttcggcaaatctttgttccggtccatttgggaatttcaggttatataaatcatgtctttgaatctgaattagctctaaccacatttgtaatttgcagttccataaacagaaggaaagcccagctttcataaaaaaaaaacgaaagaataggtcggccgctctagaggatcccagcttacgtacgcgtgcaagcgacgtctagactggtcttatagtgt

SEQ ID NO: 130816 - DNA, 671 bp, Arabidopsis thaliana
  unsure (1)..(671): unsure at all n locations
actcccatacctatanctaagcgcctgcacgtgccggtccggaattcccgggtcgacccacgcgtccgcaggctgccgtgtaccttctacatccaaagatggccactatagctactggtcttaacattgcaacccagcgtgtcttcgtcaccagcgagaatcggccagtttgtctcgccggtccggtccatttgaacaattcgaggaatcttgggtcaagaacaactaaccggatgatgaaacttcagccgattaaagcagcaccggaaggagggatatcggacgtagtggagaaaagcattaaggaagctcaggagacttgtgcgggcgatcctgtgagtggagagtgtgtagctgcgtgggacgaggttgaagaacttagcgcagcagctagccatgctagagacaagaagaaggctgatggttcggaccctttggaggaatactgcaaagacaatcctgagaccaacgagtgccgtacttacgacaactgaagcgatcaagatcctgttccggattcatacgtatacgacaaatctttgttccggtccatttggtaatgtcaggttatataaatcatgtctttgaatcctgaattagctcctaaaaacatttgggatttgtggtacagtcccaataaatcggatttgccaaaaagccnnnaaanttnc

SEQ ID NO: 130817 - DNA, 630 bp, Arabidopsis thaliana
cccacgcgtccggaaaaaaaaaaaaaagtagctgctttggcgacatctgttgcgactctatcgtctgcaccaccagtatctctgcctcgcctctcatcatctcgctcttccttcttctccaattgcttcacagtcacgacccgaccaaacactcgttctctggtagcgattggacgcagaatccgacaagaaccaacgagaaagccactgacttgtaatgctttgtttggtctcggtgtgcctgagcttgctgtgattgctggcgtcgctgcgttgctttttggacctaagaaacttcctgagattggcaagagtattggcaaaaccgtcaagagctttcaacaggctgcaaaagagttcgagtctgagcttaagacagaacccgaagagtctgttgcagaatcatctcaggtagcaacgagtaacaaagaagaggagaaaaaaactgaggtttcttcaagctcaaaggagaatgtatgaagatgagagacttcagtgtttgcttttccttgtagctacaacaattttatgtcatgaagagtttagatcaaatattattgtctggaggaaacaaaatagccttccaatgaaaagtataaattaaaaaaaaaaaaaaaaaagggcggccgc

SEQ ID NO: 130818 - DNA, 421 bp, Arabidopsis thaliana
cggacgcgtgggggaaaaaaaaaagtgaagatccatcacctgtaaagcagaagcagaagttgtggcaaaggcggttgactgttctgatacgctccgacgagcaaaatcggagttgatagaaggtgaaggagtattcccaatctgaggatgagcagagaaagcttcaagccaatctgtcacattaacttggttgaaccagatgtctcttgcagtatatattgcttcttgagaagttaacggtccagacgtagacatctgcttcgcgaattcggagcttccacagcaaaccttccattcatcttctccgatctccatcgccattttttctctcttttctccaatcctcacttctgttgactggtgtaagatcaaaagtcatctaattgggccttttcataaacgggcttttcaaaaatgggcc

SEQ ID NO: 130819 - DNA, 443 bp, Arabidopsis thaliana
actattggcctattttcaaacctttcctttaacgcatggagcatctcagcgtgagtcctgccagaagcgcaaataatgaagataaagcccaacttccttttgtaaagtacattccattcggcaagctcctgtaaagcagaagcagaagttgtggcaaaggcggttgactgttctgatacgctccgacgagcaaaatcggagttgatagaaggtgaaggagtattcccaatctgaggatgagcagagaaagcttcaagccaatctgtcacagtaacttggttgaaccagatgtctcttgcagtatatagtgcttcttgagaagttaacggtccagacgtagacatctgcttcgcgaattcggagcttccccagccaaccttccaatcatcttctccggtctccatcgcccatttttccggacgggtggggcggacccggaaatc

SEQ ID NO: 130820 - DNA, 749 bp, Arabidopsis thaliana
  unsure (1)..(749): unsure at all n locations
cttcactttctcgcactttccctctcattttcccgatcatagaaacagcattgtacagagatttcaaagaatggcacggggctcttccttcaacgtattcgcttcctactcaccaaaacccaaaaccatcttcaaagattccaaattcatttcacaatttcaggtaaaggtcgtctcctttagcttcaacattccacacaaatgaatcctcaacgagtcttaagtataagagagcgagactcaaaccaatttcatctctagactcgggaatttcagaaatcgctacatcaccttcattcaggaacaaaagccctaaagatataaacgttttagtggttggttcaactgggtacataggtagatttgtagtgaaagagatgatcaaaagagggttcaatgtgattgctgttgcgagagagaagagtgggattagaggcaaaaacgacaaggaagagactttgaagcaattacaaggcgccaatgtgtgtntctctgatgttactgagttagatgttccttgagaaatctattganaatcttaggatttggtgtttgatgtttgttgtttccctgttctcgcctagtccgtaatggaagggattaaaagattccgtggaaagattgattatgaagctacccaaaacagtccttgttncttggnaaaaatttgggtgcctaaacattttggttttgccccccngccnaattgtttttccaaaaccctttactggnatttncccnaaaaccaa

SEQ ID NO: 130821 - DNA, 566 bp, Arabidopsis thaliana
cagagagagaacgattagcccagttccgatatcgttcggtggcttcttcatctgaagctacgatgatgtcggtgagagcaatcaatggttgctccatcattcgcaccgccacttccgccggcggtcctcccgtctctctattccgccaccgtattcagcgcctcagagcttctcatctccgtgaattctcgaaattacgtttaaattttccactaatccgcgcggataggcggtttctcggaaatagtgatgctccgagctgttcgacttgcatacatagtctggtcgaaagtgtttccgaagagctcgaatccatcagcagacgcaagggaagccgaatgagagttcgcgccagtgtaaaggtgaaattaacaagctacggagaggttctagaggataagctagtaaaccaggagctagaggctggtttgcttctggagtttaagaaggacgcaaacagagtgttgttggcagttcttcatagacgtgatggcaagaagaattggatggtgtttgatcaaaatggtgttagttgttccatcaaaccacagcaaattacatacatc

SEQ ID NO: 130822 - DNA, 1073 bp, Arabidopsis thaliana
  unsure (1)..(1073): unsure at all n locations
cacacacaatcaaaagaagatcaagccaaattcataggcattgcgaattttaattgatcactctctctctctatctctgttcacacatctctcccaaagatattttggaatttgattagtaggtagaagaagatggggacgacgttagatgtatcaagagcagagctagcacttgtggtaatgtatttgaacaaagcagaggcaagagataagttatgcagagctatacagtatggttccaagttcttgagtggtggacaacctggtactgctcaaaatgttgacaaatctactagcttagcaagaaaagtcttccgtcttttcaagtttgtgaatgacttgcatggtcttatcagtcctgtgcctaaaggaactcctcttcctcttgttttacttggaaagtcgaagaacgcacttttatctacattcttgttcctggatcaaattgtctggcttgggagatcaggaatatataagaacaaagaacgagctgagttacttggacgtatatctctcttctgctggatgggatcttctgtctgcacaactttagtcgaggttggtgagatgggaaggctttcttcatcaatgaagaagatcgaaaagggactcaagaatggaaacaagtatcaggatgaggattatcgtgctaagctaaaaaaatcaaacgagaggtcacttgctttgatcaaatcagctatggacattgttgtagcagctggtcttcttcagttagctccaacgaagatcactcctcgtgtcaccggagcttttggattcatcacctccatcatttcttgttaccagttgcttccgacacgccccaagatcaaaacaccctgaagtcaatcgaggaagctggtgttaaggagaaagtcatttcagaaagtttctgttcttcttattattaaggaaattcactgctgttataaaacgcggccgnnnnnnnnnnnnnnnnnnnnnnnnnnnnnnnnnnnnnnnnnnnnnnnnnnnnnnnnnnnnnnnnnnnnnnnnnnnnnnnnnnnnnnnnnnnnnnnnnnnggaagtgcaattcaaatttgggcccggggggc

SEQ ID NO: 130823 - DNA, 416 bp, Arabidopsis thaliana
gttcttgactgtccggtttgcttcgagccgcttactattcctacctttcagtgtgatgatggacatatagtttgcaatttttgctttgccaaagtgagtaacaagtgccctggtcctgggtgtgatttacccattggtaataagcgatgcttcgcaatggagagggttctcgaatcagcctttgttccatgtcaaaatactgagtttggctgcacaaaaagtgtctcttatgaaaaagtgtcaagtcacgaaaaggaatgcaactactctcaatgctcttgccctaacctcgaatgcaattacactggctcatataacatcatctacggtcactttatgcgtcgccatctttacaatagtacgatcgtttcctccaaatggggatattccactgttgatgttctaataaacatcaa

SEQ ID NO: 130824 - DNA, 646 bp, Arabidopsis thaliana
aaagaaagtgctaatattgatctttgtacatcaccagttaaggctgaggcattgtcaccacttacggctaaggcatcatcacctgttaacgctgaggatgctgacatagtatcgtcaaagcctagttctgatttgaaatccaaaactacatctgttttcatacctgatggtgaacgtttatgggaaggtgtgctccagctgagtccttctactgtgagctctgtcatcggcattctaagaagtggcgaaaagactactacaaaagagtggcctattttgctcgagattaagggtagagtctgattagatgcatttgagaagtttgttcgagagctcccaaattccaggagtcgtgctgtaatggttatgtgtttcgtctgcaaagaagagtgctcaaagacagaacaagagaacatttccgaggtggtggattcatacgctaaagatgggagggtgggttatgcagaaccagcttcaggagttgagctatacctatgcccaacccgtgggagaactgtcgagattctaaacaagattgttccgagaaaccaactcgatttcttgaaatatataaatgatgatggtcttataggtgttgttgtatggagaagaccacaatttaaaaaatcaccactatctaacaact

SEQ ID NO: 130825 - DNA, 513 bp, Arabidopsis thaliana
cggacgcgtggggagtctctgagtgtgtaaatgaagcgcctttttctctcctccatcgtaatgcgcagagaagacacactacattgactgagagggaacaaacacaaagcgatgtcgcaactcttatcgactcctctaatggcggtcaactccaatcctcgctttctctcttcgtcttcagtactcgtcaccggaggttttgcagtgaaacgccatggattcgccttgaaaccgacgacgaagacggtgaagctcttctcggttaagtctcgccagacggattacttcgagaagcagaggttcggtgactcttcttcttcttccttcacctgctgaaggattgcctgctagattttacgggggtcattcgatatacaaagggaaagctgcgttaacagtggacccaagagcaccagagtttgtggctttagactctggagctttcaagttgtcaaaagatggtttcttattgctccagtttgctccttctgctggtgtacgacaatatgattg

SEQ ID NO: 130826 - DNA, 593 bp, Arabidopsis thaliana
  unsure (1)..(593): unsure at all n locations
tgttttaggtgcactatagaagagctatgacgtcgcatgcacgcgtacgtaagctcggaattcggctcgagcgaattatataaacttaataacaaaaacaattatccttccttaatcctattttgtttttacttgattcttcattctcagaaatcttgaccatgaaggaggatcgtcgtcttcctcacaaacgcgacgccttccaattcttgaaaaccaaggctgcgtacgttatcgtcatagttctaacctacgcctttggttacttctccgcctaccactatcatcaaccgctgcagcagcagctgccaccgtctacgacagccgtggaaacgacaaaacctcaagtttgttcaatcgacaacttccgagttacgactccatgcggcaatcttgttccgccggaattgattcgccagactgttattgaccggatctttaacggaacttctccgtacatcgatttcccaccaccgcacgccaagaagtttctccggccaaaaagaatcaaaggttgtggatcatacggngccgttttcgagaatctaatccgccgagtcaaacctaagacgatcgtcgaagtcgggagtttt

SEQ ID NO: 130827 - DNA, 563 bp, Arabidopsis thaliana
  unsure (1)..(563): unsure at all n locations
cgctctgctggcttagcacgtgtttacgcattgtggaacttcatgtccttagtcaatgtgggggtggcttttctctgcggatatgttcattatcatagtgaatcatcagctagcaagaaaatcccatttcagccgtggaatataaacatgggtgaaagtgaatggtggatattcccagcaggactggtcgtgtgtaagataatgcaatcgcagctcataaatcgacatgtagcaaacctggagatacaagaccgctcgttgtatagtaaggattatgagctgttttggcagtcgtgacaaagtcttgtcaggtaatttttctcagaacaactaaaaacagtcctgccccaagtttggagtggggatttcagtttgttttttttgttcttttgtttctcttcttgtaattctattactccaggtgaatagaattaggatacaaaagagaaggaactctgattgttaaaaaaaaaaaaaaaaaagnnnnnnnnnnnnnnnnnnnnnnnnnnnnnnnnnnnnnnnnnnnnnnnnnnnnnnnnnnnnnnnnnnnnnnnnnnncattc

SEQ ID NO: 130828 - DNA, 455 bp, Arabidopsis thaliana
atatattgagaatgagagagaattaagaaaaagagagagaaaacaatggaggaaaagcaagtgaaggagacaaggatagtgttggttccagttccagctcaaggtcatgtaactccgatgatgcaactaggaaaagctcttcactcaaagggtttctccatcactgttgttctgacacagtctaatcgagttagctcttccaaagacttctctgatttccatttcctcaccatcccaggcagcttaactgagtctgatctccaaaacctaggaccacaaaagtttgtgctcaagctcaatcaaatttgtgaggcaagcttcaagcagtgtataggtcaactattgcatgaacaatgtaataatgatattgcttgtgtcgtctacgatgagtacatgtacttctctcatgctgcagtaaaagagtttcaacttcctagtgtcgtctttagcacgac

SEQ ID NO: 130829 - DNA, 789 bp, Arabidopsis thaliana
  unsure (1)..(789): unsure at all n locations
gcnccacctttngnnagttccaanttncttcccccaattncttnatggttccagtgcaaggttggctaccctcgttccccccaagggttgatggctccgacttctctaacccatccggcaccaaacccggtgctatcataggccgagaagttggggactgggtggccaaagcttatgaccggcccgtagagctggttgagcaccccaaagtgaaagtggctgagatcgccgagcttttacttagagaaagaggtgttgcatcaggatgatctcttaaaaattttaggtgaacgtccgtttaagtcagctgaggtccctaattatgaccggttcaagtctgggtttgaagagactgagaaggactcagccgccacccctacagtggagcctgtggtggatgatggagctcccccgccgtttgaaccccaggttgttccgacgtaagagaaacgtcactgttacaactgtaaatttgatcaagtatgcaataacacaattcaaaaaaagcattctcttgttcttcaatgtttttagtgacgacggaatttgttagcaatgaacattttttgttttctaaattattgcttctaataagatttttatttgcttttcagtctcattctaaaagtttgcgttttgtaataaaggattgaatatgatgatgatattgttacatcttcccagnnnnnnnnnnnnnnnnnggaacnnnnnnnnnnnnnnnnnnnnnnnnnnnnnnnnnnnnnnnnnnnnnnnnnnnnnnnnnnnnnnnnnnnnnnnnnnnnnnnnnnn

SEQ ID NO: 130830 - DNA, 704 bp, Arabidopsis thaliana
acttgcatgactctcggaggccgtgcagctgtttttttattgataggtaaaatctcaacgggtgggcataacgatctagagaaggtgacgaatatgacttacgcgcaagtagctgtgtatggtttcagtgacaaggttgggctactctcgtttccaccaagggatgatggctacgacttctctaaaccatacagcaacaaaaccggtgctatcatagacgaagaagttaggggctgcgtggccaaagcttatgagcggaccgtagagctggttgaggaactcaaagtgagagtggctgagatcgccgagcttttactagagaaacaggtgttgcatcagcatgatctctttaaaaattttaggtgaacgtccctttaagtcagctgtaggtcactaattatgaccggttccagtctgggtttgaagagactgataaggactcagccgccacccctacagtggagcctgtggtggatgatgaaaaaaacccgccgtttgaaccccaggttgttcccacgtaagagaaacgtcactgttacaactgtaaatttgatccagtatgcaattactcaattccaaaaaagcaatctcctgttcctcaatgtttttagtgaaaatcgaatttgttagccaataaccttttttgtttttcgcggcccccaattcgatatccagcctttggtttctcccttcagccagggggg

SEQ ID NO: 130831 - DNA, 528 bp, Arabidopsis thaliana
ccgaagcgagtctgactctctgagtcgtcaccaccgagtcaactctgtctccgccatggctgctgcttcactccacacttcaatctcaccacgtagcttccttcctctctccaaaccatctctaaaacctcaccgttcccaaattctactgagaaacaaacagaggaattgcgtttcgtgcgcattgatccgtgacgaaatcgacctgattccggttcagagccgagatcggaccgaccatgaggaaggttcggtggtagtgatgagcactgagacggcggttgatggtaatgaatcggttgttgtaggttttagtgctgcgacgagtgaaggtcagctttcgttagaagggtttccttcttcttcttcttcgggagctgatttaggagatgaaaagagaagagagaacgaagaaatggagaagatgatcgatcgaaccattaacgctacgattgttttagctgctggttcttacgctattaccaaattgcttaccatcgatcatgattattggcatggatggactct

SEQ ID NO: 130832 - DNA, 466 bp, Arabidopsis thaliana
  unsure (1)..(466): unsure at all n locations
gcgtccgggacgcgtggctattttctacggctgagcttattttagaatccctgaatccgattactgcgattcacattttcccgatgacttccactctaatctcctcaaacctctcttcctctttcttcccaacccaaaatatccaccgaattcgaatcccgacgacttcaattcccggaagtttcaacattcgcgcacgccgttcaaaaatcgtcgccaaatctctcgatcttcctcttcttccttttagcatgagcgaggttcttgtaccaacggagagtaaaactttgcatttatatgaagctaggtacttagctttactcgaagagtctatgaaggggaaggaggatatgtttgttccatttnantcttgganccctntttggtttnggggggctgnnaaanaaaaaggttttttttncgncnggnaaaanggggcttgggnctttttttaaaagggttgggg

SEQ ID NO: 130833 - DNA, 507 bp, Arabidopsis thaliana
gtaacgccttatatgctgggcatttggactattgttcttttccagttggtacgcggatggattacctatcagagttgacagtcactatgcccatattgtgtttcattgggacaaatgatcctccagaagaacccattgttaaggtttattgtgttcagactctagcaatccagcagtatacattagacttgtgcttatgcttgccaccacctatagaaaatatgggtttggagaagtcagattctagtgtatcacgagaggcaaatcttgttgaaggcatgtcagaaccatctggacctaaacctactgacttaccttcagttgattcagtgccaaaaccttcgattatagtgaatagatcagaaagtgctaataagttgagttttccatcagcggaagccacatcacaagcaattgttccacccaacggtgaacctaaaacttctggcctgccatcttaaaccagtggtgcaggttctgcgtatgctactttaccccaactttctc

SEQ ID NO: 130834 - DNA, 463 bp, Arabidopsis thaliana
cgcgtccgctctctctctctctctctctctcgctcgtgttgtgatccgcgtagagagattggatttgctgaggaacggtgcaatgtctcgctaccagtctcattcctttgatgacggagaaattaatccttttgcgaatcctacaagtgtcccagctgcaacgtcaaagctttctcctcttccccctgagccgtacgaccgtggtgccacaatggatattcctcttgactctggaaaggatctgaaagctaaggagaaggaactccgggaaaaggaggctgaattgaagaggcgggagcaggaaatcaagcggaaagaagatgctatagcacaggccggaattgtgatagaagagaaaaactggccaccgttttttcctctcatccatcatgacatttcaaatgagatacccatccatctgcagagaatccaatatgttgctttcacatcaatgctgggtctt

SEQ ID NO: 130835 - DNA, 1133 bp, Arabidopsis thaliana
gccgtctgcggtaccggtccggaattcccgggtcgacccacgcgtccgctcttctcttttttttgtctgtgcaaagatatcactttcttgctcccaaagcaaaatcaactcttcttcttcttcttctcccagacatcagcaagattcaggagattaaaaccttaaattaaaacaatacaaactccaaattcaccggaggaaataacttaaaacttgaatctgaaaagatgagctgcaatggttgccgtgttctccggaaaggttgcagcgagaattgtatcctccggccatgtattcaatggattgaaaccgccgatgctcaaggccacgccaccgtcttcgtcgctaaattcttcggccgtgctggtctcatgtcctttatctccgctgttccggattctcaacgtcctgctttgtttcagtcgttgctctacgaagcttgtggaagaactgtcaatccagttaacggagcaatcggaatgttatggactggaaactggaatatctgtcaagcggctgttgaaacagtgctttcgcggcggttctttaagaccgatcccggagcttctcactcacggcggcggtttcgctggctttccttcgcctccatctgaagaagcatctgagatctgcaccgaaatgttgaatctccagcaaaatgattccaccgatcgtaacatctatcatcattcacgattctcaagctctagatctagatctactatggattcttcttctccgacgaaacgtaagagattatcatcggaagaccaaccatcttcggagcttgatctatctctcatccctaattttcccattaagcaaacaacaccttcttctacacggcggcgatcagtaacaccgtcgatgaactcagaggactccggggacgacggacgactacgacggcgttttgtgacaagggtgatgtgtacggtaacggaggaggagaaacgaccaagttgcttaacctttttgtttaatgcaaaacggcgtcggttttctcagagttagtctagggttttaaatgtaattttacacattttcttcctaaaaaaaaaaaaaaaaaagggcggccgctctagaggatcccagcttacgtacgcgtgcatgcgacgtcaagatcttctaag

SEQ ID NO: 130836 - DNA, 660 bp, Arabidopsis thaliana
  unsure (1)..(660): unsure at all n locations
aggtagacactatagaagactatgacgtcgcacgcacgcgtacgtaagctcggaattcggctcgagtttttttgtctgtgcaaagatatcccttcttcttcttcttctcccagacatcagcaagattcaggagattaaaaccttaaattaaaacaatacaaactccaaattcaccggaggaaataacttaaaacttgaatctgaaaagatgagctgcaatggttgccgtgttctccggaaaggttgcagcgagaattgtatcctccggccatgtattcaatggattgaaaccgccgatgctcaaggccacgccaccgtcttcgtcgctaaattcttcggccgtgctggtctcatgtcctttatctccgctgttccggattctcaacgtcctgctttgtttcagtccgttgctctacggagcttgtggaaggacctgtcaaatccagttaaccggagcaatcgggaattgttatggccttggaacctggaatatctgtcaagcggctggttgaaccagtgctttcgggggggttttttaagncngtnccggngtttttactacgggggngggtttcntgggtttcnttngctaaatttangnggatttnggnttnccgaattttnattccgaaaatnttcccgtgaaaattntnnttgggt

SEQ ID NO: 130837 - DNA, 407 bp, Arabidopsis thaliana
gcacgttacgcgtgggtttgcatttctttcgttatcttagtccccaacattttcactgccgtgaaaaggacgagctttctctaatggctgctttgaggtacgagcttccatcacaaggacttctacataaacgacctcttatagtcagaggcgatgatatggaattcagcaagtttggttcagatacagcctatgatctgatatacgcaagtgcagtctttctccacatgcctgataaactcgtgtggactggactcgaatgattagtagacaggttaaaaccttacgacgggagaatcttcgtgtcacatagcgtaaagttttgttcacggttaggacaagacaagtgttctcagaagctagcatgtttaggacttgagtatcttggaaaacaaacacatgatagc

SEQ ID NO: 130838 - DNA, 699 bp, Arabidopsis thaliana
gtggtgatgcttggaacttcctgttagtcgactaatcctgctttcacatccatagactgggttcattttcaaaggcgaattcggccctcgcggccgctagagatttcatcagcagtttgcctgatgaggttcttggcaaaaaaatcttatctttacttccgacaaaactcgttgtatccacatctgttctgtccaagaggtggaggaatctgttccattttgtagacagctttgatttggaagactcaacacctatcagaaatgctgatagcttctctgatttcatgaaagatacagtggctctgttaagcaattgtcccatcaagagactcactctcaattcccactatgaaaaatctagtgttaaccgttggattcgcagtgccctcaaacgcggctgcttggaacttaacttgcaggcccaatatgatccattatcctgggtataggggttttccttccgcaataatacatgggttaaactcacattatctagttatcgaacttttcttcgaggcaatgttccacctgagggcagagtgtttttccctgcgctcaagacactttccctcggtgctgttgttgctaagccagctctgtataactggctcatctctggatgccctgtgctcgaggaattattcatacttgatgttggtagtggtgatgaccagccaacttggacgaggtctgtggtta

SEQ ID NO: 130839 - DNA, 505 bp, Arabidopsis thaliana
  unsure (1)..(505): unsure at all n locations
gctcgccagaaacaactccttcagaatcatgctaaagagctagctggcttgaagagcggggataactggaatgatagcattcaatcaaaggagaaagttgaagcgaatttgctaagcaagtacgaggcaacaatgagaagggaaagggcattggcttattcatactctcatcagcaaaactggaagaacaactctaaatctggaaacccgatgttcatggttccaagcaacccgacatggggttggagctggttagagagatggatggctggtaggccactagagagttccgagaaagaacaaagctacagcatcaatgacattgctgcctcggtcaagggctctattaaccgcaacggagctgcaaaatctttaacccgcaattggctcaactcaaccaaacacaccttatccgnaggggggccccaggnaccaaaacagntttttttacctccanntccttagggtnaccattcctgggggnttccttgngggggtttaaagg

SEQ ID NO: 130840 - DNA, 432 bp, Arabidopsis thaliana
gtcatcatctctcaacaatgcccgttgccaatcttctccgcgtcctcttggtagctggagaagctcgtttgattccattttgtctctaatggctgccctcgcttctccctccctcatcccctcttctctctgcttcgctgccgccgccgatggtccccgttccctctcttctaatttctctgccttttccgacggcggttccaatttcaggtatcacaagagcttcttgtcgctttcatcttcgtcttcttcgtctacgccttatcgaaatcgacggggccgttccctcgtcgtatttgctgcttccggagactactacgccactctcggtgtctctaaatctgccaataacaaggagatttaagctgcttatcgacggctcgctcgtcagtatcatcccgatgtgaacaaggaacccggagcaactgaaaa

SEQ ID NO: 130841 - DNA, 892 bp, Arabidopsis thaliana
agcaaaagcttttggtagtcgtaaccattacgccaaatcattaccgttcaactgaaagctaacagagagccctcttttcttgggaattcgattccttgtacgttatcttcttcttcttcttctctttctcaaaattcgtgtatcttctgggaaattttcagatttagatggagaaaggggttggatttgagaaagacatgaagacagtcagtgatgggtttgtcggaggttttttccctgtctctaccaccaagatcgcgtggaaatcaagaaaaagatcagcattgttgaacctagacatagcaccggaggctgttacggaggtcacaccagagaagtacgagattacagctttggataccgagtaagttggggaaccaatgaccacaactcctcttctgtccgagaaaaggaaagctctgttcgacccacttgaccccattacggacttgaccggaaaccgcccaactgcggctgatccattgttccccccgccggatttcgagactgcaaactacccaaaaggctggttgatcggtaagaagaggaagcttgtgaatgttgatgtagttgagagcatgcgtagaatagctgtcccaagaaatgaacagaaaggatcgagagatagatgggttaaacgagcagctagaagaggattcccggtgcttagagcatctacagcttcagctgctgcaagagagaagcaagagaccagagattgaaagagagaacccaatgttgaaagagcaagttgatatgcttgtgaacatgatacaagaagatgacgaagaaggagctgaagacccctaagctagttctcatcaaatttatgtctcccctataatagcggtgttctgttttttttattctttggtagatttgtctcgtcccc

SEQ ID NO: 130842 - DNA, 483 bp, Arabidopsis thaliana
aaagcacaaaacttttgcattgtcttgcaaaaataatagaacaaagaagtcgcagttgattttatggacggctaaggctgatgttgacctgacacaaaactccgatcgtgttcgattacgggtttagatttttctgagaacccttataattgtttcaacttttggatcttcacacgcataaattttcgcttcgtctttcatcatctgttctcaagtttagagtctatagtcaggaaacttggaactttaggatttgattgaaaaagcaatcttgcgatggcgaataatgcggctgcttgtgctgagagggctacaaacgatatgctgatcggtccagattgggctatcaacattgaactgtgtgacattatcaacatggaaccaagtcaagcaaaagaagcagtgaaggtgctcaagaaacggttaggaagtaaaaattctaaagtccagattcttgcttcttatgctttggaaactttgagt

SEQ ID NO: 130843 - DNA, 337 bp, Arabidopsis thaliana
gaaaaacaaaaaacaaaaaactgataatatttctctctctctctctcgttgagtgtgtccgggaaataatactctgccagagacagagagaaaggctgtaacggaggatgtggtggcgaagtggccacactgacacactggtttcatgatggtgaaccacaacaatggccagcgacccactgatattgattctcgtctccgacagacagaacaagataagctcttcgttccatgactttttaggctccaagaatcctactttagcatccacttccatggctgaccataggctaccaccggataataaggcggctaaagcggcgatgactcctttcac

SEQ ID NO: 130844 - DNA, 407 bp, Arabidopsis thaliana
gaaaagaaaaaaaaaaccgttcttggaagatgggtttcaaactcaactctcttttccttcgtcgtgcgcttctcatgcgtcacaatcttgtccggagccgaccaagccttggcttacgtcaagaaaccacatgtgagccaacgcaacataacggcgttagcagccgtcgccggaagaggaggaggaaaagagatgttgaaagggaggaagcagacgtgtggttgtaacttgtttcaagggagatgggttttcgatgcttcttaccctttctacgattcatccacgtgccctttcatcgacggtgagttcgactgtctcaaattcggccgaccagacaaacagttccttaagtactcttggcagcctgattcatgcacccgtccaagggttgatggggaagcgttttt

SEQ ID NO: 130845 - DNA, 774 bp, Arabidopsis thaliana
  unsure (1)..(774): unsure at all n locations
gctcacaagaacaagggaaatattgacggtttcgctaaactggtgtcagttgaagacattggccgccagaatggggttgcctacggtcgtcactattccactcgttccgtctattagaatgtagacgcaggtaaagctaaggaactgatggagcatttggtcaaattgcaatcttcaattcctgaagttaacaagattgtgaaaggaattcgttcggacgtggcaagccgtcgccagtgctgatgaattcgagtacaaagatccaggtgatggatccatttcgaagcaccagggaatccgtcacttgttggaagccggatcccgacttgttttccgtctctctggacctggctcagaaggagcatccatccggctttacttcgatcagtacgaaaaggatgcttcaatcaccggccgagaatcccaggaagctttgtctcctctggttgacttagctctacagctgtcgaagatggaagagttcacaggccgatcagcccccaccgtcataacataagaagggtcaagctcgacgactctaaccattcaccttttcgtctatatgatgtcctcttcttatagctatccctagttccgttataagaataattagtctcagggagaatttgtatttctcatcagaattctgaccaaccaagtctgatttcttgagttgttgtgaggctatatacttgtcgcgatttggcggccgcgaattcctgcaggacggggcagcctctagttactagagcgtccgcccccgcggtgcngctc

SEQ ID NO: 130846 - DNA, 542 bp, Arabidopsis thaliana
  unsure (1)..(542): unsure at all n locations
ttgatggatccatttcgaagcaccagggaatccgttacttgtttgaagacggatcacgacttgttttccgtctctctggaactggctcagaaggagcaaccatccggctttacatcgaacagtacgaaaaggatgcttcaaaaaccggccgagaatcccaggaagctttgtctcctctggttgacttagctctaaagctgtcgaagatggaagagttcacaggccgcattcagcccccccaccgtcattaacaataagaagggctcaagcctcaacgacctcaaaaccattcaccttttccgtctatatgatgtttccttcttatactatccaagttacattataagaataattagtctcagggagaatttgtatttctcatcagaattctgaacaaccaagactgatttcttgagttgttgtgaggcttatacttgtacggatttggctttctcagttttgttactactgcggccgcgtaattncgatgatgnnnnnnnnnnnnnnnnnnnnnnnnnnnnnnnnnnnnnnnnnnnnnnnnn

SEQ ID NO: 130847 - DNA, 1049 bp, Arabidopsis thaliana
ccggaacctcggggcgttccacgcgtccgcgaacaatcactttcaggatattggatcccttgcttctcaagtttttgtcaatttcgacagtgtcttccttaatacctgggcacaattgaaagatgtggtgctagaaggaggagatgcgtttgggcgtgcacatggtggcatgaaactctttgactatatgggtacagatgagagattcagcaagctttttaaccagactggattcacaatcgcggtggtgaagaaggctcttgaagtttaccaaggcttcaaaggtgtgaatgtgttggttgatgtgggaggtggagttggtaacactcttggtgttgttacttctaaatatcccaatattaagggtatcaactttgatctaacttgtgccttggcacaagcaccctcttatcccggtgtggagcatgttgccggagatatgtttgtggatgtcccaaccggagatgctatgatcttgaaacgtatacttcatgattggaccgacgaagattgtgtcaagattcttaagaattgttggaaatcacttccagaaaacggtaaagtggttgtaatagaattagtcactcctgatgaggcagagaatggggacatcaacgcaaacattgcctttgacatggacatgttaatgttcacacaatgttccggaggaaaagagagatcaagagctgagtttgaagctttggctgcagcttctggcttctcccattgccagtttgtttgccaagcttatcactgctggattattgagttctgtaaataatatgtctaaaattataattaaaactaaatcctcataattgttaatttcatctgtatttcagttttttgtttgaaatggtcatgcctctctttgtctttcgaggcaatatgaaataaaaatcttttctatttttgtatgaatagtaccccttttattttatgggtgtgttggtaaaatagtcattttttcaaacttaatttagaaaataggcattttactattcatatttcccggcacaagatgctctatgttatgtctgcctcatcca

SEQ ID NO: 130848 - DNA, 445 bp, Arabidopsis thaliana
catgattggaccgacgaagattgtgtcaagattcttaagaattgttggaaatcactacctgaaaacggtaaagtggttgttatagaattagtcactcctgatgaggcagagaatggtgacatcaatgcgaacattgcctttgacatggacatgttaatgttcacccaatgttctggtggaaaagagcgatcaagagctgagtttgaagctttagctgcagcttctggcttcacccattgcaagttcgtttgccaagcttatcactgctggattattgaattctgtaaataaaatgtgtgatacaaatctaaatcgtcgtttctagtatttttcttttttgttgatatgtgattatcgttgttatttcttattttcatatttgtttgaaatggtcatgcatgtctttgtcttcaagcaatctagcaataaaaataaggttttatat

SEQ ID NO: 130849 - DNA, 396 bp, Arabidopsis thaliana
ttcatgattggaccgatgaagattgtgtcaagattcttaagaattgttggaaatcactaccagaaagcggtaaagtagttgttatagaattagtcactcctgatgaggcagagaatggagacatcaacgcaaacattgcctttgacatggacatgttaatgttcacacaatgttccggaggaaaagagagatcaagagctgagtttgaagctttggctgcagcttctggctttacccattgcaagttcgtttgccaagcttatcactgctggattattgagttctgtaaataaaatgtgtgaaatgtaaaacaaaatcgtcgttaattatatatttccatctttgttgccattctttcttgatatctttgtcttcgagtaataaaagtgttttaat

SEQ ID NO: 130850 - DNA, 583 bp, Arabidopsis thaliana
  unsure (1)..(583): unsure at all n locations
aaaacaaggaggagatggaacaagcccccaaatttttcagattttgtcaagctttagaaaataaaggtttctttgttgccgtagaacgccctgagacactcatcaaccaagaaactgccgttgaagacccgccagatgactccccaataccttactacccaagtggcaaccctcaaaagctagcgttctggttcaaagaagattctgaagcttccagagctaaatataaacaagttagaggtccaaaacgcccaatctgaaaacaaacccagtatccttagttaatcacatgccctatttatgctatatatgatgcttcctttctatctttctctggacttactcaacgcctatccttccctccaatttccaccgcttgcggcttctatttttttggtgttagatttggatatataagatccccctttaaaagaaaccattatgaagtggttataatacccatataattccctccgtnnnnnnnnnnnnnnnnnnnnnnnnnnnnnnnnnnnnnnnnnnnnnnnnnnnnnnnnnnnnnnnnnnnnnnnnnnnnnnnnnnnnnnnnnnnnnnnnnnnnnnnnnn

SEQ ID NO: 130851 - DNA, 431 bp, Arabidopsis thaliana
cgttccgttgtgtttcaggacgacgcataggggaaaaaaaattgaattctttctctccaagcgaaactagggtttcgaaagtctctgtctcatcaaagcttcgaaaagaaagtgattgcattaagagaaacattgggataaaagatgagctttactcaggctaattgttttcgaccatcctactatcctgcaaggataacacgaccaaattgcatctccagtgtacctattaggtcttcagtacgctttgatcacttcccgcgtacctcgtttactcttcgagctactgctgcagtgtctactcagttttcgcctcttcttgatcatcgccgtcgtttacctactgggaaatcgaaacaaagttctgctgtgtgcttatttggtgggaaagataaacctgatggtagtgatgagatatcgccatggaaagc

SEQ ID NO: 130852 - DNA, 466 bp, Arabidopsis thaliana
  unsure (1)..(466): unsure at all n locations
gtcttcaattcgntccaaccngccccgatagccgcagctttgtttcaactattcgatcaaaacgataccctgtgaccgccttccaatggcatccagagaaaaatgcattcgaatggggatcatctgaaatcccacactctgaggacgcaattcaggtgactcaacatgctgcaaattatctagtcagtgaagccagaaagtcaatgaacagaccatcttctgagaaagtgctgagcaatctcatctacaactacaagcctacgtactccggatacaaagggagcggtgacgacgaggtttatattttcacgtaacaaagatcccttctctgtgtgttttcgccaaaacatagcaatttatattagttactaagagcaatacagtgtttctccttatccaccattgattgtaagttgtaaccaacgtgttgaactataatttaaaaaaacacagtatagatcacatg

SEQ ID NO: 130853 - DNA, 610 bp, Arabidopsis thaliana
  unsure (1)..(610): unsure at all n locations
agttgaactaaaggagaaagatgcagagaagtcaaaggaggaagctgctaggggaggtttagatactcttcaaaaggttgaggagctcgagaagatgctggaacatgcgaaggagagcaaatgacatgcatgctggagaagtatatggagagaagtcaattttggccactgaagtaaaagagcttgaaaaccggttgctcaacttatcagaagaaagaaacaaatctcttgctatccttgatgagatgcgaggaagtctcgaaataagactagcagcagcactggagttgaaaaagactgctgagaaagaaaagaaagacaaagaagattctgcacttaaggcacttgctgagcaagaagccaacatggagaaagtggtccaagaatcgaagcttctacagcaggaggcagaggaaaattccaagcttcgagattttcttatggatccgtggtcagattgtttgataccttacaaggggaaatttctntnatctgtcaagatgtgaanctnttgaaagaaaantttgaaaccgngtgccttnanccaatcggttctcctnaagcttcnctnagttncttncgggtcatnttttgaaaanttttggtcccg

SEQ ID NO: 130854 - DNA, 333 bp, Arabidopsis thaliana
cgcgaaccagcgatttaagcactcccaactctcactttctcccttctcccttctcggggggggcattcactgaaatcagcagatttggggcttggaacgagaggagatggatcgtgttggcagtctaccaaacgagcttctttctcatatactgtcattccttaccacaaaggaggctgctttgacttctcttctctccaagaggtggcgctatctcattgcttttgttcctaatcttgcttttgatgacattgtctttcttcatcccgaagagggcaagccgcaaagggatggaaggtggcggagctttatttattttgttatagggtgttg

SEQ ID NO: 130855 - DNA, 690 bp, Arabidopsis thaliana
cggggcgaccgcacgcgtccggcacacacgactgtatttttttctttattctgattgtttctacatatttgcagtacgttcgtttttgtgttggggggggttgcgaactcaacggtagagtactcggcttttaagtgcgactagcatcttttacacatttgtatgaagaaaaggattcgtccagatctgcggtagagtttgtaagaccacgactgatcctgaaaggaatgaatggaaaaaatagcatgtcgtatcaagggagaattcagataacatttttttttgctttcctgatcggtacaatcttattttgatgtcgaaaaaaaaaaaagaattccaatttgggtcaagtgaataaatataaatggatggataaaaaaaccagttttccttattccaggaaaaaaaaagaaacgagcttccattcgtaatttgaaaaattaccccaactaattaaatgttaaaaatagattagtgcctaatacgggtatgggaaggcatttttttcttgcgtgttattatcaattttttcatgagtcctaattattgttttaactagtccatttggattaggttggagtgtgtaaaagaagcagtatattgataaaaaatatatatatttccaaaatcaaaagagcgattaggttaaaaaaataaaggatttctaataatcttgttttgttattctat

SEQ ID NO: 130856 - DNA, 835 bp, Arabidopsis thaliana
  unsure (1)..(835): unsure at all n locations
caagaaagttcccattgtcgtctccgagaccggatggccttccaacggtgacccgcgggaagtcggagccacctgcgacaatgctcgcaagtacaatgggaatctgatcaagatgatgatgagcaagaagatgaggacgcctattcgacctgagtgcgatctcaccatcttcgtctttgctctctttaacgagaacatgaagcctggaccaacctccgagaggaactacggtctcttcaaccctgacggaactccggtttactcacttgggatcaagacctcttccactcatagtagtggtagtggtagcagcaactccactggtggtagtagcagtggcggtggcggtaacactggtggctcttccagcggtggtggcatctatcagccagtcacgggtaacccatcaccggattacatgtccatttcctccgccgggggaaaaggcagattcgttgagtgtgtgttgttcttcttcttgctttgcatcatcaagcttcggttgtaaaagcttctccactagatctcgtcggctttgtacttttactcggttgatgacgtgatatagcccccaaatttaatttaattagttttgtgttggtgttttggtcggaggatgatttaggagacataccatctttgttgtgccgacctcctctccaactcttttcttttttccttttccatcctcctttttcttgtttaagcatagattatttaaataatgaatcttagttgattaacaaaaaacaaaaagnnnnnnnnnnnnnnnnnnnnnnnnnnnnnnnnnnnnnnnnnnnnnnnnnnnnnnnnnnnnnnnnnnnnnnnnnnnnca

SEQ ID NO: 130857 - DNA, 509 bp, Arabidopsis thaliana
  unsure (1)..(509): unsure at all n locations
cnnnnnnnnnnnnnnnnnnnnnnnnnnnnnnnnnnnnnnnnnnnnnnnnnnnnnnnnnnnnnnnnnnnnnnnnccacgcgtccgaaggaattagtcttttcacccatttttctctctctgtgtggcttcttcttcttcttcttcttcctatcaaaatcatcatcatcatcttctctatattactaaaatagagagagccaacaaaagagaggagagggcgtaaaacagcagtcgtgtggcgcaccgtagcaccgccccctcctaacctgcgcctttcttccttctctttcattttttttttttccggcttcaggaattattcctctcctcctctctcaggtcgcttcgatcccaaggcaaaatagtttcctgatttttgattcttaccttcgattttggcttcttcttcttcttcttcagatgcattcacctagaaaactctggcggacatcaaaggaaccctagcttttctccggtcttgttatatcgcctctatcgccgccgatcgg

SEQ ID NO: 130858 - DNA, 590 bp, Arabidopsis thaliana
  unsure (1)..(590): unsure at all n locations
tcagncnaaccgtacccccattttgggccgaagaaaaaaaccccttgcccctccaaaaatttttaaccaagctttggggcaccccccccccaangggggtttaaggntccaattgcccccttttttcccccccggttttaaacccattttggggacccaaaagccccggatnccccaaaagcccagtggtgtcctggccaaggtaggccatatataataatgcttgggaaaagcattttttccccgtatttggaaggtctaaaaccagcacgcaggttcgtcttagtgaccatctatgcaaaccggatctcgcaggctagaaacggtgcccctatcgacgcagacacctgacgagccgcttgtacttatggttcagtgggtttatcttgtgtcttggggtcatattcattattgtttattttgtatatgggtgtgttttccgcgtttcaattttttgggtgtaattttgcaaattggtttttccatttgttgttgcagtgtgtggtctattttgagttgttttgggggaatgtatttattgctttcctctcgtaggacaaaaaaaaaaaaatgtattttgacctcgcaac

SEQ ID NO: 130859 - DNA, 580 bp, Arabidopsis thaliana
attattggtgccggaggaatgagaaaccttttgtcgcttgcataaatggtttaacgaagcttgtgggtaggctctcgcaagaggaattaatggatcaattgtcgtcttttttgcctgcggtttttgaagcatttgggagccaaagctcggatgtccgcaagacagtggtgttctgtctagtagacatatatataatgcttgggaaagcatttttcccgtatttggaaggtctaaacagcacgcaggttcgtctagtgaccatctatgcaaaccggatctcgcaggctagaaacggtgcccctatcgacgcagacacctgacgagccgcttgtacttatggttcagtgggtttatcttgtgtcttggggtcatattccttattgtttattttgtatatgggtgtgttttccgcgtttcaattttttgggtgtaattttgcaaattggtttttccatttgttgttgcagtgtgtggtctattttgagttgttttgggggaatgtatttattgctttcctctcgtaggacaagaataaaaaaaaagggcgaccgctctagaggatccaagcttacgtacgcgt

SEQ ID NO: 130860 - DNA, 360 bp, Arabidopsis thaliana
ctctctcttctcatcttcttctttctctcttctctctctctctctacagcgaagaacaggacacaaattactctgtgaagcttaaaaaggtttattttttaataaaacccagaaactacaatttctaggcggcggagaaaatttggggctacttctttttggttctctttggcttctcggctctttatccccaaacccatcaataaaaaaccctaaaagacttcaaatttcttcaagattttggtcatcggaaggtttcagatttttagttgtgtaaagtctcttcctttttggtcgattctctttggtttgagtcttatcagagacttattcttcaattccaccctctggtggtgagag

SEQ ID NO: 130861 - DNA, 688 bp, Arabidopsis thaliana
  unsure (1)..(688): unsure at all n locations
cttctccataactctctctctctctccctaaacacaaccaaatacttttatctctcaggaaccccaaaaacaaatggctataatgaagaaaacttcaaaactcactcaaacagcaatgctgaagcagattctgaagagatgctcgagcttagggaagaagaatggaggagggtacgatgaagattgccttccgcttgacgtaccaaagggacacttccctgtctatgtcggagagaacagaagcagatacattgtcccaatctccttcttgacacatcctgagttccaatctctcttacaacgagccgaggaagaatttggattcgatcacgacatgggtctcaccattccttgtgatgaactcgtttttcaaaccctaacatccatgatccgatgatattttatcaatttgaagaagaaagcagaaggaggatggttaaacgaagaagccggagagcgtctcatacaaaaaaagcatctcttctctttttttaagattttttttcctttatttttaagcccatctagggttttttttacgngttaattgactcgtctaactagaaataaccccgtatgagatagngattctatgggtttngatctgtaaataaagtttgtnatgttttcctcacngatcttcgttctgtgagagangttatttaatgcaagngaangtnttcctccg

SEQ ID NO: 130862 - DNA, 445 bp, Arabidopsis thaliana
ggaggttccaagctctgaggaactacttcagtttctgagttcttgcctctctcagatcaaatggagactcaagagcaattccaaacgccgtctcgaaatagatgttctggcattatgcacaggaatgagaccagttgtgatgattgactatggtggaaagatgcctgagctacagaatcgtttgctgtcacttcttgagctcatccgagagggtttaccagtttttaaagatctgaaggttatggttatagaggatatgatatacctcataaatgtaagaagcctgcccaagtttgtaagctccagcttagattcagaacccgagttgttcttcattgacttggaacaagatcctccaaagatggtaacacaaagctaggaaagcaatcttgggatgcagcttagatcgattcagaagctattctcttcgacatttcctttagat

SEQ ID NO: 130863 - DNA, 438 bp, Arabidopsis thaliana
cgagtctctctctggaccactttttcgttcttgtaaaaaaaaactcattgggtacggttttcttagaaagctgtccgaaaagcttaaacactaaaacacatctggaataataacccaaagatcataacttttaaacctcgtacatcatcagattcattcaaactgagctttttctatgtgggcagagcaactaggggtttggtcattggatccaaccttctctgaatctctaaacggctttgggtattttggtgggtaaccctaattggcttactgatccaatggaagatcagtatccaccaccatctgatactctgttgaaatacgtgagtgagattcttatggaagagagtaatggagattataagcaatctatgttctatgattcattggctttacgaaaaactgaagaaatgttgcaacaagtcattactgatt

SEQ ID NO: 130864 - DNA, 476 bp, Arabidopsis thaliana
agaaaaaaagtttcccaaaaaacaaaaacatactcaagtttagatatggatcttgaattactgcaggatttgtccaaattcaatttcccaacacccatcaagatccgatccaaaacctcaaaaacaaagaaggacgaaggtgatgacgacgaagatgacctccgctgcagcacacccacatcccaagaacacaagattcccgccgtcgtagactctccacctcctccgccgagaaaaccccggccaccaccgtcagcaccgtcggctacggcggctctgatgatcagatcgtgcaagaggaagcttttagtgtcgacttgtgagataatcatgaatcgggaagagattgaccgtttcttctcctccgtctacaatgagacgtcgactacggctaaacggcggaagaagatacccttattgttctcgaagatgaggcttaattcaatatttaacattttttacagttttactggaaa

SEQ ID NO: 130865 - DNA, 741 bp, Arabidopsis thaliana
  unsure (1)..(741): unsure at all n locations
anttaacaatactgaccaaacacaacctcaactgcttcaacattattccaatctgtcatctctgcttgtcttcacatgtttttaataacttcttctcttccttcttcattcctttaatccatttttctcgatcttggctaatccatcatgactgtcaagaaagttgagatcaaggtggatataaactgtggaaaatgcaacagcgcaatcatggaagcagtcacagagatagaaggtgtgaatcatatttcattagatgaaggaaatagtatacttaccgtggtggggacaatggatccggtctgcgtagcaacaaggctgaaaaagattaaacagaaacctgtgatcattagcgttggaccaccaccaaaacctcctgagccaccaaagcctccagagcctgaaaaaccaaagactccaccagcacctgaaccaccaaagcatgtatgcaagccaccttactgcaacagttgtgatgttgtgtctgttactacctatgaaagtggaagcggctgcaccattctttgagtcatatatcgcgtaccatagccttcatgttaagtcctgtatttagccaatactaattcatcatgttctcatgcttttttgtttatttctttttctcaaatatgaatctctgttgtttgtccctcccctgaaaaaaaagggcggccgctctagaggatccaagcttacgtacggcgtgcatgcgacgtcatagctttctaatagtgtcaccct

SEQ ID NO: 130866 - DNA, 485 bp, Arabidopsis thaliana
  unsure (1)..(485): unsure at all n locations
cagaggttaactctggaaaattcccagcagtgcggagaaggaagtttattgttgtgatgggtcttgattttgatggggaagaagacacgctagaggctacaaaaagaattcttgatgcggttgaaaaggaaagagcagaaggatctgttgggttcatactgtcgacatctctaacgatctctgaggtacaatctttcttggtgtcaggaggcttaaacccgaatgatttcgacgctttcatatgtaacagcggaagtgatctccactacacatccctcaacaacgaagacggtccttttgtcgtagacttttactaccactcccacatagaatataggtggggcggtgaagggctgaggaagactttgatcccgtgggcatcttcgcttaacggggaaaaggctgacaatgacgggcagattntcactctttcttngnatctttcaactggcttcntgttaaacattttcaggcaaaaaagcctt

SEQ ID NO: 130867 - DNA, 639 bp, Arabidopsis thaliana
  unsure (1)..(639): unsure at all n locations
gttctccnnnnnnnnnnnnnnnnnnnnnnnnnnnnnnnnnnnnngcgtccggagaaaacctaaaggttgagtagagattaggcaaaaacaaaattctcgatccccaaatttcgaaaacttgttcttagggcgattcttctctttggtcatttggcgaatttgatttatatccatcggtgatcggatttttttcagtcttctccgtctcgtcgttaccggcgtttgatcggatcatcgttttgtttcaggcgaaatatggtggtgatctccctgaagattttgaattcaaaatttcttcggttgcttcctcttgactttatcgcgatttcgattacgtgtagactttcttcttggctttgtcttcgaatcaattaggattgtgaataatcgtgtctgtgtatataagactggtgattgattattagggcatcggttggcaggagaatagattgttttttttttttggtgtgtgttggatctttagatctttgactgaggaatatgtatatcaaagaactgccggtcgcagttgctgagaataggctgagatcccttgaggataacgttgatgatccagataaggccgtatcggtgagcacaggaatcgtgattgagttgactacaaatacggcactcgat

SEQ ID NO: 130868 - DNA, 606 bp, Arabidopsis thaliana
  unsure (1)..(606): unsure at all n locations
cagaaagttaaatgctactgacatttatggtgccaatacaattgaaacatcactcgattggcggtttgaaaacttgctggctctcanatgttctgttcaggaacaccatatatttgaaaatgttggggagaaacgaagaaaaatcagcaaaatcatgttgctaaaggatgaaaaagagcctcctctccccggaacaattgagaaagatctaacagagctggaagcaaaagagcgattgattagggaagagtttgaagataaattatatctgtggctcatccataaggtgactgaagagggcaagggtccaaatatattagatgaagatggacagggtgttctacacctagccgcagcgctggggtatgattgggcgataaagccaatcttagcagcaggagttagcatcaacttccgcgatgcaaattgggtggtcttctcttcactggggctgcnattcagtggcagggnggntactnttcgctgtacttgtctcactgggntnttgattctnggagcatttgggggnccnttttncaanacaatcctttttnggnaaaacanctgctgacttttggttttttgnaancggccananggggatat

SEQ ID NO: 130869 - DNA, 579 bp, Arabidopsis thaliana
  unsure (1)..(579): unsure at all n locations
aacccatgtttcgtttcgttttggaatgataagagagataaagggtttgtgtgagtttattgtctttctgatgcgaggaagatcaagagttatagaggatcgttagagtgatcaaaatcccacgaattcacaaaggatccgtcttcatagatccgtcagatctgttcagcggaggtacatacttcttcgtcattcactgctttctggattagttggtgagaataaacggctggtgggtctcggtgggaagctgaattggatgtagagttcatcagactatagcttagagaagaaaatcgaagttttttgaatcgttttgctccagttgaggtttggaagctgcataccagctcaatggaaagagatttcacctgcaagttgcactttacttttggggtttagctaaatacgattgtgtgacctctgggaatctcatcntactttcggtnatctccgagcttgngaattttaactgatgcaagctnncatgttnngtaatcangaaaagcaatggtattngtaatggnggtgggggttttanttttnggaaggttttcananngggangctttttntnaa

SEQ ID NO: 130870 - DNA, 387 bp, Arabidopsis thaliana
  unsure (1)..(387): unsure at all n locations
tgaagagcaagacgatgccagaagtaagaagaacactgccgtaaacagctaaaaccttgtactcttgtctcttttccatctgttgtcgaaacgagaaaccgtatgctaaaggtgggatcaatccgaagatgacgaaagaagagattgcgatcactctgtgaatcctcgaatactctcttctcccgagtacttcctcgtatcgatcttcttctccttctccttcttctggagaatcatcagtgttgggttgttttctggggttctcgtttattagttcttggaggctgtgaacagtcagaagaagaccgcttgacaaattggcaactncccaaggctaaaacgttcagagttgaagcaccagnantgccgcagatgttaccgtnatag

SEQ ID NO: 130871 - DNA, 449 bp, Arabidopsis thaliana
caagagccggaaatcaaaaacagtaataaaagatcaactgcaagaaaatggctcttcctctcgagctcgaaagcctcactgaagccatctcagctgggatgggaatgggagttgatgagaatgcattgataagcacactggggaaatcgcaaaaggaacatagaaaattgtttaggaaagcaagcaaaagtttctttgttgaagatgaggaaagagcttttgagaaatgtcatgatcacttcgtcagacacctcaagcttgagttctcccgcttcaatactgcggtggtgatgtgggcaatgcatccatgggagagagatgcagggttggtgaagaaagctttgaagaaaggagaagaagcttacaacctcatcgttgaggtctcatgcacacgctctgctgaggatcttcttggtgcacgtaaagcttaccactctttctttgaccaa

SEQ ID NO: 130872 - DNA, 354 bp, Arabidopsis thaliana
  unsure (1)..(354): unsure at all n locations
atcaactgcaagaaaatggctcttcctctcgagctcgaaagcctcactgaagccatctcagctgggatgggaatgggagttgatgagaatgcattgataagcacactggggaaatcgcaaaaggaacatagaaaattgtttaggaaagcaagcaaaagtttctttgttgaagatgaagaaagagcttttgagaaatgttcatgatcacttcgtcagacacctcaagcttgaatttctccccgcttccaatactgccggtgggtgaatgttgggcaatgccatcccttgggaaaaaaaaattcccaggttnggtggaaaaaaacttttgaaagaaaaagggaaaaaaaaagcttt

SEQ ID NO: 130873 - DNA, 424 bp, Arabidopsis thaliana
tgcggatgagcagatctcgagttttaggcttaaactcccaactcctgagctggaaagagctctggggattaaagaagctttggagacaaaagggtatttgaaaactcttcttttgcttttagtcctaatgggaacttccatgattattggcgatggaattctaacaccagctatgtcagtgatgtctgcaatgagtggtctacaaggtgaagttaaaggatttggaacaaatgcattggttatgtcttcgattgtgattctcgtggctttgttcagcatacaacggtttgggacgggtaaagttggttttctatttgctccagttctggcgctctggttcttctctcttggtgctattggaatctataatctgttgaagtatgacttcactgtcataagagcactaaacccgttttatatcgtt

SEQ ID NO: 130874 - DNA, 779 bp, Arabidopsis thaliana
  unsure (1)..(779): unsure at all n locations
agaatattcacagagaagagagagcgttatttttggcgtttaagggtttcgcgtgtggtgcgattcttttgttgtgggctctattcgtttcctctatacgaagcgaggagacgaaggaatttgtcttgactctcgatcactctaacttcaccgaaaccatctccaagcacgatttcatcgtcgtcgagttctacgccccttggtgtggtcactgccagaagcttgctcctgagtacgagaaggctgcatcagagtttgagtagtcataaccctcctcttgctctcgccaagatcgatgctagtgaagaagcaaacaaagaatttgctaatgagtacaagattcagggtttccccactcttaagattttgagaaatggagggaagtcggttcaagattacaacggacctcgtgaagctgagggtattgtcacttatttgaagaagcaaagtggtcctgcttctgttgaaattaagtcagctgattctgccactgaggttgttggtgaaaagaatgttgttgctgttggagtgttccctaaattatccggggatgagtttgattctttcatggcccttgctgagaaattgcgtgctgactatgatttcgcacacactttggatgctaagtttcttcctcgtggggagtctgtggaaggaccctccagtgaggctgttcaaagcccttttatatgtaatttttttntttncccnccaaggggctntaaattgggggaagccctnnggggaaatttttcaaaaagggtcnaagtntccccctt

SEQ ID NO: 130875 - DNA, 705 bp, Arabidopsis thaliana
  unsure (1)..(705): unsure at all n locations
cttggaatttggattcttgtgataacataatggatgttggtcttagctctcgtgtctatgagaccgagacgtgtcgtcaatgtggtcccgagtaaagtagctaagaagtgtttgaaacgaggggatagtatgtggggagcttggtttttctttagcttctacttcagaccggcgttgaatgagaaatccaagtctaaggtcattagggaaagtggtggtggtggaggaggaggaggtggatgttttactgggtttgataaatctgatctcaagctcgatgtttttcttgttcagcatgatatggagaacatgtatatgtgggcttttaaggataaacctgagaatgcgcttgggaaaatgcagttgagaagctatatgaatgggcattctcgtcaaggtgagcgtccgtttccgtttagtgcggagaaagggtttgtccggtctcacagaatgcagaggaagcattacaggggactctctaatcctcagtgtcttcacgggattgagtttgtggcttcgccgaggtttgtttggtgtcggtgaagaagataagaagagatggatggggctcacggggtccgagatttgaagttcactatccctcctgatgctagtgatttcggttcatgggagaaatcttnccaacacagacatcgagctagnagagaccagctcatgttactaaagcagcaccgaataaacgcc

SEQ ID NO: 130876 - DNA, 550 bp, Arabidopsis thaliana
aggagagaaataagcagagacgtgtaaaccaaagaacaacgaaggtttcgtttcgtggggaagaagatgaagtcgcttgtggctcatttctcaacgcctttaatcaccgctagattagttcctagatgtatcatccatcgagcttcaatctccgccgtctctttttccaccgtccgccgtcgattttctcctctcaccatggcctcagcagctcagtcttcttctcaggctgtgtcttacgggagtggcaacagtgatacagatgtttttaaattgattcaagctcacgaggagaaggctgctcgtctttccccagtcgaagaaatccgaactgtgcttaatggtagcatatgcggtatgctttccactttttctcagaagtatgagggttatccttcagggtcaatggttgattttgcatgtgatgctgatggttctccgattctggcagttagtagcttggcagttcatacaaaggatctcttagctaatccaaaatgctcattactaattgctagagacccagaggataggactggtttgaggatca

SEQ ID NO: 130877 - DNA, 397 bp, Arabidopsis thaliana
aattttcgtcatcatttcttgagatgtatatggcctcactgtctccgagactccacaaagcgtacaaagctagatgtgttagcttaccggttcggtctcatccgagtgttaggaggattcaagaagtggtctccaaggttagagctttggggtcttcttcgttagactcgaggacaatagtccgtgacagtctctctggtctcaccgagctttacagatgtttaagtgaagatctcttcaagtcttcttctgaaactcaacaagcccttcttaatggtgatggtttgatggaagagcttcttgaagtatcactgaaatacttagaggtttgtggaggagctaaggacgcagcttcgaggatcaagaagattgttgtcgagcttcagtctgctttgag

SEQ ID NO: 130878 - DNA, 807 bp, Arabidopsis thaliana
  unsure (1)..(807): unsure at all n locations
ggtnnnnnnnnnnnnnnnnnnnnnnnntaggtgcactatagaagagctatgacgtcgcatcgcacgcgtacgtaaccgccgaagttgatgtcaccaagaaagccgaccctaaggctaaggctttgaaagctgcgaaagcagtgaaatctggccaaatcgttaaaaagcctgcgaagaagatcaggacaaaggttactttccacaggccaaagacattgaccgttcctagaaagcctaagtacccaaagatcagtgctactccaaggaacaaattggatcattaccagatcctcaagtaccctctcactactgaatctgccatgaaaaagattgaagacaacaacaccttagtcttcattgttgacatccgtgctgacaagaaaaagatcaaagatgctgtcaagaagatgtatgacattcagaccaagaaagtcaacaccctcattaggcccgatggaacaaagaaggcgtatgtgaggttgactcctgattatgatgctttggatgtggctaacaaaatcgggatcatctaatctgatcattgtcgctctgtgattttactttttctggtttttctcttccatagtctcagttttgctagagaagttaagatattactatcaccatctctttgttatgcttttatctttggattcaaaaagattatatgtttggtatttgttgatgcgtcatagtttctattaaaaaaaaaaaaggattcttnnnnnnnnnnnnnnnnnnnnnnnnnnnnnnnnnnnnnnnnnnnnnnnnnnnnnnnnnnnnnnnnnnnnnnnnnnnnnnnnnnnn

SEQ ID NO: 130879 - DNA, 439 bp, Arabidopsis thaliana
gtttcgccgctcaggtttcgtgaaaagaatctatcttgagcaatgtctccagctaaagttgatgtcaccaagaaagccgaccctaaggctaaggctttgaaagctgcgaaagcagtgaaatctggccaaatcgttaaaaagcctgcgaagaagatcaggacaaaggttactttccacaggccaaagacattgaccgttcctagaaagcctaagtacccaaagatcagtgctactccaaggaacaaattggttcattacctagttcctcatggtccctctcactactgattctgccatttaaatgattgttgacattctctctcttttttttttgttgatcatcttttctgtctagtaaatttccatatatgctttttttttatttatattatatttatttctctatatatttaaattttttttttatgctctttttttt

SEQ ID NO: 130880 - DNA, 417 bp, Arabidopsis thaliana
  unsure (1)..(417): unsure at all n locations
gtttcgccgctcaggtttcgtgaaaagaatctatcttgagcaatgtctctctcagctaaagttgatgtcaccaagggagccgaccctaaggctaaggctgtgaaagctgcgaaagcggtgaaatctggccaaatcgttaaaaagcctgcgaagaagatcaggacaaaggttactttccacaggccaaagacattgaccgttcctagaaagcctaagtacccaaagatcagtgctactccaaggaacaaattggatcattaccagatcctcaagtaccctctcactactgaatctgccatgaaaaagattgtggacaacaacacctttagtcttcattgttgaccatccgtggctgacaagcaaaaagttcaaaggttgcttttcaagaaggnttgttttgtccnttttggcccccgg

SEQ ID NO: 130881 - DNA, 775 bp, Arabidopsis thaliana
  unsure (1)..(775): unsure at all n locations
ttttgtagagatggctcgtgtcttgtctaataaattccagaaaagagtggtgataattgatacaagcaccgaaatagagggagatggtgatattccacactcagctattgnaggttcgcgtagaatgcaagtacctaagccatctttgcagcataaagtgatgattgaggcagttgagaatcatatgcctcaagtgatcatcgttgatgagattggcacagaagctgaagcacttgcttgtcgttccattgctgaaagaggagtgatgctaattggcactgctcatggagagcagctacagaacatcataaagaatcctactctttcagacttgattggtggtattgagactgtaacgcttggagatgaagaagcgagggcgagaaggagtcagaagagtattctcgagagaaaagctccaccgactttttattttttgatcgagatgagagaaagagattattggattgcacatcaaactgaaaagagtgttgatatgttgcttcgcggaagaaatcccatggttgaggtgaggagaagggatgaagagtacaaggtggtgatagaaagatggaaggcatacgacgggcaaggcatttgagtttccttcatcgttgtcaaacttatgacactaacagtaaatgtgtctttctcgaatgatcccccatttgtgtaaaataatcaaaaaaaaaaaaaaaaaaaaaaaagggcggccgctctagaggatccaagcttacgtacgcgtgcatgcgacgtacatagctgttctatagtg

SEQ ID NO: 130882 - DNA, 393 bp, Arabidopsis thaliana
gaggaatgagagaattcatcctcgattttgaagacatcgccgaaggattttgttggtactttcttcttctctttgactttctctctgactccatcatctcaatttctctcttcttctttgctctaatcacagacttctcttctttcctcttctgtctcaatttgatttcttaaaaaaacaaaaaaaaagatgggtttaatcaagaacacagttcattactgttgtgtctcaagagacaatcagattctttactcttacaacggtggagaccaaaccaacgagagtcttgctgctctgtgtttagaaaagtctcctccttttcatacttggtactttgaaactattggtaaaagaagatttgggtttttaattggagatgggtttggttatttc

SEQ ID NO: 130883 - DNA, 465 bp, Arabidopsis thaliana
  unsure (1)..(465): unsure at all n locations
agaaagcttcctgctaatgatcaagaagctgttggaaacaatgaacctgcagagaggcgccgatggaactctaatagtattaaagttcctgaagcacagatcactaatagtgctacaccgactacaacaccaaggtcgactggtctgaagcgcgacttctcaaggtctgactcttcgtttagtgaagatggacccaaggaacgtgtggttcctccatctccaaaggagcctacaaattccctcaggattgaccgtttccttaggccgttcacactgaaagctgttcaggagctcctgggtaaaaccggaaacgtcactagtttctggatggaccacattaagacccactgctatgtatcgtatccctcggtttgaagangnatgnaggaatcaagagaagcagtgtatnacctccantggncaacttaattggngggncngtnatcttattanctnaattttttt

SEQ ID NO: 130884 - DNA, 677 bp, Arabidopsis thaliana
  unsure (1)..(677): unsure at all n locations
gtttacttgtaccaaacatttgacaagcggtttcactccaaaattgactttgaaaggctttctttgaaatgctttgcggggaggttcatcgtttgaggcttggagactatcaccaccaaacccgtattgcttttgttgagtttgcgatggcggaaagcgcaattgctgcgcttcactgcagcggtattgtcttgggggcactcccaataagggtaagtccatcgaagacaccagtaaggccgcattttccccgcgctgagttcaagtgaaactctagccggagatcttaaaattatatagcaaacgagagagagagagagaaagcagaagaagaagtctaaagaagaaggtacttgaggcgttttgtgtttatatataaaactctttctagatttattttaagttaatgcttcgcggtcgcagagcctgcccggtatctttgaacaactcaacaactttggtctaaacctttctcctttctttagtctccaaacacacaaaaatttgattatttttgttgttgttgaaataccctttggatatttttatgacttatttaagacatttggagaaattttattaaaaaaaaaaaagaaaaaaaaaaaaaaaaaaaagggcggccgctctagaggatccaagcttacgtacgcgtacatgcgaannnnnnnnnnnnnncg

SEQ ID NO: 130885 - DNA, 477 bp, Arabidopsis thaliana
  unsure (1)..(477): unsure at all n locations
tctttctcctttgttccacattttagtccacatatctccatttctgtcggggctccaagctttttctcaagatccaaggtctcatcatctcctccagattcgaattctgcaacaacaatgacaattagcaacggggatgtcaaatctggaacctgcaacaatggctcttctgggaagaaaccattcagggtcttcggtggttaccatccacgagaagagcttgcctaccaagggtgtcatcattcaatcacaaaaagatcttcaatccctgtagagatcacaccaattattcaatcagatcttcgnaagaaaggtcttgtattggagagaaagaggtcagttagagngcacttgggttctctttctctcggtttcttgactcctcacttgtcagatncccaggntgggntatttcggnggctggagtttcccnancttgntggtnttanggnctcccngtttngnccgnggaaaaat

SEQ ID NO: 130886 - DNA, 483 bp, Arabidopsis thaliana
  unsure (1)..(483): unsure at all n locations
atcagtatcagcaaccgtacactgattcttattatgtccctcaagtttcacatccacccatgcaacaaccaaccatgtttatgccacaccaagctcagccagctccgcagccatcttttactccagctcctacaagcaatgctcagccatccatgagaactacatttgttccttcaactccccctgcactgaagaatgcagatcaatatcagcagccaaccatgagttctcattcattcacgggaccatctaacaatgcataccctgttcccccgggtcctggtcaatatgcaccttctggcccttcacaacttgggcaatatcctaaccctaagatgccccaagttgttgctccagcagctggacccataggatttacgcccatggcaactccaggagttgctccaaagatctttgcaaccagcaagtncttcancacagcaggnaagttgancaggnagccccttnggctgaaanntnngc

SEQ ID NO: 130887 - DNA, 566 bp, Arabidopsis thaliana
  unsure (1)..(566): unsure at all n locations
ccgntgcattagccaaggacactatcccggtagctggcttggatgactgaatgtggttgcagccataaacccaatcagaccagatgattgcggtccacgctcggccaaatctttgaacaggtatatcaagattctgcaccatcgccgcaacgcaccgggaagcgatgtctcagccatcagacctgataatgcacgtgatcaactccatgcttatgggttgcaaatgacatctcttatctcgctctctcttcgtgttcgttgcttatataaaacataggaatacaacaatccctactcttctctgtatctctctacatttgttagatttttgtttcatttttggtttgaattttgtttttcttgttttttccatccttcttttaaatgtaaaatctggttgttttatatacgtttactattcactcttcttcacaagaatatcttatgtgtaaaagccaaatcaatgtttggattaaagccctaactttcccataaaaaaacccnnccccgaggggcggccgctctagaggatccaagcttacgtacgcggcagtgcgacgtcannn

SEQ ID NO: 130888 - DNA, 609 bp, Arabidopsis thaliana
  unsure (1)..(609): unsure at all n locations
caagatcgtcttccggcctcaagttcgccttttatctacaatcagctcgttcttactccatctgtgctcgttgaagaaatcatcctttgtaatccgtccaattcgcctaagtcgcgggctcgtattaatagaaagatttttcttccttccctagagatcccattttcgtacttgtgtgattcgtgcatcaacagttggcgcgccaggtagggggatagctcgaagatatctctcaaaactacgacctgatatagcgttctagaaggtcaagctcacacatgtgaagtcagggatgttaagcaaagcacgtgtgttgtgagctggcgagctggcaatgtgaagtcagggatgttaagcaaagcacgtgttgtgagctggcgagctggaaatgtgaagtcagggatgttaagcaaagcatgagccttggcacaggagcaacggaagaggatggagcaattgttgccaaaattgtttggccanggaatgttaancnaagnacgtgtgtgtttgtgancctggcgnanatggnaaatgtgnacccccnngggntgttnaacnaaaagnaccggggtttttnannntggccaaaccntgggaanttgaaaattg

SEQ ID NO: 130889 - DNA, 545 bp, Arabidopsis thaliana
tctagaagactatgacgtcgcacgcacgcgtacgtaagctcggaattcggctcgagttacagctgttttgtacgccatcattatctattactaataaaaaatctcaacttttgttccttactcttattacttcctaaatccgatcgaaacaactgttgggttagtttctaatttccaagaatggcgcaagatcacgacgagacggagaataaaacctttgccgacgttgtcggtggcgatgatgtcggcgaaattgtcaacggaggaacaaagaatggctatcgtaaaccggactctgtggagaaggaagatgatgaggatttgaagagtctctattccttgatttgtctcacgatcggttcgattctgtttccagattcgaaaaaccgggattgcgtcttcctttctttgaacgtgtaagaaacttccgtcgctgaaaatgggcctaagcttcgagaagcttctgaaagaacaggacgcgagattcttctctggactcgtagaggcagctcgcttcgtgctctgcttgtcatcactatgggaac

SEQ ID NO: 130890 - DNA, 621 bp, Arabidopsis thaliana
  unsure (1)..(621): unsure at all n locations
cagcaacaaatttcccagagtctttggataaggccctggttagacctgggaggtttgatcgtcatattgttgtacctaacccagacgtggaaggtcgacgccagattttggagtctcacatgtcaaaggtacttaaggctgaagatgtcgatttaatgatcatcgctagaggaacgcctggattttctggcgctgatttggctaatctggtcaatgttgctgctttaaaagctgcaatggacggttctaaagatgtgacaatgtctgatcttgagtttgccaaagacagaatcatgatgggaagtgagaggaaatctgcagttatatctgacgagtcaagaaagctaactgctttccatgaaggtggtcatgcccttgttgccattcacaccgaaggtgctcttccagtccacaaagcaaccattgtgcctcgtggtatggctcttggcataggtttctcaactacccagataaaagatgagacggagcatttcttagggaacagattgcttgtctaagggcctgatgtttgtttattgggagggcccgggtaagccccagaggtttgattttttttgggggaaanttgaggtnaccttccggggngcaantttcntnaac

SEQ ID NO: 130891 - DNA, 555 bp, Arabidopsis thaliana
  unsure (1)..(555): unsure at all n locations
gctcanattnaatgttggccnttctgttgganttgcccatncggaatcccgaanaatgttttccnatggaaanggggaagagatgagaaagaggaagaagaggagagctctcgttacctgtacaggtcctgcttgtaactcaactgatcagttgattggttggcatattttcaatacattgccatatgccggggaagagtgcagtttatatagatgatgttgctgcggttttgcctcaaaaactagagtggtctgggtttgtgttgaactcgagattgctttgggaggaagctgagaataagccagagtgggttaaggactttgggtcgttgaatgagaatgaaggtgtggagagtcctttgtctctgttgaaggatccttcaatggtggagcctcttggaagctgtggaagacaagttctgctatggtggcttcgagtagaagcacgcgctgatagcaaattccctcccggatggataattgatcctccgttagagatcacagttgcggctaaacgcactccatggccagaagttcctcctgagccaccaacta

SEQ ID NO: 130892 - DNA, 417 bp, Arabidopsis thaliana
acgcgtccgcggacgcgtggggctgtgttgtaggcttcttagcattcatttctgtttgctagtgggtgagttagcttatatctgggtacgttatatattagtagctatctgaagtagtaccgatctgtctttgtttgtactttgtagtgaactctatgcaacccaaactactttttttttcctgcagcatttagtttttgctagattgctcctgttcaagttgaaagatttgttgtttgagataacttcaactgaaacttttgaagtaaggagtatttcatggtggcttgtcagagttttactgattcatcaaagagttctacaagagcgatcttcatctttgtttgaaatgttgcaagtttacatggccgaagctatagaccattttggagaattggaaaaagtaaaaagctactg

SEQ ID NO: 130893 - DNA, 676 bp, Arabidopsis thaliana
  unsure (1)..(676): unsure at all n locations
aaatcttagcttaacaccatcgcgaccggatttcaaattccggcccatcgtctcaccggggaagaccccgcctattgccgccgatttcggttccggtctgctcagatctaatcgagtggctttcttctttcttcagatctcttcactttgaatcgggtactcgatctcgattcgcggggggcttttgctagtcgcgatggaggcgatcgatgagttgtctcagctctcagattcgatgaagcaggcggcgtctctcctcgccgacgaagatcctcgacgaaacctcttcttccaagcgccctgccactttcctcaacgtcgttgccttgggaaatgtgggagctggaaagtctgcagttctaaacagtctaattgggcatccagtgctgccgacgggtgagaatggtgctacacgagctcctataataattgaattgagcagggacnagttctttgagcagaaaggnaattatcttgcaaaaccganaataaaatctcaacaagtntctgnaagtgctttgagacattctctgcaagatagacttagcaaaggagctcangggagaatcgtgntgaaataaacttaaaacttcggaccagcacagntccaccattgaatnagttganctgcctgnatgggccagaaattgtggcngcaatnttgngatacgcnagc

SEQ ID NO: 130894 - DNA, 415 bp, Arabidopsis thaliana
ctctctctctccaccattgactctctctctctctctcgctctggaatcatcctttatttctgtgactgtgtgcacttgcagagaggagagagaggcccgaaaccaaaagaaaagaaaaggttgtggcttgcagctgaatcaataccatctccatatatacaatacaccttcactattcccccttttgtatttttattatatttttcccatcaaagtctgtttttttagactccggtttgccgctttgtgtgtgtgtgagagagagaaagagagctatctatcctctgatttatgggctctggatctctgacaatcgagttgagttaattacaacacattcctctctttctcaatcgatctgtgaaatccaagattgttagctgtgtctgttttcagacaaatatgaacaccggtg

SEQ ID NO: 130895 - DNA, 554 bp, Arabidopsis thaliana
  unsure (1)..(554): unsure at all n locations
actggaggacggggggtaggtatgggctcagttctcacatgaaatggaatgaatcggaagcatcaatcgggcgggtacttgcagttgaggtattgcatggttttgcaacagaaggagcacattgctcaaaagtgcgtgagatacttgacgcgtcagaagtgtggagtgcatataaagaccaaaagcatgacttgttcctgccatcaaacacacaatcagcggcaggggtggctggctttattgagaactcatccaacagtctcacttacgctcttaccgctcctcctccgccttcgcatccttgaccatttcttccttgtatatccttttgtaaagtccaatcattaccgtgcttttttttttctttctatagagaaatactgtcgtttgtaaatgtttgatgagaaagtagaaaatatttgtggtttccttggaccaacaatgaaaactacggtctgatgacaggaagaaaaaaccaaaaaagnnnnnnnnnnnnnnnnnnnnnnnnnnnnnnnnnnnnnnnnnnnnnnnnnnnnnnnnnnnnnnnnnnnnnn

SEQ ID NO: 130896 - DNA, 529 bp, Arabidopsis thaliana
  unsure (1)..(529): unsure at all n locations
cttgcagttgaggtattgcatggtttgcaacagaaggagcacattgctcaaaagtgcgtgagatacttgacgcgtcagaagtgtggagtgcatataaagaccaaaagcatgacttgttcctgccatcaaacacacaatcagcggcaggggtggctggctttattgagaactcatccaacagtctcacttacgctcttaccgctcctcctccgccttcgcatccttgaccatttcttccttgtatatccttttgtaaagtccaatcattaccgtgcttttttttttctttctatagagaaatactgtcgtttgtaaatgtttgatgagaaagtagaaaatatttgtggtttccttggaccaacaatgaaaactacggtctgatgacaggatttgtagttgttgggtcgtagacgacatccaaacaacttgtccctttatatttttgggattaaacttgttgcccattaaaaaaaaanttnnanannnnnnnnnnnnnnnnnnnnnnnnnnnnnnnnnnnnnnngtaccta

SEQ ID NO: 130897 - DNA, 593 bp, Arabidopsis thaliana
  unsure (1)..(593): unsure at all n locations
cccccaacaaaccggntttgggntttnggggtttggccgtcctgcgttcgaccggtaacagccgctggggacctatgaagtctccatgtggcgtacactttggaacggtccctttccccatgtttttcgtgctgccaggagcatattggaccggtttggtgccattttttgctgcctgtaccagccatcggctttggtacatattaatcacatacaagagtttatggagagagtacatggacgaaccacggagaccagaatctatagactcaagacatggcaagtctgttaagaacaatcaacgtacaggagacgaaacgagaaggaaattgcaccttgcatagaagtcaaaacttaaattcttttgattactttttcttgccagagaatatgataggttagtgtatagatagataggttttacaccacgaaacattgtcccaactcccaactcagccaaatgatgtatataagaaagaaagaaaacacacactcaccactcttcttgcaaatcttctagtgggtcttcctcttcagaattggtaagttttcgatataataacaaaaaaaaagagagaacatttttatgattt

SEQ ID NO: 130898 - DNA, 718 bp, Arabidopsis thaliana
  unsure (1)..(718): unsure at all n locations
ccccccctcgggacgactggatcgataagctcgatatcgaactcgcggccgcttccagttaaaatcttttgcaatgtctaaagcagttctattggtcgctctctgctttttaccggctctagccatcgcggctagaccgaacaagaaccctttcgtcgtgcgaggccgtgtctattgcgacacttgcctcgctggtttcgaaactccagcctctacttacatctccggtgcagtggttagattggaatgtaaagacaggagaacaatggagttaacgtatagccacgaggcgagaactgactcgacaggatcatacaagatcttggttaacgaggatcatgatgagcagttctgtgatgcaatgttggttcgtagctctcagttacggtgttccaatgtgtcccctggtcatgaccgtgcccgtgtgactctcactcgcttcaacggtattgcttctgacgaccgttttgctaacaacatgggatttctaagggatgcagctatgccgggttgtgcggatatcatgaagctataccaagaaaccgaggactagtttctctgttttgttaagtatgtggtattaaaatgtattgcagcttgtgttatgtgcattttatgcggccgnnnnnnnnnnnnnnnnnnnnnnnnnnnnnnnnnnnnnnnnnnnnnnnnnnnnnnnnnnnnnnnnnnnnnnnnnnnnnnnnnnnnnnnnnnngtt

SEQ ID NO: 130899 - DNA, 619 bp, Arabidopsis thaliana
  unsure (1)..(619): unsure at all n locations
ggggganagtncagnngnatgctannccgntcctttnngnacancngccttanntgcccactnttgtgntggcnagctcctagtnaggganctttcctncttagttctggaaccaaagggaaaaaggtccagcctcccaaactcaaggataatgatccatcagccgcttggtggagctcaaggtggccaaaccgacatttgacattcaggcaaatgaaatgctgcatcacaaggcaaacctaaacggttacctcgcataccacactggtcaaagcctggagaagataaaccaggacacagaccgtgatttcttcatgagtgccaaagaagcaaaagagtatggacttatcgacggtgttatcatgaaccctcttaaagctctccagccacttgcagcagcttaatcgcctaaaggtagtggttcagctttagcacttgttcttttttgggcctttgatgaactgagattttccatgaaatatgtttctattctacaaggaaaatcagatttgtttgggatcaaactctgtagttgatacatacatgaagaccaaagtaaagtttcttactgtgctgtttgattgaacaacctatgatcttttaatttgttttactgaaa

SEQ ID NO: 130900 - DNA, 891 bp, Arabidopsis thaliana
ccgcagttccggcgccgacccacgcgtccaagtaatcctaactatacaaaacacataacaatatggctccttcaacaaaagttctctctttacttctcttatatgtcgtcgtgtcattagcctccggtgatgagtccatcatcaacgaccatctccaacttccatcggacggcaagtggagaaccgatgaagaagtgaggtccatctacttacaatggtccgcagaacacgggaaaactaacaacaacaacaacggtatcatcaacgaccaagacaaaagattcaatattttcaaagacaacttaagattcatcgatctacacaacgaaaacaacaagaacgctacttacaagcttggtctcaccaaatttaccgatctcactaacgatgagtaccgcaagttgtacctcggggcaagaactgagcccgcccgccgcatcgctaaggccaagaatgtcaaccagaaatactcagccgctgtaaacggcaaggaggttccagagacggttgattggagacagaaaggagccgttaaccccatcaaagaccaaggaacttgcggaagttgttgggcgttttcgactactgcagcagtagaaggtataaacaagatcgtaacaggagaactcatatctctatcagaacaagaacttgttgactgcgacaaatcctacaatcaaggttgcaacggcggtttaatggactacgcttttcaattcatcatgaaaaatggtggcttaaacactgagaaagattatccttaccgtggattcggcgggaaatgcaattctttcttggtgtactcttgaaaaaagagttgctctgttttcactttattttcaaaaattgcaaaatctgattatttttcctatctctttgtgtttttgcaaa

SEQ ID NO: 130901 - DNA, 450 bp, Arabidopsis thaliana
  unsure (1)..(450): unsure at all n locations
ctctttccctaaacacactaattattttctatccgacaccnccatattatnacaactacttctgtgaaacttgaaacgggggggtagtccactacacttttaaattcatcatgaaaaatggtggcttaaacactgtgaaatattatccttaccctggattcggccgaaaccgcaatcctttctatcaagaactctacagttgtgagtattgatgggtacgaacatgttcctactaaagacgagactgcgttgaagaaagctatttcataccaaccggttagtgtacctattgaagccggtcgaagaatttttcaacattaccaaacgggtatttttaccggaagttgtggtacaaatcttgatcacgcggcggttgctgtcgggtacggatcataaaacggtgttgactactggattgtaaggaactctttggggacacaatttgggtga

SEQ ID NO: 130902 - DNA, 454 bp, Arabidopsis thaliana
gaaaacccgggccggccgacgcgtacgcccacgcgtgcgccgatgacgaagaggagcaaaggagctaacgaagataagctgatagaaaccaaaagcaaaaacgtttctggaaaatctcagaaacagaagaaaccagtagaagcagaaagcttaaaagaggaagaccttctacaagcatccggaactgattctgattacgacggagatagtttgcctggttctttgaattccgacgatttcgactccgatttttccgattcagaggatgatggaacacatgaaggaacagaagatggagatgtagaattttccgatgacgacgacgtgcttgagcatgatgggtcaattgataacgaggatgatgatggaagtgaacatgtaagtagtgacaataatgaggaacatgggagtgatgaaaattttgagtgaggtgaaacggttgaagtgagctatt

SEQ ID NO: 130903 - DNA, 820 bp, Arabidopsis thaliana
gcgatcttaagtccccaaaccttctagttgacaaaaactgggtcgtgaaggtgtgtgattttggattgtctaggatgaaacacagtacatacctctcttcaaagtcaacagcagggacggctgaatggatggctccagaagtgctaagaaacgaacctgctgatgagaagtgcgatgtttacagctacggtgtgatcttatgggaactctttacgttacaacaaccgtggggaaagatgaacccgatgcaagtagttggggcagttgggtttcagcatcgacgtcttgacattcccgactttgtagatccagcaattgcagatctcatcagtaaatgctggcagacggattcaaagttaaggccaagttttgcagagataatggcgtctctaaagcggctacagaaacctgtaacaggttctaacatcccaagaccagtccccagttcctcttcattaccaactgaacatgaacaaaaggattgataacagaagaagacgcccaaagtggcaaacacatttttgacgaattcaatctgtttgaaggaaaaaaaagctacaaatgttccttctctgctactttttgcctcagcttcagtgtttgacacagcttgtgaattgtgaaaaagaaagattcatggaagatgacgattgaagaaggtgaaggattgtgctcgtgtgttttgttgtctttgcttgcaagcgatgttcatgttcatgcgtaatttcctctattttgttttccaatattgaaactgtccaaagagagaaagaaaaaccaattgcccaactcgttgaaacgttgaccgaaaacatatatt

SEQ ID NO: 130904 - DNA, 589 bp, Arabidopsis thaliana
  unsure (1)..(589): unsure at all n locations
cacgtttgcttttagtaaccgaaagaaccaaactgataaatactacttctcctatgagaatagtttttggtaaaacttacataatgggaatggtttttggtaaaatcgctgtagagactcctaaatacacggtgactaaatccggtgacggttatgagatccgtgaatatccaccagcggttgcggcggaggttacatacgatgcgtcggagttcaaaggtgataaagacggaggctttcagcttttggctaagtacataggtgtgtttggcaaaccggagaatgagaaaccggagaaaattgctatgactgcaccggtgatcactaaggaaggtgagaagattgcgatgactgctccggtgattactaaggagagtgagaagattgagatgacttctccggttgtaactaaggaaggtggtggagaaggaaggaagaagttggtgaccggtgcagtttttgttgccgtcgatgtataagaaggccggaggaggcaccaacgtccaacggattagagggttttaattaaggnggaagntgggtggagtttggtgtgnttaaanttnaggggantanngcccgananttt

SEQ ID NO: 130905 - DNA, 509 bp, Arabidopsis thaliana
  unsure (1)..(509): unsure at all n locations
caagcngttttcaaggaggtccagtctagaatcgtcggattatttnaaggagaatagtctcttggttaggtgccgtgtgggtgtggtgaagtcagtnacggagggaccgaggtattacaatatccctgtnccagtttctaacttgggacaacagttggnaaattnattggagagtgggaaaggctgtaatgttgttttccaagttnatggagaaaccttcaacgcacacaaattggttcttgcaacgcgttccccggttttcaacgcacagctttttggccctttaggagaccgaaataccaaatgcataacgatagaagacatggaagcacccattttcaaggattgtctattcacggatgtaccatccgggatcttctcctggggcgctactcctattctcgagtttactcacccgggataaggtattgctccattttatctactgggacgaattgcctgatatgcaagagttaataggaacagactctacattggcgtctactctt

SEQ ID NO: 130906 - DNA, 541 bp, Arabidopsis thaliana
  unsure (1)..(541): unsure at all n locations
ctggcttcttcgttctccagaagctcaactctacctctgacgatcctctcgatgattccttcaccgacgctgaacccgccgacgacgattcagtctctggattctccaaggtgggaatggcaatgaagtctggattttggacatgcgttgacatggcaagtggtcgctatctctggaacaatctctgttcaaatgccaaacgctcttcttgagttttgttactctctatctgtctctctattgtctgtaactgtttaattgaactgcaatcgacggcaccaaatttacatattgtctctgtactatatactatagatcttgtcttcactactaaatctcaataaagtcgaagcctttatcccagtttcaaagagagtggaggatatggcttagattcttgttcttcctgtaatgctgtagagtaagcaattgaagttctcttttccnnnnnnnnnnnnnnnnnnnnnnnnnnnnnnnnnnnnnnnnnnnnnnnnnnnnnnnnnnnnnnnnnnnnnnnnnnnnnnnnnnnnnnnnnnnnnnn

SEQ ID NO: 130907 - DNA, 797 bp, Arabidopsis thaliana
tttatttaccacttcgttgggagttaacctccaaactcaaaagacaagaggggtactcttatcaaagattttcctaaaatataaagtttgtagttttttttttaaataaaatcagggggttgtaattcggttgagcccaaatcaaaaaggtcaaaaaggcccaaagaattcaatgcatccaaacggtgggtttccaagtgaccgaaaaaaaaatgtcggcagaaattccgataagttaaaaagttaccttcagattgattgttttcaacatcttaagggtcaattcagattctttaacctttcacataaggttgatggaatcttggggcgaaccaacaggcccgatttccaaaatccgagtaagcttgtagtcgcaatgccagtttttggtggtgaagacagcttcaagacttcttctctactctccaatgactgtaaaacttgcatttcctctgagtcgcaagcagagattgattctgttaagtcagagattgaatatgcaactttggattgtacccgtggagcgtcttctggttacggtatcgtgtgcaggaagtaaaaaaagattcatataaacttggcttaaaagaagaataatgccagagagctttagcttctactggagattttccaaagtataatataagtgaaggaataatatgtaaacttgcaatgtatttgtattgtatcatccaccatgtattctaatttgaattaacgtgatcagtgtttttggttggcaaaaaaaaaaaaaaaagaataaagtaagggcggccgctctagaggatccaagcttc

SEQ ID NO: 130908 - DNA, 1143 bp, Arabidopsis thaliana
  unsure (1)..(1143): unsure at all n locations
gtctgttgtaccggtccggaattcccgtgtcgacccacgcgtccgaatcaaaacaagaaagacacaaagatggagatctcaaaaacccttttgctagtgatttctctggtggctgcaacttgtttcttgcaagccaaggcagctggagtttattgtagtaacccttacactcgatgttaccgcaagtacattaggtgtccagaggaatgtccaagcaaaaccgctatgaactccaagaacaaagtgtgctacgccgattgcgatagacccacttgcaaatcccaatgccgcatgaggaaaccaaactgcaacagacctggatcagcttgttatgacccgaggttcattggaggagacggcatttgtgttctacttccatgggaaagagcaatgaagagtttagcctcggctcttgactctgaccttcagatcaattggtagggttcatttggtcacagaccccctgggtcgtgcccagagacttcacatggttccaagctcttggattccttttcaactccaacaaattctccctcgaagccgcgaaaaccgcctcatgggacaacgaaatcgaccatctcaaattcagttacgatggccaagatttatctgttccagaagaaactctctccacctggtactcaccaaacaaggacatcaagatcgagagagtgagtatgagaaacagcgtgatcgtgacaatcaaagacaaagccgagatcatgatcaatgtggttccagtgacaaaagaagacgacagaatccatagctacaaagtaccatcagatgattgttttgcacatcttgaggttcaattcagattctttaacctttcacctaaggttgatggaatcttgggacgaacctacaggcccgatttccaaaatccggctaagcctggagtcgcaatgccagtttgttggtggtgaaggcagcttcaaggcttcttctctactctccaatggctgtaaaacttgcatttcctctgggtcacaagcggggattgattctgttaagccaggggttgattttgcaactttgggttgtcccgtggggggttntggttcgggtttgtttcagggggaaaaagggncntttacctnggttaaaggggtttcccnggggtttgtttnttgggntttt

SEQ ID NO: 130909 - DNA, 858 bp, Arabidopsis thaliana
  unsure (1)..(858): unsure at all n locations
gcgtaggacgtcgctgtttcagccctcagaaagttaacttctctgaatctcgctgaagctgatgtaaccgatagtggcatgcttgcacttggtaagtcagatgttcccatcacgcaactgtctctccgcggctgtaggagagtcagtgacagaggaatatcctatctgttgaacaatgaaggaacaatcagcaaaacattgtcaacacttgatctcggtcatatgccaggaatctcagacagagccatccacacaatcacacactgttgcaaggctttaacagagctgagtatcaggagttgctttcacgtaacagattcttcgatagagtccctggctacatgggaaagacaagcagagggaggaagcaaacaattgaggaagctcaatgtccataactgtgtgagcttaactactggagcactgagatggttaagcaagccgtcttttgcgggtctgcattggctcggaatgggacaaacacgattcgcgggtcgaaaagagacggttacagctatgatttgtggacagaggccgtggctcacgttgtgcttcgatggatgtgagcttggatgctctgatggttgggaattccacacgccacaacgccactgaagaactcattgtctcactagttcatgtattgtataaaatcgttcagaaacatgattcagtaggatgtgtaattttatttaaaccttttaaaaaatttgattgtaaacttgtaaaagttaaactaattccaagaaactgtattattatctttaaaaaaaaaaaaaaagnnnnnnnnnnnnnnnnnnnnnnnnnnnnnnnnnnnnnnnnnnnnnnnnnnnnnnnnnnnnnnnnnnnnnnnnnnna

SEQ ID NO: 130910 - DNA, 391 bp, Arabidopsis thaliana
aatcacaagccaatcttatgggaattattagcacacagtaagttacttgaacttacaaccacgtattaaaagtaacatagtaaagagaacacacacacacacacactccaatcttattggaagtttcatgtagtatatatgactaactggttttcactcgggggtggtgatgggcacgatagtgactccgatgctgtgaacaacatcactagcttgtccatggaatccaacgatcttgtggccttcctctccaagcgagaacttcttaccagaatccattccaaacggcattgactcccttttgtctggtcttaaactgaagacatacaattattggttcctcaactccgaagatcatatcgtagtagccatctatgttcatgagatattc

SEQ ID NO: 130911 - DNA, 890 bp, Arabidopsis thaliana
  unsure (1)..(890): unsure at all n locations
cgtttagaaaaagctatgacgtcgcatgcacgcgtacgtaagcttggatcctttagagcggccgccctttttttttttttttttctgttattacacgaaatgatcatcataattatataaggatagaaaagtaaatcataacacaaaacgatagatagaaaacgaaacagagtagcaacagttacatggtgacccaataccacttaaaggtcttattatgaaccagtacgaagactctgtagtaataatacagagattcaaacaaacacaacaccaacgtcggaagatattatgtagaaaggtatgtgacttagctctttatttagtagatttttgaggctaagcaaacacacattctcattacactctctagcacagagagggtttagtttactcatcgtcttcgtcacgacgcttctggtgggtgatgcttggtgacggggcttcttcttctcctcatcctcatcagagtcattgccaccatattttcttgcggccatagctcccttcctcatcatcaccagaaccagaacggttcctacgctgctcatcatcatcatcgtcattgccacggccatagctaggctgcttcctgtaactcccctcttcctgttcctcagacctcccataactaggcttcctgtaacttccctcctcctgttcctcagatcttccatagctaggcttaatgtaactctccacctgatcatcagacctcccataactaggtttcctgtaacttccttcctcttgttcctcagttcttccatagctaggcttcctattaccttcctcttgttcctcctcagaatcttcacatacctaggctttctatatccttcttcctgatactaagattttacataacttggcttcctgtaanccggaag

SEQ ID NO: 130912 - DNA, 649 bp, Arabidopsis thaliana
  unsure (1)..(649): unsure at all n locations
cgaatgatcnnnnnnnnnnnnnnnnnnnnnnnnnnnnnnnnnnnnnnnnnnnnnnnnnnnnnnnnnnnnnnnnnnnnnnnncttttttggtttttttaaacaaagtttccatctaattccaattcatgcaaaaaacattctgatattacacgaaatgatcatcataattatataaggatagaaaagtaaatcataacacaaaacgatagatagaaaacgaaacagagtagcaacagttacatggtgacccaataccacttaaaggtcttattatgaaccagtacgaagactctgtagtaataatacagagattcaaacaaacacaacaccaacgtcggaagatattatgtagaaaggtatgtgacttagctctttatttagtagatttttgaggctaagcaaacacacattctcattacactctctagcacagagagggtttagtttactcatcgtcttcgtcacgacgcttctggtggtgatgcttgtgacggtgcttcttcttctcctcatcctcatcagagtcattgccaccatatttccttgcggccatagccccgtcctcatcatcaccagaccagaanggtcgaaggtgncacatcacacgcatggcaggcaagcaggnggtccggaaccccctccgtcccaa

SEQ ID NO: 130913 - DNA, 461 bp, Arabidopsis thaliana
gttagttctatcgactttcatcaaatcgtccgtcttgtaagcaaagcatcagccatggaagaagatgaaattgttgagcctggaaaggaggtcgaaatggaaatggacgaagaagaagttaagcttgttgcagaaggaatgagagcagcaaacctagaagagaatgttaagattgaaaatgtacatgatgaagaagcacctatgagaattgttaagaactggaagaggccagaagacaggatcccaacagagagagatccaactaaagttgttatatcaccaattactggagagctgattcccattaacgagatgtctgagcacatgaggatttctcttattgatcctaagttcaaagaaccagaaggttcggttgttttgctaagattcgtgagacccactttttgcacatggttttgtgagtttttcttaaaccatagttcggggtttggcccccctgc

SEQ ID NO: 130914 - DNA, 906 bp, Arabidopsis thaliana
  unsure (1)..(906): unsure at all n locations
cgcagatcctattgaaagacaagagaggatcctaggaaaggaaacaacccgatataaagtcccaggtgcagtggaggcattctccagaagacacccgactacaacttcttcgcctcgagatcgttctagatcaagaaactcagacgacggacctttctctaagcagacacatggagactccgaaagagcaagcagttcctcaagatatagagcatcttcttctaggaaagccgttgctgcttcaagctcccggccaagttctgcaggtggaccaagcgaaagccgaacttcaagtcgtctggtttcctcaagcggtggtggtggcagcggcagtggaaatggccgtccctcaactagccagagagtgcaagctggttatgaattccaagactctgtctttctctcgtgcaacagcggcaagaaacactcgggaagatcaattaagaagcttcgagcttctctctcttcggaaataaaggaaaatgatggagagagagacagcaaactccatgaaaacccaaagaaattacctctgaagaaagatgagaatcttggtttgagggaattcatatatttgaacctgatgaaatcctcagatctttttacatgtaatttcagcttcagcttgcagagatctttttcactcgttttgtttatgtaatcgtgatatgtgttagacaaacataacaatcaaaaatgtagagagagtttccatgtaaaaacggtaaaatttctatccgtatattcgattacttcgaacctatctgtactggtactgtaataaacaaaacaatcaactgctaaaaaaaaaaaaaaaaaaaaaaaccaaaaannnnnnnnnnnnnnnnnnnnnnnnnnnnnnnnnnnnnnnnnnnnnnnnnnnnnnnnnnnnnnnnntcgtcctaa

SEQ ID NO: 130915 - DNA, 473 bp, Arabidopsis thaliana
attcaaagagtattacaatggagatactttgtcttcttatgattaccctctcttccctaattacatggctaatactcagtcttctaaagccaaggctcggtctcaaagtgcgccgaagcagagacctcctgagatctatgagaagcagatgagtgggaggagaagatcttcgctggaagcaccgaggaataacggtgtcccgagagctgtaaggatgcagagatcttcatctcaactagggtcaaacacagccaaggaaagtcaacaacatcatcatcatcagtactatccgtggatggcgataaagctcgatagatctaatatttcgcttatggagagcgaatgcggatctacaagtaccgttatgactaataccaactacggtagacatgttgatgttcagggaaacaacaacatgtactgaacactgtgctttagaatttgagagattgctggaaaaataggcaagccta

SEQ ID NO: 130916 - DNA, 451 bp, Arabidopsis thaliana
cctaacgataatggtggctatgagatctccgtcttttctccgtcgtgtttctcaccgccgattataaaatacttatctactaccatctccttgtcggaaacggcgagctaagtcgattagggttttaattgagaagaaataaaaaggatattttggtatggaggtgaaggaatcgaagatagatatggatgattcagtcaataaggagattggggaattaccaaaagatatgccttgtactagtaactatgaggaccatagttttcataatcatgttgaagaagaatgtcactgaggatcttccttgtggtggtgatgatattgatgctgatgcttctattaaaaaagaggttgcagagttcgacgaggacgaggttgatatattggaatgcaatgataacattgagattcaagtctcaaggtgtgatgatgggactgatggatattcgag

SEQ ID NO: 130917 - DNA, 646 bp, Arabidopsis thaliana
  unsure (1)..(646): unsure at all n locations
nnnnnnnnnnnnnnnnnnnnnnnnnnnnnnnnnnnnnnnnnnggatgtaaccatctaatcagaaacagggatctaaagataatattattggtatgatgcaacaacatctaatgatcttgaaccagctaagttctagatcaaccagattctaaacaatccaactcatagtttcacgaatcagaaccacagaccaaagaaaagaaagcaaaaccaagcagccgaattgatgcaatgcattcgcctggcttaactaagattcacagtccatttcatgttgtcttcaatcagacccatctgcaagcttgtcagaacggtgtagagttgcttcgacacagttccgaaggtaccttctccgtaagacactcttttgcctttgtaagtgacgcttccaacaggagagacaaccacggcggttcctgtgcagaaaacctcgtctgcttctaacaattcatccactgtcacattccgttcctccacctgaaacccttgtgttcgagccacgtctatcatactttttcgagtaataccgggtaaaatggttccttttatttcaggagtagatatcacattgtccttcgcgatgaaaatattgcaagacgagacctnctcaagatatcttttgtaaatgcaatcaaggtacaaaaca

SEQ ID NO: 130918 - DNA, 549 bp, Arabidopsis thaliana
  unsure (1)..(549): unsure at all n locations
atctgttcactgctacggctcctttcctctcactctcgaagccattcaccaaaacggcatcgtaccaccagtgttacgcctcttcttccaagccgccggagcctgagtcttcttctcctcctcctcctccgcctccgcctcaaccgctggcatcgcaacagaagaggaagaagaacgttgagacgacggattgggtcgcttcttccttgacccggcggtttggaatcggcgcgggtcttgcctgggcgggctttctggctttcggtgtaatctccgagcagatcaagactcggattgaggtttctcaggaagtagctaacaccagagatgtagaagaagagaaagagattntnttgcccaacggcataaggtactatgatcaacgngttggaggaggagcaacaccaagagcaggagactttgtagtgatttatcttaaagggggcaagtcaaaggaacccgncaagnatttgtggtacatttgnnccanggcaangagnagntaagccatttggacttttggtgggtcaaacatttngaaaggtttgt

SEQ ID NO: 130919 - DNA, 497 bp, Arabidopsis thaliana
gtggctacaggtttcagaggcaaaagaatgcccggtttgtaaaggggaggtatctgtgaaggcagggactccaatctatgggcgtgggatacagaaaagagaatctgaggaggtttcaaacaccaagatcccttcgagaccccaagcacgacgcacagagagtttgaggactacacttaacaggtcaggtcatataccaacggaaatatttagacatttgcaggataggcttgaaagggaatctagtacaggagaaagacgcgccagaccatctcttaaccggtttatgacttcgaggggagttagagcagaggagaaccagtctagtgaagcactggttgaaccttcatcagatgagattaacgatattgatctgatcttaaataatgcccctgaaaatgaagaggaaaacgaaaaccttaagctcgtcacgtgctttggcaacccagagacgatgggcacagatgtatgggagggtgtcggcgtttactttgagc

SEQ ID NO: 130920 - DNA, 494 bp, Arabidopsis thaliana
  unsure (1)..(494): unsure at all n locations
agagtcttgacgaagcaagaatctttacttggagattagtgagagagaaatatgttgaagagatcaaagatctgatatctgagagagataatgggagaaatgacggcgaggtcttcggttttatcgtcggggatgttcagaagttaccaccggccggtgacgacggaggtgagatcactattacggtccagagtgatgtgccaagtgtcatccgtaaaacccgccacgtattcatcgagactctccacagatattcctctcaacgagtctcctcaggctttggtcgatgagtatttagaggataaatcaagagtattcggagcaaatgtttncagataagcccagaagtcataggcttaacgggggaagnattgagaattcagatgtttaccaataaactttcctctttccttacntgtgttggcctnttggtgggtattaggttnannttncaaatccacgggcaagnttttncnccnatgttncttttnggt

SEQ ID NO: 130921 - DNA, 527 bp, Arabidopsis thaliana
  unsure (1)..(527): unsure at all n locations
agcaaaaaaactttgaagattgatttgaagaagaaagctctctctcaggttcttgttctcaaccagacattgatttcttcgatttgcatatttcccttcttcgtcttacgaattttacttcctttagcgatggatttgatactacgttgacttttatcttccttttggaaatggcagcgtcgtcttctcttcttcttcttcttcactgtcccacctgcaatttctactttgactcttcctcgtaccttaaaagatcgagactttcgagctatagttcgattatctctcgtgggtctcctttgtttgtctctagctttggatctatgaccgttaaaagattcctctagcagagtcggaagcaggagcaatgacgggtaaacgaaccaatttggacgcgttggagcaagaatctttnatcaaccaacttcattggggntancgggaaagacttgggcanccggcgggggggntttaagccatttttnaacggctnagcaaatgggntgngcntnccatttgngnannaa

SEQ ID NO: 130922 - DNA, 360 bp, Arabidopsis thaliana
ccacgaggcaaaagttacttgcggatgttgatcggaaatgcaagttggtggattttgggaatgcttgttggacttataaacagtttacgagtgatattcagacaagacagtaccggtgtcctgaggttgctcttggctcaaaatactcaacctcagcggatatgtggtcatttgcttgcatttgttttgagcttgccaccggagatgttctattcgatcctcacagtggtgaaaactttgagcgagatgaggatcacttggcattgatgatggagcttctcgggatgatgccacgaaagattgcattaggtggacgccattcgcgggatttcttcaaccgacagggtgaactactggaca

SEQ ID NO: 130923 - DNA, 764 bp, Arabidopsis thaliana
aaagaaataaaagagtgtgatgagatcctcaagaacaatgggattaatgaattgcatggtttatgttgtggtcctaagtgctattgcggctacagtgacatcatacccttactcatctcctcataccccagcttacgattctcccagctatgaacacaaaggcccaaagtacgcaccacatccgaaaccatatgtttacagtctctccaccaccaccatactatactccatcaccaaaggtaaactataaatctccaccaccaccatacgtctataattttccacctccaccgtactactctccttcctccaaaggtttactacaagtccccacctccaccatacgtttacagctccccaccaccaccgtactactctccttctccaaaggtttactacaagtctccaccaccaccatacgtctacagctccccaccaccaccatactactctccttctcctaaggtttactacaagtccccacctccaccatacgtctacagctccccacctcctccatactactctccttctcctaaagtcacttacaagtctccaccaccaccatatgtctacaagacgccttactattgattttgaattgtttccttaacaagaagcatgagtgctataattttatttatgattggttttggtttgattcttctgattttgttctttgtttaactatcttgttatgctttttttaactaataaaatttggctatctttttaaataaaagaatatttattttatttctatt

SEQ ID NO: 130924 - DNA, 568 bp, Arabidopsis thaliana
atcggagcttcagagagatccaaagagagagatttaggatgtctcacagtcacgggaacgcggggggggtgaacgatccacggggggcttcggcggcaaagccttacattccacggcctgtagcgccggaggatcttcccgttgactactccggattcatcgccgttatcctcggcgtctccggcgttatgttcaggtacaagatatgctcgtggcttgcaattatattctgtgcacaatctctggccaacatgaggaacttggaaaatgatttaaagcagatctccatggctatgatgtttgctataatgggattggttacaaactacttagggcctaacagacccgcgacaaagaaataatcctcatgtcttaagagtagtatgcttttttttgataaaccttgtatggctcttgtttccgcaccagagattgctagtggtttgtctttgtgttttcgactctctaatccttgagtagcaaactagaaccttgagctcttgctcatttgtggagttcaaagacttttcagtccagatgcaaaaaatgtgaaatccgactttttctc

SEQ ID NO: 130925 - DNA, 600 bp, Arabidopsis thaliana
  unsure (1)..(600): unsure at all n locations
cngtttctgcagcctcggctaagancnctcncactagatgggtnccgaggagattaccgccattttgtgtctgcgttcagagggcttaccgagatgagtgatggagtcacaatggccagtttgaaagaccctatcttcaatctcgcccctgcccttggtgctggaaactcttctgcttcactcgacaacataatcacctgtgaactatttgccctaaggtcgtagctttcctgtttctcaaggaacacaaaggtttacttacttgatcttggggtcatcaaggtcatcaagggccatttgattttgcaatgggtaagccaaattgaacggccctatgttttaggcggacagttccatgccgttttttttgaataccttttccatttgcgaaagaacaacacgtagttgttttgttccaaatggaaacggcacgatgtttgttattcttttcttttctttttttccaggtggaggtgcaaagactgattactttttgccaaacccagtccaaatggaatttatttttatcgaaaggcatgatattattggtctntttaaaattaattattattaaattattaattatattttttatattat

SEQ ID NO: 130926 - DNA, 642 bp, Arabidopsis thaliana
  unsure (1)..(642): unsure at all n locations
tcgttctatcgtccgaaatttcaggatccaaaactcttctttcaaacatggaccgaaccatgtttctttccctgacaatagcctcactcttggtcggagtcgtctcagctggtgactggaacatcttgaaccaactcagaggactcggctcatcgtcaagccaaaatggtatcgtttctaaaggtatcaagacggacctgaaaggatactgtgaaagctggaggatcaacgtggaagttcacaacatcagaaagttcgatgtggtgcctcaagagtgtgtatcgcacattaaggattacatgacgtcatcgcagtacaaggatgacgtggcgagaaccgttgatgaggtcattcttcatttcgggagcatgtgctgtagcaagtctaagtgtgacggcatggacgcttggatctttgatatcgatgacacgcttctctctaccatcccttaccacaagaaaaatggcttcttcggaggagagaaattgaactcaacgaaattcgaggattggatacagaagaagaaagcaccagcagtgccacacatgaagaaattgtaccacgacatcagagaaagaggcattaagatcttcttgatctcttcccggaaagaatatctcangtctgccaccgtcgacaacc

SEQ ID NO: 130927 - DNA, 484 bp, Arabidopsis thaliana
ctctataaccaagtataagcttggagggggttatttttctaaaagggattgagtttttaagatcatgtctgtgagtatctctacctcactccattcttcttacttattgccctcggtttacaattcacacaaatatttcaatagatatagagcttgaatttgtaatagctgaaatgtgtgtttgtagatgacagtggagataagagttccaaacttggattgtgaaggatgtgcttctaagcttaggaagactctactcaagcttaaaggtattgaaagcttttgagttttaaatatgtttcttcttcttcgttcaatctaagtattgagtgcttacacaaattttgggttggttttgtctctttaagatgttaaccaaagttaaactatctgttatttttatcaaatattttttaatttttcaagccaatatatgttttattaaagattttctagttgggatgcttttatttcaattttggag

SEQ ID NO: 130928 - DNA, 682 bp, Arabidopsis thaliana
  unsure (1)..(682): unsure at all n locations
agctattactctttttgttctcttcttctttttgttttgttcataggacaatacaataataggaacttcacaatttcgttcacatgacccatattctcttgactcgtgaggttgaaatgtaaatcactttaaaattaaaaacgtaccttgtcagttttgagactcaaaaggacttgaaatattgaaacccctattctttacgcgtactcgagatttttcgctcttgagagaatcacttcgacaatgtcggtaacggctgctttcattgattcggatcaaactcagcacaacattcttatggattcccaatcaactgtctccggtgtgaaaactgtcaagattagcaatgtttcactaattgtttctaagaaagatgtcaaagagttcttttctttctctggtgacattcaatacgtcgagatgcgaagtgagacacaagagagtcaggtcgcatatgttacttttaaggattcacaaggagctgaaactgcaatgctcttaacgggagctgtcattgcagatcttcgtgttagtataactcctgctgttaactatcagctaccaccagaagccctcgcactcgactcggaacattcgtttaatggtttttctgtcaagaaagctgaagatgtggtgaacatcatggtgggaagaggttatccncttggaaaagacgccatgg

SEQ ID NO: 130929 - DNA, 525 bp, Arabidopsis thaliana
  unsure (1)..(525): unsure at all n locations
agctaatgaatgaactgcagaaaagttctggccatccgtcacaaaattttgcaccatacattgagcaacttgccgctggaaattttggtcaattgccacatgaaggccatcagagggaactacttgaacagctactttcaacaaaaatgcaatctcaatatggaccaatgcaatctccatacggacaactgcaatctgaaccaactcggtctttggagtaccaactgctgcagcaagagcagctgatgcaattggcaaacggagtgaggcacaatacactattggaggaacagagacatattgaccctctgtggccatctgaccataatgatcagcttctaagaagtcatcctgggatccaacgttcgcgatcctctacaggatttagacaactagactttcatcaaccagcagcagaggccaccctttngaggtccagtttnggnaaatttgnggggaaccttttntntagnaanaggttngcaagnntttttnnggnaggggctnncattttgaggggtncag

SEQ ID NO: 130930 - DNA, 589 bp, Arabidopsis thaliana
ctgccctcctgttcgtgtcaacgctaatggtggccttcctggtggaaaggtgaagcttgctggatctattagtagtcagtacttgaccgctctgctcatggcagctcccttagctcttggagacgtcgagattgagattgtcgataaattaatttctgttccatatgttgaaatgacattgaagttgatggaacgtttcggggttagtgtcgagcatagtgatagctgggatcgtttctttgtcaagggcgggcaaaaatacaagtctccgggtaatgcgtatgtagaaggtgatgcttctagtgctagttatttcttggctggtgctgccattaccggtgaaactgtcacagtcgaaggttgtgggactaccagcttgcagggagatgtaaaaattcgccgaggtccttgagcaaaattgggatgtaaagtgtcctggacagagaacagtgtgactgttacaggaccacctagagatgcttttggaatgagacacttgcgggctattgatgtttacatgaacaaaatgcctgatgttagcattacccttgccgtctgtgttctttttctgacggttcaaccaccatta

SEQ ID NO: 130931 - DNA, 426 bp, Arabidopsis thaliana
gaagacccaagagtcccaagaccaagggctgattaattaatgctgttttaaccatatgcatatcatggacacactttgttctccgagtcgactcgttctggtcaccttcttcctcctctgcttctttgccggagattcatcggcgacgaggcctggtttcatctacaccagacacagaggacgatgcacgccgcagtattggagcagccagagggaagcatggccgaggatggtacctgagagatcaaccgtggagaaaatattcggagtgatggtagcaaaagaacggtggagatctgatctaacgctaggggaatcaacgggctaggaatgacgaagaagggaacgcgtacggtgcattgctgaaacaggggatcgcagctctgatcaactcttacgcgagaaaaagtttcttttatgcaccat

SEQ ID NO: 130932 - DNA, 425 bp, Arabidopsis thaliana
  unsure (1)..(425): unsure at all n locations
tttnttttttttttttagatttttctgatatatcaatttttctttctttctcatatccatgcgttttaagacaataacaaccttgtcttcacaaatttgattagcttacatgtctatatagaccaaacaaaatcacaataagtttttatgtctaggcaaaacaaaatctgtttaagcagcaacttcttgatccttggatgaaagttggttctgaatatgttgaggaacaacgtcgaacttagccagttgcattgtgtaagaagctcgaccttttgtcatccctctcaatgtactcacgtactgaaacatctctgccaatggaaccagagagtcgaccaccttgagaccaccgggtttgtctccgaagctgttaatttgaccctcttcgtgagttaagatcaccaatgacatcaccaagatgttct

SEQ ID NO: 130933 - DNA, 661 bp, Arabidopsis thaliana
  unsure (1)..(661): unsure at all n locations
attttcttgtatgttggaatggatgccttggacattgacaagtggagatccgtgagtgacacaccgggaacatcgatcgcagggagcgcaatcctaatgggtctgggcatggttggaagagcagcgttcgtctttccgttatcgtttctatctaacttagccaagaagaatcaaagcgagaaaatcaactttaacatgcaggttgtgatttggtggtctggtctcatgagaggtgctgtatctatggctcttgcatacaacaagtttacaagggccgggcacacagatgtacgcgggaatgcaatcatgatcacgagtacgataactgtctgtctttttagcacagtggtgtttggtatgctgaccaaaccactcataagctacctatttaccgcaccaggaaccgccaccaacgaggcatgtttatcttggatgacaaatcaccccaaaatccatacatatccctttgttggaccaagaccgttcattgagccttcagggaaccacaatgtgcctcggcctgacagtatacgtggcttcttgacacggncccctcnaaccgtgcattactactgggagacaatttgatgactccttcctgcgacccgtctttgggaggtcgtggctttgtaccctttgtttccanggttctccaactgan

SEQ ID NO: 130934 - DNA, 663 bp, Arabidopsis thaliana
  unsure (1)..(663): unsure at all n locations
aatgaatccagagaaattggaaatggagttgccgattcatggttaatgccgcttacacgacaagcggaaatagcgtgtgagaaggtgaagcaaatgaaagagttgagtcaaggatacaacattgttggaagatctcaggggaacctagtggctcgaggcttgatcgagttctgtgacggtggccctccggtttacactatatatccttggccggtcctcatgctggcattcctctgttcctatgtgtggttctggtttattctgtaagttagcagatgagctaatcaagggagatatctatagcgacttcattcaagatcatcttgctcctagtggttatctcaaaattcctactgatatgacaaagtacttgggaagctctaagtatttacctaagcttaacaatgagataccagaccaaagaaaccaaacttacaaagaccgtttcaccagtttacataacttggttcttatcaagtttcagggcgacaaggttatagttccaaaagattcatcgtggttcgggttttatccggatggtgaattcgaacctcttctctctgctcaacagacaaagctctatacagaggattggntcggtctgnaaacattggntgatgcgggaaaagtgaagtttntgagtntngccggtgaacatatcag

SEQ ID NO: 130935 - DNA, 978 bp, Arabidopsis thaliana
atctggagcttgcggtatcaaaggttggtgatttttcggatgataaccgatccgggattgacagatctttgcatcgtataagcgctatacgtaatcgcaaactgcaagtaattggtctaacatgtcgagtgggtcgagtagtctctggaagtgcagaaattataagagacttgattcagttatttctgggtcgacccacgcgtccgctcctggagttggcaaaacaactttaatcagagaaattgcacttttgttagctgatgaacacaggaaacgtgtagtgattgttgacacgtcaaatgagattggaggtgatggtgatgttcctcattctggaattggtcgtgccaggcggatgcaagttccaaatgtgaatttacagcacgatgttatgattgtgcggtgagaatcatatgcctgagacaatcatcattgacgagataggaactgagcttgaagctttagctgctagcactattgctcaacgaggtgttcagcttgttgcaactgctcatgggatgactatagacaacataatcaaaaatccttctttgcagattcttattggtggaattgagagagtgacttttggtgatgaagaagcaaggaaaagaatagttcattagactatttttgaaagaaaaggaacttctgcatttcacttgtgctgtagagatgatatccgagaacctggtgttgtgttcattaaagactatactgtaccgttgatgctatacttgctgggaaattcggtccctttgagatccgccaaattcgtggcgaaaacgatgttctttattaagtagtgacttccaattcttttgggaaactttgaataggagcctggcctattgcttaacaaatatttcgtaagtgaattgctggtctcgcccatgaaaatgaaagattctttcttcttaatatgggacttaaataacggccccggaagttacacccaatttctccgcagcccccaaa

SEQ ID NO: 130936 - DNA, 417 bp, Arabidopsis thaliana
cagagaaatgtggaagtacggtttaagaatcgccgccgggaatgccaaattgaatcggaagtcttcgattctaaataataccgtttgtcatttctcacctccgacttcagccgccgtgggaacacttttcccgagtttagatcacgttcatcgatgcttttcatcttcgaagagcacgaaatcttcaatcaccaaaacgaagaaatctgaaggcaaaaaatccaaacctaaggcggcgatcctggtgccgccggagctgaggaaggagagtttggagccgccggtggagacgaccttgaagcgggtcgtgccaagagactagctgatgatgagaagattccgtctctagatgttggtcctaatggaaggcctctctttactcccaaagatactacactatcgcagctgactcacaag

SEQ ID NO: 130937 - DNA, 539 bp, Arabidopsis thaliana
gctggcacgcctgcaggtaccgggacggaattccgggggggcgggcgtccgtacggtgtgagaagaaacagctaggacttggtcctcaatctggtttcttttttagtgtctctaatggaagcgaaatgcttctacgaaatgtcccggttttagtcatcccaactgatgtcaggcttgttgcgtgtggacattctcacactctcgtttatatgagagagggacgaatttgtggatggggttataatagttatggtcaagcagcaaatgagaaatcgtcatatgcttggtacccatcgcctgtagactggtgtgtaggacaagtgaggaagctagcagcaggaggtggtcattcagctgttttaaccgatgcattttcgttgaaggagttgcgtgaatttcaattagcagatagtgtgaacctctcaaatgcttcagagattcaagatgttgcattcagaatgggatccaagctttagcccgcctctaaagactgagggagcattaccggtggggacttactttggggaaaaattatcaaa

SEQ ID NO: 130938 - DNA, 695 bp, Arabidopsis thaliana
  unsure (1)..(695): unsure at all n locations
gcttgttttcgggggcatttcctgctacaacggcaatccgccaagtatcatgtgggacagctcatgttgtggccttatcagaggaaggccttcttcaagcttggggctataatgaacaaggccaacttggtagaggagtcacttgtgaaggactacaagcacctcgtgtgataaatgcttatgcgaagttccttgatgaagcacccgagcttgtgaagattatgcaactttcatgtggagaataccatactgctgctctttctgatgcaggcgaggtttacacttggggattaggaagcatgggtcaacttgggcatgtttctcttcaatccggggataaggagttaataccaaggagagtcgttggtctcgatggtgtgtccatgaaagaagttgcttgtggtggtgtacacacttgtgctttatctttggaaggagcactttatgcttgggtggtggccaagcaggacagctaggacttggtctcaatctggtttcttttttagtgtctctaatggaagcgaaatgcttctacgaaatgtcccggttttagtcatcccaactgatgtcaggcttgttgcgtgtggacattctcacactctcgtttatatgagagagggacgaatttgtggatggggttataatagttatggtcaagcagcanatgagaaatcgtcatatgcttggtacccatc

SEQ ID NO: 130939 - DNA, 729 bp, Arabidopsis thaliana
  unsure (1)..(729): unsure at all n locations
aagagttacttgaaggtcaagaaatatgtagccaagactgagaaagatgctcagatcaagatgagcctgtacgacccctacgagttccatcttgtgaaccctaaccgactttctcggttagggaacccggctggttacaagcttgtacctggtggtaatgctgcaagtttgctcgatcatgatgatccaccgcaaatgcgaggcgctttcacaaacaatcagatatgggtgactcggtataaccggtcagagcaatgggctggagggcttttgatgtaccagagccgtggtgaagacacactacaagtttggtccgacagagatcggtccattgagaacaaggacatagtgttgtggtatacactagggttccatcacgtaccgtgccaagaagattttccagtgatgccaacaatagcatctagctttgaacttaaaccggtcaatttcttcgaatcgaacccggtacttgggatttcacctttcttcgagaaagacttaccagtctgttaaaccagatgcttcatcttattcgacactgtgcattttcaaatgtcatgtgtagacttttctgattataaatgttgtgcatattctattgatatatgtatatcagtatatgaaatcaacatgctcttgatattcaaaaaaaaaaaaaaagnnnnnnnnnnnnnnnnnnnnnnnnnnnnnnnnnnnnnnnnnnnnnnnnnnnnnnnnnnnnnnnnnnna

SEQ ID NO: 130940 - DNA, 479 bp, Arabidopsis thaliana
ctttccttttctcacacacaaaaagctctccttttctctttctctctctctctctctctcacatctctcttcttcatctggcggttcacgatcattgattatcaaattggcatgcaacagcaaggagagatgatgaggaactcgccgtcatatacctctgcaacgcactctcgtaatttcgacaccattttgtctccactcgtcaaaaccggcaccggtgcttctaaccgatcctacgccttcttctccatctttctcttcctcctcctcggcgcgtttctctccacgcgcctcctcctcgatccctccgtacgaacatcttactataaatagattcttgtgttctcttctaattacatcaaaacgacagtcccgtttgtcgtttgccacgtcgtattccgccttagtggcgctaaaactcgttcgcgccttatttgtgttgtaccaatacttttttgtcaaacaagttttctacgctt

SEQ ID NO: 130941 - DNA, 870 bp, Arabidopsis thaliana
  unsure (1)..(870): unsure at all n locations
gttcaagaatcttttcctggagttcttgttcctgatgttaagtctttctctgctgcttctcgtgagggattgcttccgggagatgtgatcttagccgttgatggtactgagctatctaattccggttctgattcggtttctaaagttgttgatgttgtgaagaggaatccggagcacaatgtcttgctcaggatcgaaagagggaaggagagtttcgaaatccggatcacgccggataagagtttcgatggaacggggaaaatcggtgttcagttatcaccgaatgttagattcggtaaggtgagaccgaagaacataccggaaacttttagtttcgccggtagagaattctttgggctctcttacaatgtattggatagtttgaaacagactttcttgaacttctctcaaaccgctagtaaagtcgctggtccagtggcgattattgcggttggagcagaagtagcgagatcaaacgcggacgggctttaccagtttgcagcattgctgaatctaacccctgctgtgatcaatctgttgcctttaccggctctcgatggtggaactttggctctgatcttattggaagcggttcgaggcggtaggaaattaccgttagaggtggagcaagggattatgtcttctggaatcatgcttgtattatttctcggtttatttctcatcgtaaaggacacacttaatcttgatttcatcaaagaaacgtcgtaagctattgaggtatatccaagaaccaaaaaagtattttgagagttnnnnnnnnnnnnnnnnnnnnnnnnnnnnnnnnnnnnnnnnnnnnnnnnnnnnnnnnnnnnnnnnnnnnnnnnnnnnnnnnnnnnnnnnnnnnnnnnn

SEQ ID NO: 130942 - DNA, 589 bp, Arabidopsis thaliana
gtcataacagagtaagagtttgtatgtaacaaatttcaacaaaaagaagagaaaaacaatgggagagaaagcgaaagcaaatgtgttagtcttctcatttccgatacaaggtcacataaaccctctcctccaattctcaaaacgcctactctctaaaaacgtcaacgtcacattcctcaccacttcctccacccacaactccatcctccgccgtgccatcaccggcggagccactgctcttcctctctcttttgtccccattgacgatggattcgaggaagatcacccatctacggacacatctcccgactacttcgcaaagttccaagaaaacgtatctcgaagcctctcagagcttatctcctcgatggacccaaaaccaaacgccgtcgtttacgactcgtgcctgccttatgtcctcgacgtttgccggaaacatcctggcgttgctgcggcgtcgtttttcactcagtcctccaccgtgaacgcgacctatattcatttcttgcgtggagagtttaaggagtttcaaaattttgtcgctttggcctgcaatgccccccttgaagggtaatgacctacctttttt

SEQ ID NO: 130943 - DNA, 488 bp, Arabidopsis thaliana
  unsure (1)..(488): unsure at all n locations
aatttcaacaaaaagaagagaaaaacaatgggagagaaagcgaaagaaatgtnttagtcttctcatttccgatacaaggtcacataaaccctctcctccaattctcaaaacgcctactctctaaaaacgtcaacgtcacattcctcaccacttcctccacccacaactccatcctccgccgtgccatcaccggcggagcacttgctcttcctctctcttttgtccccattgacgatggattcgaggaagatcacccatctacggacacatctcccgactactttcgcaaagttccaaggaaacgtatctcggaaggcctctcaagagcttatcttcctcgatgggccccaaaaacccaaacggcggtcggtttaacgnctcggtgccctgcctttattgtccccggacggtttttccgggaanattccttggggggttgcttnngggggtcggttttttaatttaaggccttcaccggtgaacngggg

SEQ ID NO: 130944 - DNA, 460 bp, Arabidopsis thaliana
ttcactttctcgatacgaaaattgcttcctttcatcccaattttcaaaacccttgttcctaaaccaatctcagaacaaacccagatgctcaatttcattttgtctcaagcaaagtaatcatgacgagaggcaaattcaacaagactctgccaaagaagaagaagaagaagaagaagagtattgggttgttacagcagtaagaagcagatacaatgagattgttatagtggatactgcttcttccagatatcttctccttgattcaactaagaatgtgcatagtgttatcaataaaggaggccaaaattggactggatcttattgggatgagtttgcgagtttgccgcctattatccctaatggtcccgttgcaatctacggcttgggtggtggaacagctgcaagattgatgcttgagttgtggcctacaatgcagctggaaggttgggaaaatgatgaa

SEQ ID NO: 130945 - DNA, 471 bp, Arabidopsis thaliana
accgaaccgcagtgtcgacctcacgcgtccggctttgttagatttggtaatggggattcgatgaagaacagtcaaattcagccgcttcatggagattctgcgttttctccttcgactcgtgaatgcaggtcaaggaagttgagagacaggccaagtccacttggtccacttgggaagcctcatagtttaactacgacgaatgaggagtcaatgtcaaaggcacaaagtgctactgaattgttgtctctaggaagtagacctcccgtggaagttgtgtctgtggaggatggagaagaagttgtacatattgcaggaggaagtccaagtgttcagagccggtgtcctctcactgctccgcttggtgtttctatgagtcttaggaatggagctactagaaagtctgtttccaatgtgtctatgtgtagcagaagtttcaaccgcgagacttgtagaacaacggtgagctacctg

SEQ ID NO: 130946 - DNA, 255 bp, Arabidopsis thaliana
gggacactggttcggttcctcggatcggttctgatgtgggcatgtttctgagctgccctgtccaagctgtgagtaattagtgttgagttgagcgaaggcttggctcatgcaggttctagagtcggagggtaatgcgtgaggctggcttcacagagcagcgactacttcccgcttacagcagtggacggatcacggtttagcgtcgctcagaaccactatggcctgctggtccgatctcatatgaaccaccatttt

SEQ ID NO: 130947 - DNA, 460 bp, Arabidopsis thaliana
attctcttttactccttcgccgaatctcacaacgccaaattttggcgtttccacagatctatacatcccggagatctccaacaggtccgactccgttttctactccgacgaatcctcctccgtagatctagtcaaaaaacgaacctaacgaaattcgaaatcctgatcggagatggctccgagtattcgaaaagcgattggtgcggttaaagaccaaacaagcataggaatcgctaaagtagcaagcaacatggctccagatctagaagtagccatcgtgaaagctacaagtcacgacgacgatcccgcaagcgagaaatacattcgtgagattctaaacctgacctctctctctcgcggctacatcctcgcttgtgttacttccgtttcacggcgattgagtaagacgcgtgattgggttgttgctctcaaggctcttatgcttgtgcatagacttctt

SEQ ID NO: 130948 - DNA, 849 bp, Arabidopsis thaliana
  unsure (1)..(849): unsure at all n locations
gaggaatcgagtcgctgcgtgcaatcccgtttatctttgcgtggactcagacgaggtttcggttacccgtgtggcttggttgtggaggagcattcaaacgcgtgatacagaaggacagtaagaatctcaacatgctcaaagagatgtacaaccaatggccattcttccgtgtcacaattgatctagtcgaaatggttttcgcccaaaggagatcccgggaattgcggctctgtatgaccgcctcctcgtctctgaagaacttcaaccattcggtgaacaacttcgagttaactaccaagagaccagacgcctcctcctccaggttccaggtcacaaagacattttagaaggtgacccttacttgaggcaaaggctgcagcttcgtgacccatacatcacgacattgaacgtgtgtcaagcctatacactcaagcagatccgtgacccaagcttccacgtcaaagtccggccacatctctctaaggactacatggagtctagtccagcggctgagctcgtgaaactgaatccaaagagtgaatacgcaccgggacttgaagatacggttatcctcaccatgaagggtatcgctgctggtatgcaaaacaccggttaaggcagtttaaaacgttcttgtaccattccctaaatctacgctatgtaatgtattatgttctatgatgtgatgaaatctctccaactcctatcccgtacgctttttaatgagtatgataatttcttgtgttaaaaaaaaaaaaaaaaaaaagnnnnnnnnnnnnnnnnnnnnnnnnnnnnnnnnnnnnnnnnnnnnnnnnnnnnnnnnnnnnnnnnnnnnnnnnnnnnnnnncg

SEQ ID NO: 130949 - DNA, 1424 bp, Arabidopsis thaliana
taactaagcatgtatctcccactaaggcacaaattactaaccatataagtctcagtactctctgttctgcaaacttcatacacaaaaccaacattaagagatggcgagccactacagaaacacaagcgctattgcttatctattgctttgtctcttcattacatctgccactgcacattccttcatacgacaaatcactgatgacctcaaaacaaatctgcagcaggaggtaggagcagaaccaatccaaaacctggacgtaggacattacttacaagaaaataaggagatctcatcacgtgattataaagtatcagcttcaaacgcagtgaaaggtttgagagatcgtcctccatcgtcttactctctcaagatggggtcttttcaaccacgcgtccttaagtcaacttacacggagaaatatgtatctcgtcccttttcagttggtggatacaactggacacttgttgtgttcccaaatgggaacaagaaggatagtggttcagggtacctttctctttacgtagccatagacaactcaactctcggacaacaagagatttacgcagatctaaggttttacatctttaacaagaatgagaggaagtacttcactatccaagataccgatgtgtggaagtttagtgtcttcaaaacgatgtggggattctctcaggtcctccccattgatacattcaaagatccgacaaaaggatatctctacgatggagatcactgcgagtttggtgttgatgtaaccatgccttctctctacgaaaaatcggaacttttctctgtcacagagaattttctaaatccgagattcacctggaccattcggggattctctacgctgctaaaaaacagttacctatcagaagtgttctccatcggaggaagaagttggaatatacaaatcaatccaagtggtcttggtacgggagagggaaaagctttgtcgatgtatcttggccttaatgtgaatgagatattcagaccatatgagaagatttatgttcgagccaagcttcgagctcttaaccaactcaatctcagtaacatcgaaagggaactcgatatttggtacaatggtccgggatatggagaatatagctggggtttccctgagtttatctatttcccttatctcacagattcatcaaagggtttcgttaagaacgatgtgttgatggttcaagttgaaatggaggccatttcttcaaccaagtacttcccgagttagattttctctaagcaaagaacttgtacctacctccatgtgtttgatttgttatcaaatactaataagaatttgattatgcatttcaaatacaattgtttctttttcttcagcatatcattatcaaattatcggcggccgctttagaggatccaagcttacgtacgcgtgcattcgaagtcag

SEQ ID NO: 130950 - DNA, 546 bp, Arabidopsis thaliana
aagagtcgtttcttaaggcttttaaagttatggatagagagcttaaattccatggaagtgtggactgtttctgcagtggcacaacagctgccaccttgatcaagcagggtcagtatctcgttgttggaaatgttggggattccagagctgtaatgggtacaagagacagtgaaaatactcttgtcgctgttcaactaactgtggatcttaagccaaatctcccagctgaggcagagagaataagaaagtgtcgaggacgagtgtttgctcttagagatgaacctgaagtttgcagagtttggctgccaaattgtgactcacctggacttgctatggcacgtgcttttggtgacttttgccttaaagattttggcctaatctctgtgcctgatgtatctttccgtcagttaaccgaaaaagatgagttttattgtgttggctacagatgggatttgggatgttctcttaaatgaagatgtagtggcgattgttgcttcatgctcatctacgcctcttttcatcaagtagttttagtcgtagtcttgc

SEQ ID NO: 130951 - DNA, 622 bp, Arabidopsis thaliana
  unsure (1)..(622): unsure at all n locations
acgtaaagatgaacatgaagctcaggtgcaatttgctcttgagaggggcattcccgccatttctgcagttatgggcacgacaaggctacctttccctggcagagtttttgacatagttcattgtgctcgctgtagagtgccatggcacattgaaggtggtaaacttctcctggagcttaaccgtgtattgagacccggtgggttctttgtgtggtctgctactcctgtttatcagaagaagaccgaagatgttgaaatttggaaagctatgagtgaactcattaagaagatgtgttgggaactcgtatccattaacaaggacactatcaatggagtaggtgttgctacttacagaaagccaacttcaaatgagtgctacaaaaacagatcagaaccggtgcctccaatttgtgcagactctgatgatccaaatgcatcttggaaagtgccgctttaagcatgcatgcacaccgcgccagaagacaaaacgcaacgtggatctcagtggcccgaacaatggccagcgagattagagaaagcaccgttctggttatcaagttcccagactggagtttacggaaaagcagcaccagaggatttcagtgctganatgagcactgga

SEQ ID NO: 130952 - DNA, 846 bp, Arabidopsis thaliana
  unsure (1)..(846): unsure at all n locations
cacaaacaaaccatttacataaaacaaaaacaatttaatacttcttagtgtgtaaatgtgtgattctttcatcaataacaaaatgacatcgatattattcatgctcgtgagtctaacaattctttccatgaatctaaaagtctctcaagccacatctcgtgtcaccttccacgagccgatcgttgctgaacaccatcagcaatggatgactcggttctctcgagtttacagtgacgagctcgagaaacaaatgagattcgatgtgttcaagaaaaacttgaagttcattgagaaatttaataagaaaggggatagaacctacaagcttggtgtcaacgagtttgcggattggaccagagaggaattcattgccactcacaccggcctcaagggggttaacgggattccatcctctgaatttgtcgatgaaatgataccttcttggaattggaatgtcagtgatgtcgctggccgtgagaccaaagattggagatacgaaggagctgtaacacctgttaaataccaaggccaatgtggatgttgttgggcattctcaagcgtcgcagcggtggaaggtttgacaaggattgttggaaacaacctagtatcattgtctgaacaacaacttctagattgcgacagngagcgtgacaacgnttgcaacggtggaataatgtcagacgctttcagctatataatcaaaaaccgaggcattgctcanaggcatcatacccttaccaagcggcagnggggacatgncggtacaatngggaaccctcccgcatggttcanaggggttccagacccgttccaagcaacaaacgggcgtgcattnntcgnggntnt

SEQ ID NO: 130953 - DNA, 712 bp, Arabidopsis thaliana
tacactatagacgagctatgacgtcgcatgcacgcgtacgtaagcttggatcctctaggagcggccgttcttttttttttttttttttgggttctaatataacaagagtcgagcaacttatgacacaaatgagaacaagctcttattacatataatattcgaactacaaatacaccccttaagcaaatctaatgaaagaaggggtaattaaacaataacaaaacaaaatacacgaaactgatattaaaggtgattatctaatgacgaatcacaatcattctcttcaggttttcttgtttggcccgtatgcatacttaatcagagactccttgatagagagtagctcagggaactctttcttgagcttggaagcatccatctcgttgttgcttcttggagccacaatgactttagcttgctcctctaatgtgaagtttgcccatttgaattcagggttgatgtagtctctgtacatctctaggatctcgttgtggctcaccacacctgggtttgtgaagttccagattcctttcaagtttcttttcgccatctcgatggagattggtaataactcgtccaacacagtcatgctgtttgggatgttcactactttgttgtacctggagatcttggtgatgaagttgcgcgggttgtttagatccgaggagatcggcatccttaccctcaatgtgcatacgttgtccggacgcgt

SEQ ID NO: 130954 - DNA, 872 bp, Arabidopsis thaliana
  unsure (1)..(872): unsure at all n locations
gaatgtnnnnnnnnnnnncgtcgcatgcacccttccttaagctggaatcctttaaagcggccgcccttttttttttttttttcttttttttttttttttttgcttctttggacacaaatgagaacacgctcttattacatataatattcgaactacaaatacaccccttaagcaaatctaatgaaagaaggggtttttaatcaataacaaaacaaaatacacgaagctgatattaaaggtgattatttaatgacgaatcacaatcattgtgtacaggttttcttgtttggcccgtatgcatacttaatcagagactccttgatagagagtagctcagggaactctttgttgagcttggaagcatccatctagttgttgcttgttggagccacaatgactttagcttgctcctttaatgggaagtttgcccattcgaattcagggttgatggagtctctgtacatctctaggatctcgttgaggctaaccacacctgggtttgtgaggatccagaatggttttaagtttctttacggcatcttgatggagattgagaaataactggtacaacacattcatgctggattgggaatgtcactacatttgttgtaccagggagattcttggtgaagaaaatttcgccggtttggtttaaaatccaaaggagaaacggttttccttgaacccttcaaggggggaaaaaacccttgggcaataaacttcctttttaaacaaaagtttcccatagaacacaatggggtttttgggttgtgtttccccgcgttttaaaaggggacccccccacagaaaatttttggggggaggggcgtctttaccccttccctatggagaagcgcctatttttccttgga

SEQ ID NO: 130955 - DNA, 630 bp, Arabidopsis thaliana
  unsure (1)..(630): unsure at all n locations
gtctctgcaagtctcatcagaagaggaagagaatcaatggcgagttgcttcagctacgtgtcttctcgtaacaaatgttaccaatacagcttctctcgtgctggtctccgatcatctacctccgatcttggcgacggcaccgtcttccactgttggatcccacttactcacatccacaccaagcccacgctcctcctccttcacgggatcggagctaacgctatgtggcagtgggaccgcttcatcgaccgttttatcccccgcttcaacgtctacgtaccggacctcatcttctttggcgactcctacaccactcgtcccgaccgctcagagtctttccaggcgacttgtgtcatgaaggcgatggatgcttacggtgttaggaccatgaccgtcgctggcctcagctacggtggttttttggcctaattctttggcggggaagtttaaggagggggtaagatcgaagttttgctaataatgcgccggttttccttttgaggagaaaaaattcggaggttggaattttcaaagtaaagagcccgaaggaanagnnggcttttttttgttcctaagantccttcgantttncgggggtttttcaagtaattttnntaaacnccgnttttc

SEQ ID NO: 130956 - DNA, 414 bp, Arabidopsis thaliana
tcgattcctagtaatcttggaaatctgacaaacttagtgagtttggatctttacttaaacagctgtctccggtcctattccggaatcattgggaaagctttcaaagctgagatttctccggcttaacaacaacagtctcactgggtcaattcctatgtcactgaccaatattactacccttcaagtgttagatctatcaaataacagactctctggttcagttcctgacaatggctccttctcactcttcacacccatcagttttgctaataacttagacctatgtggacctgttacaagtcacccatgtcctggatctcccccgttttctcctccaccaccttttattcaacctcccccagtttccaccccgagtgggtatggtataactggagcaatagctgggggagttgc

SEQ ID NO: 130957 - DNA, 350 bp, Arabidopsis thaliana
ctcaaagagattggatacaaagacaccaaactcaatctagctgccgatgtgtgttttgccactatattcacattggcgagaattgtgtgtggacctttcctcgtttacgtcagtctatcagctgataatcccatcttcatcaaggcaatgggatcaggattacaactcgtgagcatcttttggttctataaaattttcgggatgatgagatataaactttttaagaagccaaagtcaaacaaaaagtctacttagcttagttagagatatacaaaaagctgattcaatccaaatatttttttcttatttttatttatggtcatttatctattttattaataaaataataa

SEQ ID NO: 130958 - DNA, 395 bp, Arabidopsis thaliana
ggatttgatcacgaaacgttttacatggatggaagcttatcttctcttatcaacccggatcagtaccgtcgtgactgctttgcgcagttcaaagatatgaaagcaatggatcctatggagttgctagggatcttaccaacttgccattttggtaaattctgctcgaagaagtacctttcgatcattcaccaaaaaatggaagagtcgttgttcggggactcggaacagcgggagttggttgtagccggtaaccacccaagaagtcagttctatggagagttcttggggctagctaaagcagtctggctgcttcatctcctggcattctcgctcgacccatccccgagtcactttgaagcaaacagaggagccgagtttcactctcagtacatgga

SEQ ID NO: 130959 - DNA, 906 bp, Arabidopsis thaliana
  unsure (1)..(906): unsure at all n locations
cgctcaaaacgctatactctccggttgttcagctggagcattggctgcgattctacattgcgaccagttcaagtccactctccctaaaacggctaaggtcaaatgtgtttctgacgctggttacttcatccacggtaaggatatcactggaggatcttacatccaatcctactacgccaaagtcgtagcgacccacggatctgcaaagagtctacctgcttcttgcacctcaagtatgaagcctgatttgtgtttcttccctcaatacgttgctaagaccttacaaacaccgcttttcgtcatcaatgccgccttcgattcttggcagatcaagaatgtattggcaccaacctctgttgataaaagcaaagcatggaagacttgtaagcttgatcttaagaagtgtacggccgctcagcttcaaaccgttcaaggatatagagaccaagtgttggctgcgttggcgcctgttcgatccgcgacgacgaacggattgttcttggactcgtgccatgctcattgccaaggtggaagcgctgccacttggtccggcgacaaaggtcccacagtcgcgaatacgaaaatggctaaggcggttggagattggttctttgagaggagtacgtttcagaacgtagattgttcatcgcttaattgcaaccctacttgccctgcagtatctactgaagactaaaatttattcattgatgtcttaaaatttattcatctttggaatattgttcttgaaatttaaaagtaaaataatataattgatacaattccattcgaataaataaaatcctttgcccttctacaaaaaaaaaaaaaaaagnnnnnnnnnnnnnnnnnnnnnnnnnnnnnnnnnnnnnnnnnnnnnnnnnnnnnnnnnnnnnnnnnnnnnnnnnn

SEQ ID NO: 130960 - DNA, 457 bp, Arabidopsis thaliana
aaagggatgcagttctggcccaagaagaatctagtggctgggttcatacatatttataggtttgtggaggatgggaaatctcttgagcttcttcataagacgcaagtagaaggtgttcctcttgctctgtgccagttccaaggaagactgctggcagggatcggacctgtcctcagattgtatgatttggggaaaaagagactgcttaggaaatgtgaaaacaagctctttccaaacaccattatctctatccaaacttaccgtgaccgtatatacgttggtgacattcaggagtctttccattactgcaagtacaggcgcgacgagaatcagctgtacatatttgcggatgactgcgtgccgaggtggctgacagcatcgcaccatgtggatttcgataccatggcaggtgcagataagttttgggaatgtgtattttgtgcacctgcctcaaaat

SEQ ID NO: 130961 - DNA, 649 bp, Arabidopsis thaliana
gcgcttcgagattgatctgatttgctttgttgttttctttctgctacaagtagataaaaaatggcatggcgcagtgcagcacgctctttcgtctccgctacagctagagctccgtctctccgatctccgccgccaacgcttccccgcctccgtccttcccaatcctctttgccccgccgccgatttgcctctttcactaatcccaggaatttgggagagctaggatgcacagagtcattcttgcctctgtacaatgttgtggctgcagcgagactcacatctcaccttaatgttaatctgcgagctttctgcgaactctctaacggtacttgaatgcacaaagtggatgcatcagttatcttgaagcagttggagacttgagaaaaggggtgtaccaagaagaactcattggttgttttgtgttccattaggaaccaaaaactatatacattattatcgatcttccttcgcttttgtcaatttccagttttagaatatcactggatttctcttcatatttcttgttgtttagcccaatggctttaaatacttgagggtagattcagcaaattcttgaagaaccattgtttcatcgttgtatttataatgttatgaactcccttcgggtttcctgaaaggaatttaaagg

SEQ ID NO: 130962 - DNA, 760 bp, Arabidopsis thaliana
tatggccatgatttacgccaaaggtttaataaagcctctctataaggaaaagttggtacgcttgcaggtaccggtcggaaattcccgggtcgacccacgcgtccgctgatttggtttgttgttttctttctgctacaagtagataaaaaatggcatggcgcagtgcagcacgctcttttcgtctccgctacagctagagctccgtctctccgatctccgccgccaacgcttccccgcctccgtccttcccaatcctctttgccccgccgccgatttgcctctttcactaatcccaggaatttgggagagctaggatgcacagagtcattcttgcctctgtacaatgttgtggctgcagcgagactcacatctcaccttaatgttaatctgcgagctttctgcgaactctctaacgggaatggaaaagatgggtgatggaagtggattttcagtcgctggcaagagaggtgctactgctttgtacttgagaatgcacaaagtggatacatcagttatcttgcagcagttggagacttgagaaaaggggtgtaccaagaaaaactcattggttgttttgtgttccattaggaaccaaaaactatatacattatttcgatcttacttcacttttgacaatttccagttttagaatatctggatttctcttcaaaaaaaaaaaaaaaaaaaaaaaaaagggcggccgctctagaggatccaagcttacgtacgcgtgcatgcgacgtaatagctggtggatagt

SEQ ID NO: 130963 - DNA, 709 bp, Arabidopsis thaliana
gacaggagtcgagagagaaattagccatggcgaccagagctttgctcgccgttatatatgcgtctccgaatcgctgctacatctctccgagcaggatcaaaatccaatctttaacttgttcttcttcaagtcattattaccaaagacagagtagaaaaaaccacagaatagctcgaagttactcgtctgactcggattcctccgttcttcagccgccggatgtggcccgtcttgctcagacagctcgaatctctctaactccggcggagatagaggaatgtgaaactaaaattcgtcgagtcatcgactggtttgggcagcttcaacaagttgatgttaacagtgtggagccagctattagagcagaaatggatggtggaaatttgcgagaggatgctccagaaacatttgacaacagggacagtataagagcttccattccaagctttgaggacgcatatctaaaagtccctaaaatactaaacaaagagtgactttttcagcttcttggaattgtttggctgaagagattcattctcagatccggttcttgttccagcatctctatgttttctaaaattggttagcagaaaacaaaattgcctcaaaattgttaagtctcacgtaggctattattctacaacattttgttcacaactcaccacaaccttgtgtgcatatgaaactaaactcaaaccaattttgaatt

SEQ ID NO: 130964 - DNA, 275 bp, Arabidopsis thaliana
  unsure (1)..(275): unsure at all n locations
ggaacaatgaatggtgctctcttctcttcccgtcaatctcaataacttacaattcatatgctttctgcttttccttttcttctgcatcgggatttgttggacccgcaatcgttaggatatggggaggggaacataagcttttgtaggcaatgaattactctagtcaaatgttcttattatcaacatatttgatgactcattgcatacgtgcatttgatttgaatgaagttatcgactttgtttggatcaaanaaaaaaaaaacatacaaaattct

SEQ ID NO: 130965 - DNA, 582 bp, Arabidopsis thaliana
tgggaatttacatatcgttcgatgttcgagctggcatcgtcatatctctcgcatcccttttcgacacggacgtgaacaaataccggcaagtcctatataaaggtcacttatcggaaatgttcataccttacatggacccaagtgatgattggtatttcattacttatcttgattgtggcgattttggctgcggtcaatgcgccgtatctcttcaaccgtacactgattgtccagcgggtgcagtttttatggatggtatttttgctggtcaagatggaactcccgcaaaaatcccaaaagttatgtgcatttttgaaaaatatgctggagatatcatgtggcgacatacagaagctgaaattccaaacttagaaattacggaggttagaccggacgtaagtcttgtagcccggattgtgacgaccgtgggaaactatgactacatagttgattatgagttcaagcctagtggttccatcaaaatgggggtcggcttaaccggtgttttagaagtgaaaccggtggaatatattcacacatgcgaaatcaaactaggggaagacatacacgggacaattgtcg

SEQ ID NO: 130966 - DNA, 450 bp, Arabidopsis thaliana
aatctttctctgatttcataaaacagaatagagatttataaaacttcttgcttttaaagatggcgattagattgtcgcgtgtgatcaactctaaacagtcccaaaaacagcaatctcgagtcccgaaaggacatgttgcggtttatgtcggagaagagatggagagcaagaagagattcgtggttccgatttcgtatttgaaccatccttcatttcaaggtttgcttagtagagcagaggaagagtttggtttcaatcatccaatcggtggattaacgattccatgcagagaagaaacatttgttggtcttttgaattcttatggttgtattgtttcaacttgagacaacttttttgggaaagcccaaaacttttttttttctttctatagaattaccttttttgccgctgttccctttggttatttttgcaaatgagacacatattgat

SEQ ID NO: 130967 - DNA, 585 bp, Arabidopsis thaliana
acgcaaagatgaacaaagtcgatctggacaacaaattcatcggatgctctcatctgaccttaagaacacctggatctactttctaaacaatacacagagcattatgaagaatgcatagagagtattctgaataaaaagaaagcggacaagtttgactatgaaggtttatgtaaagcactagagcagctttcagattttgagaaagaggcaaataatcgagtgattgagtctggtgtactcaaaggcctgaatcttgaagacattaagcgcgctggggaaaggttaatccttcaagatggatgcatcaatgtcttccagaaaattttaaagactgagaatctgaatgcagaacttcatgtgctttcctattgttggggtggtgacctcatcagggcagccttttctgcaggcggagtagatgcagtggaagtacatgcaaatgaattcacatttgaggaatccatctcgactggtgagatcgaaagaaaggtggaatccccaattaacaaagctcaacagttcaaaagtatgctacaaaacagaaagaatgagaacaataagaaaagtttcttgagtgtgtatatt

SEQ ID NO: 130968 - DNA, 523 bp, Arabidopsis thaliana
ggacacatctcattgaccatcaatgtcatcctcatgttcacatcaggagtcttcatcattggaccatttgctctcatcacaacagctgtctcagctgatctcggaacccacaaatctctcaaaggcaatgcaagggctttggctacagtctcagctatcatagacggcacaggatccgtcggtgctgcgattggaccagtcctcactggttacatctctgccataagctgggacgcagtgttttacatgtttgatgactgcagcattgatctctggattggtgctcactaaactaatcatagcagaagtcaaagcgttattgtttggatcagaagatgaagtagctgcatcatcatgatcaccaccagcatccagacctcccattgatgtcctcgcttgagttttttccttcattatttatcagttgctctgacaattgcacactttttttatccttttaaagttcgttcctttttccccagttgtcttcatttcttaagtttgaatgagaataagattacct

SEQ ID NO: 130969 - DNA, 473 bp, Arabidopsis thaliana
cttttgtctccgtctctctgtctctcttggcgactcttcctctcccgactcaaacggctacaatctctctccctaagcgcttatctctccaattccttctccttcccactccgtaacgcaacactctcaacaacaacaaaccgccggaactttctcaccaccggaaggatcatagctcgggcatataaagtggtggcagagcacgacggattgacgactgaattggaagtcgaaccagacgagacgattctatctaaggctcttgactctggccttgacgttccctacgactgcaatctcggtgtttgtatgacttgtccagcgaaactcgtgaccggaacggtggatcaaagtggtgggatgctaagtgatgatgtggttgaacgtggctacacgcttctatgtgcttcgtatccaacttctgattgacaacataagatgatccctggggatgaactttagtcttttcagct

SEQ ID NO: 130970 - DNA, 561 bp, Arabidopsis thaliana
gccaagtagccatcaaggttcagggtcaggcagggcacgaagagattctgcagctcgtgctatgcaaggttggcatgcgcagcgccttgttggatctggagaggttactgcgcctgctgttaaggataagggcttaatttccaccccaaagcacaagaaactcaaaagcattgggctgcaaaaacacaaacaacaaactagcatggaccatgttgttacaaatgaagctgacaaacagttggctgctgaggttgttgatgttggacccgttgctgactgggtgaagataaatgtcaaagaatctaaggattccttcgagatatttgccttggtacctggacttcttcgcaacgaggttcgaattcaatcagatcctgcgggaaaggtggtgatagcaggccaaccagagcttactgtacatgcttgaaacaaacgccgctctatatcattagtgctatggatactattcccaaaataaaatatgaaaactttagtgggattgggtcatcatctttttttgggttttgtaaattactgattttggtagatgtgttaggcaaa

SEQ ID NO: 130971 - DNA, 418 bp, Arabidopsis thaliana
cgcgccttctcagtcaaccgggaagcccggaggaatgcgttcgagtaaaatcatagccattactgcagctgtgattggcggggtctctctcatgctgattgctctcattgtctacctcatgagacgcccagtgagaacagtcgcttcttctgctcaagatggccaaccatcggaaatgtctttggacatatacttccctccaaaggaaggattcacgttccaagatttagttgcagccactgataatttcgacgagagctttgtagttgggagaggagcttgtggaaccgtctacaaagcggttcttccagccgggtacactctagctgtcaagaagctggcatcaaaccatgaaggcggcaacaacaacaatgtggataatagctctagagcagagattctaactcttgggaatatc

SEQ ID NO: 130972 - DNA, 571 bp, Arabidopsis thaliana
gtcgcacacaccacatgctctctctctctctctctctctctctctctttcttctcctttctctttgtatctcttctctcttatgctaagccaaaaatggaagctttactctattgaagacgagatccttctctaatttacaggtacccatcttttatttctgaataatagattttggttcttgcaaatcttatagcttaaagttgagatttttggtatttacttagcaacaaaaaaagtttgtgataatattaccataaatggtgagacatccatttgcggctgagattttgctactttactcttttctctctctctatttccatttgtattgtcactcactcacatacaaaaataacatcataatcagagataatgagtaaaagtgaaagaaaccctaataccaacttactctacaaggttaaaacaaatgttgctctttttcattagtcctatggatcttattcccaaaataaaagatgaaaactttagtgggtttggttcatcatctcttttgggtttttgtaaattactgattttggtagatgtgttaagcaaaaagtagagagaaa

SEQ ID NO: 130973 - DNA, 442 bp, Arabidopsis thaliana
ctcggttatctagaattggaaaacaagactatgagacagtaaagcagggaacatctgttggctcgtcggaggtgcatctttcagcgagaatgcaggtcacaggggaagcggaatatactgatgatactccagtacctcctaataccttacatgctgcctttgtgctaagcaaagtgccacatgcccgcatcctttcaatcgatgattcggcagccaaatcttcatctggttttgttggtctgtttcttgccaaagatattcctggggataatatgattggaccaattgttcccgacgaagaattatttgctacagatgtggtcacgtgtgtgggacaagtcattggtgtggtcgtcgcggatacacatgaaaatgcaaaaactgcagcaggtaaagttgacgtttggtatgaggtactaccagccattttatcaatcaaggt

SEQ ID NO: 130974 - DNA, 564 bp, Arabidopsis thaliana
gggatcaagaatagctgccatggatgagttcattatcaaactccagtctgagaagaagcaaaaagaaaaagaaaggaatgaggcacaaaagcagctgaagaagaaggaagaggaagttgctgctttaagatctcttttaacacagagggaagcttgtgctaccaatgaagaggagataaaagagaaagtaaacgagagaacccagcttttgaagtcggaactagataagaaacttgaagaatgccgaagaatggctgaggaatttgttgagatggagagaaggagaatggaggaaaggatagttcagcagcaagaggaactggagatgatgaggagacggttagaggaaatcgaggttgagttccgccgctcaaatggaggaagtgttgatgaaactagtgggttttgccaaaagactcacgagtctttactctgatgatgatcctggtatggtgaagtcaatggaccttgacatgggtgatccagaacctgtcaagcaagtgtggggagctgtttcacaccaatcaagcaacactattagtagcaacttcactaaccttttgc

SEQ ID NO: 130975 - DNA, 880 bp, Arabidopsis thaliana
  unsure (1)..(880): unsure at all n locations
gatctctcgcaaatggactcatcacataacaacattgttgttctttggttttgggctatggtctttgtgggacggtttcaaagaaggaggagggggttcggaagaattggctgaagtcgaagcagaactggatgctgatttgaaggctaatggtaaatctccaaaagacagtagtaagagagaagatgaaaacaaaaagcagaatagggcgttcctcacgcaatttttctctccaatttttctcaaggctttttcgattaatttctttggagaatggggtgacaagagtcagcttgctacaattggtttagctgcagatgaaaatccatttggggtggtccttggtggagttgtggcacagtttttgtgcaccactgctgctgtaattggaggaaagagcttagcgtctcaaatttccgaaagaatagtggctctttctggtggaatgcttttcatcatttttggcatccaatcgtatcttacttctgttgaggcttaatgctttcttatggtttgtagggagactgatgaagaggaagaacgttactatccatagtttattagacatttaattttgtttattagacatttacacaagtgattacaaaacaaatctgagagtttgattgtctacagtgaaaacattgaaatgtgctgaagcagccatctgacttcaataaagtttttttggtaatcagttttaatcctcttttgttttttggagtcatttggattttgaaatgttttgcaaggatttgactcaatgagatacaaaatgtggttttgttttaaaaaaaaaaaaaaaaaaagnnnnnnnnnnnnnnnnnnnnnnnnnnnnnnnnnnnnnnnnnnnnnnnnnnnnnnnnnnnnnnnnnnnnnn

SEQ ID NO: 130976 - DNA, 924 bp, Arabidopsis thaliana
atgaaacccaattagtctcaccgcctgttttctctactttcaccaccgagccatcgactgctcctttcactcctcctccagagcttgcacgtctgactgccccttcttcacctgatgtaccttatgctcgtttcttgacttcctccatggatctcaagaactctggtaaaggtcattacaatgatcttcaagctacttattctctttatcccggaagtccagccagtgctcttagatcaccaatctctcgggcttcgggagatgggttattgtcgcctcaaaatggtaaatgctcaaggagtgattctggcaacacatttcggggtatgacacaaatggagtctcaacaacctttgcaggaggtcaaacttcttctgtcctgaaactttttgccaagttttacctggtccacgtcccttcagttccccaaaacgggggaagattaagcgtgtcgaaggattcagatgtgtatcctacaaatggatatggaaacgggaaccagaataggcagaacagaagtcccaagcaagacatggaggagttagaagcttacagggcgtcctttggttttagtgcagatgaaatcatcacaactagtcagtatgtagagatcactgatgtgatggatgggtcttttaacacatcagcttactctccaagcgatggacaaaagcttctcagaagagaagcaaatttgctgagtcaaacaagccccaaatcagaagccgatcttgattcacaagttgtagacttccaatcaccaaagtcatcaaatagctacaaagatcacaaacaaagaaaccggatccatgcggatgaagaggctttattgtcgagagtggggtctgtaaaaggaagcagaagctatcatatttcaagctctgatgcagaggtcgagttcagaacatgaagaagcttaaggga

SEQ ID NO: 130977 - DNA, 438 bp, Arabidopsis thaliana
ggttttggaagccagatccggctcacggcggagcaatctgctgctttagcggcggcgttggagaaaagcagtgtgcgtttcatatgggcggtgagagacgcagctaagaaggtgaactccagcgataactccgttgaggaagatgtgatcccggcgggatttgaagagagagtgaaggagaaaggactcgtgataagaggatgggccccacaaactatgattcttgagcatcgagccgttggatcttacctaactcatttgggttggggttcggttctggaaggaatggtcggaggagttatgttgctagcgtggccgatgcaagcagaccatttctttaacacgacgctcatcgttgataaactaagagccgcagtgcgagttggagagaacagagactcggttcctgactcggacaagctcgctcggaatttggct

SEQ ID NO: 130978 - DNA, 457 bp, Arabidopsis thaliana
gggtcttctgttttgtctatttttgtttggtgcattagctccaattgtgaacgttaattatggaggaattagtggtgctttttatgggaactatagatctaattatattactgaccagatttacagtcagcatagggatagagttttggatacatctcgtagtggtgctggtactggggtttctaatagtaatgggatgcatcgtgggagagattctgatcgaggagctaggaaaaatatatctgcaacagagagttctgtcactcctggaaatggtagtgagcctctagttgcatcactctttgttccgaggaatgacaagcttgtgaagatagatgggaatttgattatcaattctatattggcgagtgagacagccgtggcttcgagaaaggcttttgtatcaaaggagaggaaagctgacttgtgatctttaaagattattacccctgcactg

SEQ ID NO: 130979 - DNA, 497 bp, Arabidopsis thaliana
aaaagaagcagaatcattcccatttataacaaacctaaacctctcttttcttcttctctttacctttttcattccaaaatctctctctctctctctctttctctggctcgggaagaagatgtcacgtagttgctcacagtgtggaaacaacggccacaactctcgcacatgtccgacggacataactaccaccggtgacaacaacgacaaaggcggcggggagaaagccatcatgctttttggcgtccgcgtcacggaagcttcatcatcttgttttagaaaaagtgttagtatgaacaatctctctcaattcgatcaaactcctgatcccaacccaaccgatgacggtggttacgcttcaaacggcgtcgttcacgcctccggtagaaaccgtgaacgcaaacggggttaataaaataacctttcttctctctttcccaaatctcatctctggttttggttcttggttttgaaactttcttgcaaatttggaattt

SEQ ID NO: 130980 - DNA, 604 bp, Arabidopsis thaliana
cttccgattactgaatcatggggcaagtatggaatcatcagagaaactgatatgtggaataaacgtccagagttcacagcatggttgcttgaagtaaagaaggttaatttggaaagcttgccaccttgggaagagaagaaaatgtttaaagattttatggaggatcataatactggtacatttacctcgaaaaaatactatgacattgatggttactatagacttaagttggaaaaagagatgaaaaagggtttgaagaaagctggattagtgaacgtactgtgttcaatgatgaggaacaacgccgactggagatgcaggaattacgtgaaaggcagaaggaagaagaagtgttagctctaaagcgatcaatggaaggtggaatggcgcaagctatgaaagagcaagctccgcttaaggaagaaatggtgtacttatacaagattggggacatggagggtgcagctgctatacagagaaggttggatccggatgttcccatgtgatgtgtagctttttgttaagctacaatatcttctcgattgtgttccaagaatcgaacttttgtaacattaggataagagaaaccaaaattgtatgtcct

SEQ ID NO: 130981 - DNA, 513 bp, Arabidopsis thaliana
aaagactcataaatctagggctttcttctagagatcgaagaagaagagttcacatagagagattttgttcgtttcgagattttcttcagtcccaatggcgtcaaacaccagcaacgacaatttccagcatagaccacggcaaagaaacggaccacctcctccgcggcgacagggaagaaatccgccgcctccgtcttcgtcaacgcgaacttctcagaatcagccaccacagcatacgccgcaggagaagaagaaaccggtgtttgtcaaagtggatcagcttaaacctggaacgagcggccacactttgactgttaaagtcgtcgatcagaattccgtacctcagaaaccgggagctgcttcttcttctcatctccgacctgctaggatctctgagtgtcttggtggagatgagactgcttgcatcctcttcactgctcgcaacgatcaagtggaattgatgaaaccaggagctactgtgaattttcggaatgcaaagatagatatgttcaa

SEQ ID NO: 130982 - DNA, 609 bp, Arabidopsis thaliana
  unsure (1)..(609): unsure at all n locations
gcgaggtggcagaggaaatgcttatgtgaacgttgagcatgaagatggaggttgggaacgtgagcagtcctatggtagaggaagaggacgtggcagaggacgcagcagtcgtggtcgtggaagaggaggatacaatggtcctccgaatgagtatgatgctccgcaagatggaggttacggttacgatgctcctcatgaacaccgtggatatgatgaccgtggtggttatgatgcccctcctcagggccgtggtggttacgatggtcctcagggtcgcggtggttacgatggtcctcagggtcgccgtggttatgatggtcctcctcagggccgtggtggttatgatggtccttctcaaggccgtggtggttatgatggtccttctcagggccgtggtggttatgatggtccttctcagggccgtggtggttatgatggtcctcagggtcgtgggcgtggacgtggacgtggaaggggaggacgtggaagaggaggaggacgtggtggtgatggtggtttcaacaacagatcagatggaccaccaagtccaggcagcttccttgagagtcaggtttttctttacacaaacatnaaaaaagaagaaaaaaa

SEQ ID NO: 130983 - DNA, 424 bp, Arabidopsis thaliana
gattcttcgaacttgatatttgggaaacttgcaatccgattctgtcaccagtgttttgccttcataaatggagtttgttgttgaagaaggaaagctagtgaatgaagattgctcgactttagttctcccagcattgtcaattgggaatgtaggacagctcgctgttgatcttctagtgtcatctactggtgcagagagagttggttatcttgatgatccaaatctgcttccttgtgttggaaatgatgcttatggccctcttccttgtggcgagatcgcccttcctctcgaggtttatgagtcatcttcaattgctactacccttgctcagcaacggtctccagttgcaaagggaatgatgattaaatttgcggagaatatagccaattttgctgcttcaagtggaaagaagcacatcattgtg

SEQ ID NO: 130984 - DNA, 790 bp, Arabidopsis thaliana
gatttcttctataaggaagtggtaaattttttgagaaaggaacactgaaacaaagagagttcatggccactcaaggagaagcgacgttctccgcggccgcgacgacgacgtcgagctatccgacgggaggtgttggtggcaaattgaagcggcaatcggcgaggaggcatgcggcgacaccttattctcgaccaacacagaaccaggtacaacggaggccgtggatctcgagaatcgtcgatcctgcttatcggattatttccggcggcgctaccagaatacttccatatttcttctcgaacgccgcctccgctcctgctcttgctgctcctccagaggatcaaaatcaacatcaaggtgaggtgcagaataatccacaggacaatgatcccagtgtaaccccaatttcaaataaaccggagccagcatcaattgaagtgggaggtcctagtggtactgcaaacgtgaacgaaggcaatttcagtatcagtgcacagagaagagggaaagcagctttaaatgacgacgttgcaatctcggagcttgaaaggctaatggaaggaaaaacgttttcacaagctgaaattgatcgtctcatagagatgataagttcgagggctattgatctacctgatgtcaagagagacgagagaaatttggagattcctttgagagagggagccaagaaaaatatgagtttatttgataaggcaaaagagcccattggtggcaaggatgctaatagtgaaatatgggctacaccaaccccacttgcaaagtcaataatact

SEQ ID NO: 130985 - DNA, 466 bp, Arabidopsis thaliana
aaaagccacataagaagttgatgcagaagcaataataacaaaacaaaaaaacattaaaaaaaaaagctcttcagttttggtttctgcagtctccagtggctctcaagctctttctctttgctcttcttctctgtctcccgacttctctctcctccactgcctctaaaggtaaagagaagaagtcgaagtttaatccatacagatacacattcatcgataaagcaagcacattctcatcatcttcctcatcttcattttcatccaacggtcaagattcgtcctacgactacatagtcatcggaggtggaacccgcagggtgtcctctcgccccaacgttgtcgcagaatttcagcgttcttgttttagagagaggtggcgttccgtttacaaacgcaaacgtttctttcctcaggaattttcacatcggacttgctgacatttcagcttcttccccgtctcaagcgt

SEQ ID NO: 130986 - DNA, 693 bp, Arabidopsis thaliana
  unsure (1)..(693): unsure at all n locations
ggggaatgcgtagactggcttacaaaatacagaaggcagagaatgcgcactatatactgatgaactttgagatagaggcaaagtacttgaacgaattcaagggattgttagatagtgatgagagggtgattaggcatcttgtgatgaaccgcgcggccgccataaccgaagactgtcctccacctcctgagtttcactctgtccgcgcaggtgatgaatattatgacgatgatgaagaggaagagattgaagaagatgaagatgaaggtgagggtgaagatgaagaagatgctgataatatagagtacgaagtagatgatgatggtaatgtcgttatggtgttgtacggagatgaagaagaaggagaagaagaagaagatggagctagtgaacaagaagaaggacaggacaagtcaactaatggtagaagagaaacccggagaacagttaacgtaggaggttaggactgtctgtaattcttttgtttttgggtcatgttttggataatagggtcacacatcaaatcgaagttgtttgttgtactcataatagcatcctaagaagtatatgagaaactaaactattcccttgaaaagaaaaaaaaaaaaaaaaaagnnnnnnnnnnnnnnnnnnnnnnnnnnnnnnnnnnnnnnnnnnnnnnnnnnnnnnnnnnnnnnnnnnnnnnnnnnnnnn

SEQ ID NO: 130987 - DNA, 578 bp, Arabidopsis thaliana
  unsure (1)..(578): unsure at all n locations
ggaaaattaggcgcgcgtcatctccctcgcgacacatatatcataagacagagagcagggaacgaatctcaagacgttacgtattagcttatagccattagttttgtctcttcttcttcttctcgttggtcggcttcttcgtcttactaattccatgattctccttcttccttctgcttcactttctcgatgatcctctgcaccagccgcgatcatgacgttgaatcctcctccgtcgcagcaaacgtctcactcgccgcgtcggattcccaatcgccgcgttctcatcgtcggaaattattgccacgacgttttaatccaaaacggatccgtcgtagctgaaactctcggcggcgccgcctctttcatatctaatgtcttagattcttcctctgtctcctgcgatttggtctccaaagtaggacacggcttcagatacgaggtcaaccactttccgatcgtgggctccggagaaggaaacaacaagttttcgaggcgtttttcgatcctgggaatcgattggatcggncaaggttatcgggtnttaaaanggctttgaatganncccgtttttcctt

SEQ ID NO: 130988 - DNA, 928 bp, Arabidopsis thaliana
tgggaagatcagctctgattcacttgcttcgctcccaatcccgacgtctctcttcctccaccttcacttcaggatatcatcaccggtcaatagcaggatcatggtcatcatcagtgaacccgaaggtcagattccaggttccatcccttagccagagaagctgggcatcatttggagcaaagactagagaggacgatgatgagcacaagatcagcatcggaccccaagagaagaaagaagagaaggatggaggtgtggtttactatggaccaatctcatcaaccataaagaaagtgaaactcctctcactctccacttgctgtctatcagtctctcttggcccggtcatcactttcatgacttccccgggactgaatgtgatcatgaaaggtgctgttgcctctactgtgatcttccttagcgcatccacaaccgctgctctccactggtttgttagtccctacgtgcacaagctgaggtggcagcctggttcagacacttttgaggtcgagatgatgacttggctcggcacatttagcgcaaagacactgaaattctcagacatacgttatccagacacgcaaagaccgtatgtgagcttcaaggctgatgggaatttctactttgtggatgcagatcattgccctaacaaggcattgttggctaggctcactcctccaaaggatgctcatgactctgctttcaagaacttgtaatccaaattcgtttcttttgttatactctttttttgggtgtggatttttgttgggtttgtaagctctttaagatacttggatacctcctccccttctcatcactaatacccaaaaaaatgcaaataagaaaaggccgatttgaaccaaaaaaaaaaaaaaagggcggccgctctagaggatccaagcttacgtacgcgtgcatgcgacgtcag

SEQ ID NO: 130989 - DNA, 495 bp, Arabidopsis thaliana
cggttctagattgttattgtctccgaacgttctctcctctctgtctatcatcgaacgccgtcgctcgcgccgttgacttctacgcgagtgaccccaacgccttcaatttccgcctcgtcggataatttcatcggagaagacaatggtgatggaagttacagagactgtgcgatggtgcgttgttactggtggtagaggattcgctgcaagacatcttgtagaaatgctcgtacgttaccaaatgttccacgttcgtatcgccgatttagctcctgcgatagtgctcaatcctcacgaggaaactggaattctcggtgaagcaattagatccggtagagttcaatacgtctccgctgatcttcggaacaaaactcaagttgtcaaaggttttcaaggagcagaagtggtgtttcatatggcagctccagattcatcgattaacaatcaccagcttcagtactcagttaatgttcaagggacaacaaatgtaattgg

SEQ ID NO: 130990 - DNA, 741 bp, Arabidopsis thaliana
  unsure (1)..(741): unsure at all n locations
gatctggaccttcaaagtccactgctgtagatgattctgcgtccaagacaagcgaaaacacccttctaacatgtggaagggcatgggcgatttctttgacgagcaaaagtacaataagcgaggagattttgagctcatgttttcccggcaatagcggtgaaccaaatgaacatcttctataccgctcatattatcacgggaaaggcatgaatcgactgtggtccaacgttgaagggtatcatgctcctatactagtgataatttctgcaagttgtaaagtcgaacatgaggctacttcaagcgagaggaagtgggtcattggtgcaatcttgcagcaaggttttgagaacagagatgcattttatggaagctctgggaacttgttctccataagtccagtctttcacgcattctcatcttctggtaaggagaaaaactttgcgtatagccatctgcaccctgctggcggaatgttacaacgcacatccccaagccctgttnggaattggattccgggggaaacactttggaaaatgaaaaaaattttncattnaatgaaaaantttngcttaaaaatcacanntccggtccatcnatgccagtttgaataaaaactttaccaattccagggctcctcctttttnccccaaacccaagggtttttttttacccaattaaaaaggcntttgggttccttanaatatttnaaaaccnttnggggggttttanggttgggaaaac

SEQ ID NO: 130991 - DNA, 1203 bp, Arabidopsis thaliana
  unsure (1)..(1203): unsure at all n locations
tgcacctaccggacctgtatttcgggtcgacccacgcgtccgacctcaaacagtgttgagatggacttgcttggttcccttgcagacgtattttcatcaaacgcattggccattgtaccagctgattctatctatgttgaaaccaatggacaagcaaacgctggtccagctccatcgttttctacatctcagccatcaactcaggtatatacactgagcttggagtatgaagattatgatggtttcctatgattattgatgactgttgtttggattatgcagtcatttgatgacccatttggtgactctcctttcaagggccttcacttctactgacaaccgcctcaaccccacagcagaattttggagcttctttccagccaccacctccagccttcacttcagaggtctcacatcctgatactgctcataactttggctttggggactcattttccgccgttgccaatcctgatcctgcttctcagaatgtgcaacctccatcgaactcaccaggttttcctcaagagcaatttgctacatctcagagtggtattgatatcctcgctggcattctcccaccatctggacctccagtacaatcgggtccctcaataccaacatctcaatttcctcccagtggaaacaacatgtacgagggatttcattctcagccgccggtatctacagctccaaacctgcctggacaaactccatttggacaagctgttcaaccatataacatggttcctcattctcaaaatatgactggagccatgccatttaatagtggaggcttcatgcaccagccgggctcacaaactccttactctaccccaagtggaccagctggtcagttcatggcacaccaaggtcatggaatgccgccatcccatggtccacaacgaactcaatccggacctgttactctgcaagggnacaacaatgtcatgggagacatgttctcgcaagctacggccaacttcttgacgncatcatcatctcatccaggtctnacacctttaacagggggcaattgaggatnttccttcggcttaggaaaagnttttagccaaaatcaatnagttttgggnagacacggtttgcaggggggtttttaannttaaacatttntnggtnttaaaaaaaatcctttgggagccatagggggtttnctttgnggggtcaanagggggnaacgnc

SEQ ID NO: 130992 - DNA, 450 bp, Arabidopsis thaliana
tggagactttcgatgaattcttcccacgcagtgcgttttcagctggccctccagcatttgcatctacagatggggttacagctcctccaactgtgacttctatgtctgcccctaccacctcaaacagtgttgagatggacttgcttggttcccttgcagacgtattttcatcaaacgcattggccattgtaccagctgattctatctatgttgaaaccaatggacaagcaaacgctggtccagctccatcgttttctacatctcagccatcaactcagtcatttgatgacccatttggtgactctcctttcaaggccttcacttctactgacaccgactcaaccccacagcagaattttggagcttctttccagccaccaccttcagccttcacttcagaggtctcacatcctgatactgctcataactttggctttggggactcatttt

SEQ ID NO: 130993 - DNA, 415 bp, Arabidopsis thaliana
  unsure (1)..(415): unsure at all n locations
aattggtnttccttcctctgcctttcacttgagggtattaagatagacaacaactttaaataacacatattctcaattctgtaaagtcattctaatgaaacaaatgaacaacacagccaaaaaggcgctaagtggtaaagcctctggcaaacattttctcgattctcttcctcctaaaacccctaccggtttgagaagatcagtcacgttccttagtttgtctccatatctccagaatggtactttatcaagatccgcatcaagatctttccgcagaaatcttctctgcagggcccttaccaggacgcctaccacgaccaccaccacctcggccaccgccttctcgtccaccacctcgttgttgacctcctctcccttgtcctcctctccatggagcaccattggagtttccatt

SEQ ID NO: 130994 - DNA, 387 bp, Arabidopsis thaliana
  unsure (1)..(387): unsure at all n locations
cttagagtatgcagaggtaactcatactcccctccctcttggaaanctgaagttgttgatctatctgaatttacctatctcattatcggcaagatccacctttgtgcccaatgtcttgatggggatgcaagaactgagataccttgcgttaccatcccttatcgggaggaagacaaaactagaattgagtaatctagtaaaattggagactttagagaatttctcaacagagaatagcagcttggaggatcttcgtggtatggtcaggctgagcacgctcaccatcgaattaattgaggagacgagtttagaaactctagctgcatctataggtggattgaaatacctggaaataacttgaatagatgatctcggttctaagatgag

SEQ ID NO: 130995 - DNA, 383 bp, Arabidopsis thaliana
caacaacaacaacaacactctcttacctctcacgttcactctctcctccaccgtaacccccaccgtcgatgactcctccatcgaagtggtccgacgtccacgtggcagaccaccaggttccaaaaacaaacctaaaccacccgtcttcgtcacacgtgacaccgaccctcctatgagtccttacatcctcgaagttccttcaggaaacgacgtcgtcgaagccatcaaccgtttctgccgccgtaaatccatcggagtctgcgtccttagtggctctggctctgtagctaacgtcactttacgtcagccatcaccggcagctcttggctctaccataactttccatggaaagtttgatctcctctccgtctccgcaacgtttc

SEQ ID NO: 130996 - DNA, 384 bp, Arabidopsis thaliana
ccaaccttcatgtcgggcatttgatgtggggtgccagttccggaagtgattggaccggacaagtggcagggagcttatggtccttcctctacacattacaagtcatcttagctggtatacaagaagctatggctgccatgagaccgagacagagcaacattgagagtctctatgatatcaagaagatggagtcagagatggataatcattggctttatcaagttgacaaagctatctcctttatagatataagatcgtgggtacagtttgatttaagcgagagagtttaagagctagtgtaacaaagaactagcaagaaaactgaaacatccatttttcttgtttagtaataaaacaatcaaccttattaagtcaaaaaaaaaa

SEQ ID NO: 130997 - DNA, 646 bp, Arabidopsis thaliana
  unsure (1)..(646): unsure at all n locations
nnnnnnnnnnnnnnnnnnnnnnnnnnnnnnnnnnnnnnnnnnnnnnnnnnnnnnnnnnnnnnnnctttttgtttttttttttaagatttggttgaaccaagtcagcccaaaaaaaggggggctgtttcttgcataaagagaatctcctagaaaaagcagagtgacgtggatttggttctgctgagcataagaattttaacaaaagggtactactacaatagggaaatttactgcaggtccaagcaaagactgtagcagtgttgggccatgaaaaagacctgacctgtgaagattagccataaagagcacgccacggactttcttcttcttttgatgtctttgatgcgctccacttgattctgtctcttgagaaagacagtcctgtccaactagccacgagctcccctgtttcatggatcacctgaagctcttcgtctagagctttatgagttaggctattgcttctttggcctatgagaatagcggtaggcaggcgtttaacacgagctagatgaagcaagcatgacaaaggttcataatggatctgcatcgatagtggtggtttctcgatgcgagaagcaaataacctactggtctctgtttctgtagcaacttgaacgtaatgaagactagcttttctgttatt

SEQ ID NO: 130998 - DNA, 384 bp, Arabidopsis thaliana
gaagaagtttaagaagcagagtgtataacaagtaacatggactcaagagccttacccttctccgttctcgtcatcctcattgctgcggcggtgttggccaacgcttacactcctcctcctcctcctccaaccaccgcataccctgccgtgaaaaccgtggaagcggcagcggtaggaatggtgttctgtcaatcctgcgacaaattcggatcatggtcattggccggagcaaaatctttatccggagcttatatcaacattatttgccagaatcatttgtcacaagtggagttttacaaaggctttccaactgtattccttccgtgcattttttttataggatgctccaaaaggcttttaaagtattacttttcactatttttt

SEQ ID NO: 130999 - DNA, 566 bp, Arabidopsis thaliana
ttcaatcgaaacctctgtgagatcgcttttgatttttgtaattctcgtcgcaggatatctctctcattgggatcagacatggctgttgttgcaacatccctgatattcgctgtcgtaggcatcattgcttcgatatgcactagaatctgcttcaacaaaggcccctccaccaatctgttacatcttacattggtcatcaccgcaactgtctgctgttggatgatgtgggcaattgtatacattgcgcagatgaaccctctcattgtccctatcttaagcgaggtggagtagaaaccattctactcaaactaggaaaccaatgcacaaatttgagtaagagccccgctgctctttctgtatcttcttcaaacatatttgttttcccctttgtaattcttatcgtggtgtggaacaacgaaactatccccctctttactcaaacatattctgtctctcattcaattcttgaacagttttcatatactcaaagactctaccagagagtgagtgtattgttgatgaaataaaaacatttggcagaatattcgccatttcccaaaaaaaaa

SEQ ID NO: 131000 - DNA, 563 bp, Arabidopsis thaliana
  unsure (1)..(563): unsure at all n locations
gaagatcagtgagctttaaagtttgtcaatataacgttatgggccatatctataagagatataggccctacatacactgtttcacacattttggttcgaagtaaagttgtaacttttaactgtacatttagaaagaaaaaaacacaccaaaaagccattattctctgctattacaatgacgaaaacgattatcaattgattaccgtgggaacgcagcgaggtgttgcgccacatcagcgtcgagcggttgtgccacgtcagcagccactggatcggcaacaacgacgacttgtctacgttgtctttcccggagatagagaattgtgatgagacagacaaagagtgtaagtattgttgcattaccttcttcaaacaccacattctctatccaagtctctaccttcggatacaccttctgggtaatgaatccacaactctcaccagggcggtatcagcatagtttcttcggggccataagctagcgggggcaagtgtgactggcaatctcgcggctgcaccgctaaggggtcaaacagaacggttttctaatggggcanggggtc

SEQ ID NO: 131001 - DNA, 466 bp, Arabidopsis thaliana
ggtggcgataaggcgagaagaaccacgtccacgacaacctccggtttggcgtcatcttacgtcacctactcaacgggcgcgtccggtggtcagcagcagcaacattcgaggagtctttcgtttggcattcacgcgccgccgtgttactctatcgccgaatgctcggaggagaatattgagagtttcggcgaaagcgtcgacgaagaatgctatggagtataggaaattaggagattccgatctcaacatcagcgaagttactatgggcactatgacatttggggagcagaatactgagaaagaatctcatgagatgctgagttatgcaattgaagagggcatcaattgcattgacactgctgaagcttatcccataccgatgaagaaggagacgcaaggtaaaacggatctttatatcagtagctggttgaagtctcagcaacgtgacaagatagttttggcaact

SEQ ID NO: 131002 - DNA, 475 bp, Arabidopsis thaliana
  unsure (1)..(475): unsure at all n locations
gggagcnnacaacgagcatgggnngatgaatgagtttaaggttctgcctggtcggatcgatgatcttcagtggtctgctgatgggatgaggatcgttgcttctggtgatggcaaaggcaaatctcttgttcgtgctttcatgtgggattcaggatcaaatgtgggagagtttgatggtcattctaggagagttcttagctgtgctatcaagccaactaggccgttccgtattgtaacttgtggggaggattttctggtgaatttttatgaaggtccttcttttaagttcaagctctcaagcagagagcattccaactttgtcaactgtgtgaggtttgcaccagatggaagtaagttcattactgtgagttcagataagaagggaatcatatatgatggaaagacttgtgagatactgggagaactgttttctgaggatgggcataaaggtagtatttattgcagtcttttgtag

SEQ ID NO: 131003 - DNA, 514 bp, Arabidopsis thaliana
  unsure (1)..(514): unsure at all n locations
gctatgcgccatggcacgccattagcgcgctttttaaaaccaagggttttatctcggtgtctaaatctgtttgttttggtgtttctattgaatttagattgaactgaaaactgctcctgctgattttcggtttccaacaacaaaccaaacgaggcactgcttcacccgttacattgagttccacaggtgcacaactgcaaaaggtgaggatgcaaatgaatgcgagaggttcgccaagttgacaagtggaatgagcagagggagactggaacattccctggccctctttgattcacacaagaatctctctttttcattttaagtttgagaccaaaaaaggtcgtgtggatgatcatgaaatctataactcttgtctttcattaatcgtttttccttggatgatcaattaaataaattggaacaaaaaaaaaaaaaaaagggcgnccgctctagaggatccaagcttacgtacgcgtgcatgtgacgtcatagatctcntatagtgcgtcctaaa

SEQ ID NO: 131004 - DNA, 434 bp, Arabidopsis thaliana
aaagggtttactctgtcttcttcagacttctcagtgatcgaagctatgatgacgacaacaaccaatactatggctatgcttcaaaacctcgtcttctctgttccaatctctcgtatggtagttcggcgtcactccctcgctaccaccttctccgctgccgccacaaccgtcgtaccgtctcctaaaccggtatcagccaaaccggcgcgtactccacacgtggactcacatgttctcatcggaatgtcagagcctgagcttcaagagcttgctatcaacctcggtcaagaaggatacagaggaaagcagctccatcatcttatttacaagagaaaggttaataaagttgaagactttagcaatttgccactgacgtttcgtaaaggacttgtggatggtggatttaaagtgggaagatcacccatttaccaaac

SEQ ID NO: 131005 - DNA, 429 bp, Arabidopsis thaliana
gacgagtcaaagtgtaaaatcgttaaacccctcatggagtgagagagagaagaatgaagtacaacaacgagaagaagaaaggaggaagctttaagagaggaggtaaaaagggttcgaatgaaagggatccattttttgaggaagagccgaagaaacggagaaaagtcagttacgatgacgacgatatcgagtctgtggactctgatgcggaagagaacggatttactggcggagatgaagatgggagaagagttgatggggaagtggaggatgaagatgagtttgctggtgagacggcgggagagaagcgaagagattggcggaggagatgctgaatagaaggagggaagcgatgaggagagagcgtgaggaagcggatatgatgatgatgatgatgagatgagcatgagactatagagagttgatgcg

SEQ ID NO: 131006 - DNA, 589 bp, Arabidopsis thaliana
  unsure (1)..(589): unsure at all n locations
agataagagaacatgaggaactagagacacttanagtttcattccaggngaataaatctgagggagctgttgcggaaacacacttggatgatgaacaatctgaggaagctgtagcagaaacactcttgaatgatgaacttgatggggatgatgaagaagaagttgctgaagacaatcttgaacctctgaacagttcattgtcatcctcagaagaaaatagagtagatagaatccgtaggctagagcaaaagcttcctcggtaaagaaaaacctcttgggtggaggagttggctttgataaaccagaagcaaaacccgctagagttgaaggaaagaagaaggagaaaaagaagaagacaaagattcttgtgaaaggccaagccaaaaaggggacaaagatagaaatccctggatcatcaaagaggttaaaggtgaaggagaaggctctattaactggcgtcttagtcaagtatgcggctaaagttgcttcaacctcaaacaatgatgaatgatatcattaacaagtgatcaaattttgatataatctttcatcaactgctagtagtgagccatcttcgatttgttttaaa

SEQ ID NO: 131007 - DNA, 471 bp, Arabidopsis thaliana
  unsure (1)..(471): unsure at all n locations
caaagctgtcgtttactgccaagnnagagatgctagatatcgctncacaactccttctacgctcaagtggccaggaaagcagaaggaagaaagctgggtgcctattgttggaccgaagaccccaccagcctggatggaacgaagaggaaccttagctaaaacggctagagctttacaaaaccaagctagagacgacatcgatgcagtggcttggaagtaagggggtttgctaagacatattctttatattgttaatttctttgttcgtgtgggcacactgcattataatagatatgtttggagttctaacttccagtctacacaaacatacacgcgactactcatgttttcttgggtcgctaatttctatcacaactttcccacttttttttggtgtgtatcttcgattcttgaatactggtttttagaacagttaagacatattttggagtcgcacnctttacattagac

SEQ ID NO: 131008 - DNA, 616 bp, Arabidopsis thaliana
  unsure (1)..(616): unsure at all n locations
ggccaattagcatcctttaacacgnngcttcaactggataatgaacatatgaaggcgataatagcaaaaatagagtcccttcgtcctaatgttctgctggtagagaaaagtgcatcttcatatgcccagcaataccttctagagaaggaaatttcattggtgctcaatgtgaaaaggtcattgctggaccgtatagcccgttgcactggtgctgttctttgcccctcactagatagtattagtactgctcgattgggtcactgtgagctgttccggactgagagagtgttggagcaacatgaagctggcaatcagtcaaacagaaaaccatcaaggacattgatgtactttgaagggtgtcctaggcgcctaggttgcacggttgtgcttcggggaagttgtcgtgaggagctaaagaaggttaaacatgttattcagtacgctgtatttgcagcttatcacttatcgttggagacttcattccttgcggatgaaggtgcttctctgcctaaaattagactgaagcaaccagggatggtgcggactgcatcacaaaggaggataattgatgaaggcatttccttaataactcaatctcctacagaaacagatagtc

SEQ ID NO: 131009 - DNA, 1059 bp, Arabidopsis thaliana
caaaccgaacgagccgaggccttgttcaagagaatcattgagagtgatagtctcacttttggtgccatcacatacaacgagatgatgactttatacatgtcagttgggcaagttgagaaagtacctgaggttattgaagtgttaaagcagaaaaaggtttctccggatatttttacttataatttgtggctaagttcatgtgctgcaacctttaatatagatgagcttagaaagattcttgaagagatgaggcatgatgctagttccaatgagggttgggttcggtatatcgatcttactagcatctacataaacagtagtagagtaactaatgcagagtctactttgcctgtcgaagctgagaaatctatttcgcaaagagaatggatcacatatgacttccttatgattctgcacactggtctagggaacaaggttatgatagatcagatttggaagtctttgagaaacaccaaccaagcattagataagtagaagctacatttgtgttctttcatcttatctaatgcttggtcatttgagagaagccgaggagattatccatcagtggaaagagtctaaaacgacagagtttgatgcttctgcttgcttgaggatcttgaatgcttttcgagatgttggtttagagggaatagccagcggctttcacttgatcttggtgcataacaaatgcagcttggagaatgaaggatcatcttaagatggagaaataagttggtgaaaattttatgctcttagcaagaagaatcagatcaagctcattaatcatggtggatgaataaaatagaggttccttctcttcactgtgattcttaaatatctttttgttctttacgtgggaggtcatgagacacatagatttcctcaccagaagattttgctgcatagtcggaagatgtgtttccttaggcaaggtccataacatttcatatgtaacgtcaaatttcaaaaagtccaaattttacaacaaaaaatagattgtggaggtttttcttgtatggttgttgtttaataataagtctacaaaatttgtttttg

SEQ ID NO: 131010 - DNA, 620 bp, Arabidopsis thaliana
  unsure (1)..(620): unsure at all n locations
ggcaaacaagaactagtcagtttctttgttttagacaacaagaatctgtgaactaacacaaaaacattgaaagaatgatcttaacaatgaaacttgttcaccctctccatcactctttgtcttcctccattccctttccctcaagaaaaaggcaatccaaaccgtaccggtgctcgttaccttctcccggctgcgaaaaggtcatcagaacagagactgtcctgcctccggcgccggtgagttgtgaagggagaagggtcttacttggatgtcttctcgctacagcttctgggattttgtcaactggttcagccgaggcagtaagcaccagtagaagagctctacgtgcatccaagttaccggaaagcgatttcacgactctccccaatggtctcaagtactatgatataaagggttggcaatggagcagaggcttgtgaaaggatctccgggccgcagttcaccattgttgcaaaatgggaaggggtaacgttcatgcaagtcgcaagggcttggtnttggggttgnccnctttttgggtttacggtggcaaataaggggggnaattttctnaagncttncctttgntttaagggtcgttaggggcannnttgtttttc

SEQ ID NO: 131011 - DNA, 695 bp, Arabidopsis thaliana
  unsure (1)..(695): unsure at all n locations
actataaaaaattatgacgtcgcatgcacgcgtacgtaagcttggatcctctagagcggtcgccctttggtttttttttttttattgaaaattattaggaatacttcaatcgaacatgtcccacaaaggccaaaccacacacatggaatgaccaattctctctcatacaaagatattgaaattcagaaattatttatgaaaaactatatagagaattcatattacgtaaaacagaaagaaaaagcagcgggaagagacgtgagcttattgcatcatttagaagttgtagttctcgtcttcgtggagcttttcatcgtgacaacaagagaagctcatgtacttctccatcggacgctgacactcgaagcaattcatcttctccggaatccgaccgctccgagcagtgatgtggaaatcaaagtggccgcaaggttttccggtttcacggaggacctcatcgtggtggtggtcggacattgctttggtgtagcctttggtcgggacgtgggttttccaggtccggtcgtaaacactcatagtcctctctatggcaccgtgagcgatcattactatctcaggtcctttgctcagtagtgcccatcctccaagcttgtcgtagcttagtatctttttgattccttgcattacctaatcaacgttttcaaacacacanaatcatttaataaccaaattga

SEQ ID NO: 131012 - DNA, 421 bp, Arabidopsis thaliana
gattagagaaatagaaaaatcaaaagaagctttggcaaagagctaaagatcaaagcttttctttgagaatgagattgtggattgtgagtgtactcgtgcttacacaccttgtccatggagctctctgttgggggaaggatggtcactacactgtgtgcaaattagctgtgggattctttgtggatgattctattgctgctgtgcagaatcttctgcctgaatctgttgatggtggtggactagcagatttttgctcatggcctgatgaaattaaaaaactctcgcaatggcaatggactagcactttgcactatgttaacacacctgaatacaggtgcaactaccagtattggcgggactgccatgacactcataagcataaagactggtgtgtgacaggagcgatcttcaaatacacaaa

SEQ ID NO: 131013 - DNA, 876 bp, Arabidopsis thaliana
aacaccaccaatcatggctcttctcttcatactcgacgatgaagttgtgaagctatcaccgcatgctcgggccattagagatgtggaagatgaagaactaagaagctttttcttcggaatgtccccatggcagtttatactcattgtcgcggccagttcaataggagaagagctcttttaccgtgttgctgtacagggtgctctgtctgatatattcttgaaaggaacacagttgatgacagattctagaggcatggcatctctgaccggagtgtttcctccatttgtcccatttgctgaagtctttgcagctgtaatcaccccgactctcacaggctctctctactttcttgctgcgcctccaaaagacccgacatacatagttgccccggttttaagggcacggcgagatgattttaagaagcttttgtccaccttggtatgagaagagccagatggaagaagatttactctccactccttgaaggactcttagccctctaatctgggtattgaatgggttcagacggataatatattagcaccgatgatgacgcatggtatatactcggcggtcatattagggcatgggctgtggaaaattcacgatcaccggagaaggttacgccggagaatcgaacacattagatcggaggccacggataagttgatttaaatcaaatatagatggtttaattggttggggggtggatttgtgtgtatttttttggtatggggtcgtatagtgattagggaaattagctaggacctcttccaattaattagagagctacatgatacagtagataattaattacatatacgtacatatataatattccctaagaactaagaagtaactttttactttctcca

SEQ ID NO: 131014 - DNA, 449 bp, Arabidopsis thaliana
gttggggcgaacagactttattcgggttccatggtcaaaactataaaagtttggagtttggataatctacagtgtatacaaacactcactgatcattcatcagttgtgatgtctctcatttgctgggatcaattccttttgtcttgttcattggacaacacggttaagatatgggctgcaatcgaaggtggcaatttggaagtaacatatactcacaaagaagaacatggagtgctagctctatgtggtgtacatgatgcagaagccaagcctgttttgttatgcgcttgcaatgacaacaccttgcgcctctacgacttaccatcatttacggagaggggaaaaatctttgcaaagcaagagatacgggcgatccagataggtcccgggggcatatttttcacgggtgtcggaactgggcaagttaagatggaaatggtgcactgaac

SEQ ID NO: 131015 - DNA, 557 bp, Arabidopsis thaliana
  unsure (1)..(557): unsure at all n locations
aaaacaaacaaacaaaaatatcttagtgagcttaatcaagtacagcaatggcagacgaggtgattctgcttgatttctggccgagcatgtttggaatgaggacgaggattgctttagaagagaaaaatgtcaaattcgattacagagaacaagatctgtggaacaaaagcccgattctcctcgagatgaatccggttcataagaaaataccggttctcatccacaatggtaatccggtatgtgaatcactcatccagatcgaatacatcgacgaagtttggcctagcaaaaccccacttcttccttctgatccttaccaaagagctcaggccaaattttggggagatttcattgataagaaggtgtatgcttcagcgaggttgatttggggagctaaaggcgaagagcatgaggcggggaagaaggagttcatcgggggctcaaggcacttgggtttagntttgngcaagcttcttttggggnganattcggtatgtgnaagcccattggtttcagtggttagngttaaaatttggttnncttagccgtnccaantt

SEQ ID NO: 131016 - DNA, 973 bp, Arabidopsis thaliana
  unsure (1)..(973): unsure at all n locations
ccctaatacgccccctcgagatgatggctcttctagccattgatctcgatatgtttgggcatggatcgacggggcaagtattgggccggaccgatgtggatcgggttgagtatgtgcggatcgggctctgataccatattagagtgtaggttaagattattcaaacttcaaaggcaaaaccaaatgagcttcgtgtggtccgctgcggtgtgggtcatagctgtagccgctgttgtgattagcaaatggttataccgatggtcgaacccgaagtgcaatggcaagttaccaccgggatcaatgggtttaccgatcatcggagagacatgcgacttctttgagccccatggattatacgagatctcaccctttgtcaagaagaggatgttaaagtacgggccattgtttcggacaaatattttcggatcgaacaccgtggttttgacagaacctgatatcatcttcgaagtttttcggcaagagaacaagtcttttgtgtttagctatccagaagcttttgtcaagccatttggaaaagaaaacgtgttcctcaaacatggaaacatccacaagcacgtcaagcaaatcagtcttcaacatcttggctctgaggctttaaaaaaaaagatgataggagaaatagacagagtaacctatgagcatcttagatcgaaggctaaccagggtagcttcgatgctaaggaggcagttgaaagtgttataatggcgcacttgaccccaaagataataagtaacctcaaaccagtaacacaagcaactcttgtggacaatataatggccctaggttctgaatggtttcagtcacccttgaagcttacggctttgcatttctatcctcaaaggctttatttcaccgtgaggcggcctnccngggtgttaaggncggtttnncggggnggaaangncccngnaatttccggggcttcctgcanattgtggaggggggggnaaa

SEQ ID NO: 131017 - DNA, 435 bp, Arabidopsis thaliana
caaagttcatataataagaaaaacagagagaaacacacagagagctagaggagagtgagtgtcaggggttgtgttcgctgcggagcatcatatccatggcaaacatctgccaatgcctttgaatccgtcgatgaatccggaatcaactgaagcctgggttgagatctccagccgcagatcatttgtcgccggcgaaggtagtcggaagaagctagagaggaagaagagccaagtgttactggaaggttacgttgagactgcttcttcttcctcggtggatgatcaaaaggacgatctgacgagatccaagagtttgacggatgacgacctcgaagatcttagaggttgtttagatctagggtttggttttagctactaccagatccctgagctctgcaacactttacctgctttggagctttgctattcaatgag

SEQ ID NO: 131018 - DNA, 824 bp, Arabidopsis thaliana
agactgaaaaaaatggcgtgcttcatcatctcatctcttcgcactcccttcgcctgcttctccgtttctatctgcaccaaaccggaatcgagttcgtgttcttgcgaaatcatgcccggagaatcagagcttcgactccaacgattcggattcttcctcagagactacccacaaagcccagggagatcagaaatcagtgtcacggagacagtggatgacggcatgtgtgtgcgcatctgcagctttaattagcaattcttatacctttgtctctgtacaaagcgcagccgctttagacaagaaaccaggaggttcatgtcgtaactgccagggcagtggtgctgttctttgtgatatgtgtggtggtacaggaaaatggaaagctctcaaccgaaaacgtgcgaaagatgtatatgagtttacggaatgtccaaactgttacggtcgaggtaagcttgtttgtccggtctgtttaggtacaggtttaccaaacaacaaaggccttcttagaaggcctggtgctcgtgagctactcgaaaagatgtacaatggtcggcttcttcctgattcatgagaagattgttactgcaaatatgattttaagcacagagccagtagacatgatgatagaagcggatgaaaacttacacattgaggatgcatggaaagctatagaagaatgtatcgaattcaacatgtttttataatgctgctaggtttgtgttgtaaattctataaacataaaactttccttcttccccatacagactagacgaaaagatttcgactaagataaaaaaaaaaaaaaaaaaaaaagggcggcc

SEQ ID NO: 131019 - DNA, 415 bp, Arabidopsis thaliana
aagagagtgagagtgacggcgaggaagaagagaaatgtggttcgccggcggtggtggtggactgaggaagctctgcagagcgtcggctattttcgataatgagataagttataactctttgttggtgagatacatgtccagagaacgagctgtgaacgtccggaagataaaccctaaagttccgatccaagaagcttacgccatttctaattctctctacgatctctttaagctacatggtcctctctccgttcccaacacttggctccgcgctcaggaagctggggttagtggactgaatagcaaaacacatatgaagctattgttgaaatggatgagagggaaaaagatgctcaagttaatctgcaaccaagttggttcctccaaaaagtttttccacactgttttacctgaa

SEQ ID NO: 131020 - DNA, 818 bp, Arabidopsis thaliana
ttccctaccaaaggttgataaggttttttattcttttcagcgctcctgaagccaagagctgggtgtccaagctcagctccttcagaacatcgtatttttgccagtcctcttgcaagaaagttggctgaagattataatgtacctctctcaagcattaggaggcacaggtcctgaaggacggatagtgaaggctgatgtcgaagatttcttagcttcaggcagtaaagaaactactgccaaaccttccaagcaagtggattcaaaggttccagctcttgactatgttgacatccctcacactcagatacgaaaggtcacagcctcacgtttggcattctcaaagcaaactattcctcactactacttgaccgtggatacatgtgttgacaaaatgatgggtcttaggagtcaactcaattcatttcaagaggcttccggtgggaaaaggatatctgtaaatgatcttgttattaaggctgctgcactggctcttcgaaaagttcctcagtgcaatagttcatggacagatgaatacatccgccaatttaaaaatgtgaacatcaatgtcgctgtacaaacagaaaatgggctctacgttcctgtggtcaaggacgcggacaagaaaggactgtctacaattggagaagaggttcgattcttggctcaaaaagcaaaagaaaacagcttgaagccggaagattatgagggaggaacattcacagtctccaacctggggggaccttttggcatcaaacaagtctgtgccgtcatcaatccacctcaagcagccattctagcaatcggatctgctgaaaaga

SEQ ID NO: 131021 - DNA, 608 bp, Arabidopsis thaliana
  unsure (1)..(608): unsure at all n locations
ccngaccgntttcnnctgcctnctnttnccaaancnntcncntctngttgganctccaattgattctatgnnncaatgaancattgcattgtagcacttgcaaatcaaaagctactcgggatgccccagagaaagtgaacgtaaatggaggagctgtcctcccttaggacaccctcctaaggctgcagtggcgcccgtattctaatcacgttgcttgggatactaaagaagagaaacggaaagtacggtgtgggaggagtgtgcaacggaggaggaggtgcttctgctctagttcttgagctcctttgatgcattatgaatccaggttggtaaactaaatagatggatctatctctcatccaacttccatgagtcagtcattgcactttacgttttatgttagttggtctctcaataaaggagtgatcgttgatgttgttaagtctatttatttatatgaactcggcttctttttttctcttaccggtgacagtcagttattgaatcatggaccgatttaccgtaaaaaaaaaaaaaaaaagggcggccgctctagaggatccaagcttacgtacgcgtgcatgcgacgtcataacttcttctatagt

SEQ ID NO: 131022 - DNA, 794 bp, Arabidopsis thaliana
ggctcttcagctaggacttctagtattagcaaaaattaaagggtatggtgacgcagctcaggaaccagagtttttcactactgctcctgctcttgctataccaaaagccattgcacatgctggtttggaatcttctcaagttgattactatgagatcaatgaagcatttgcagttgtagcacttgcaaatcaaaagctactcgggattgctccagagaaagtgaacgtaaatggaggagctgtctccttaggacaccctctaggctgcagtggcgcccgtattctaatcacgttgcttgggatactaaagaagagaaacggaaagtacggtgtgggaggagtgtgcaacggaggaggaggtgcttctgctctagttcttgagctcctttgatgcattatgaatccaggttggtaacctaaatagatggatctatctctcatccaacttccatgagtcagtcattgcactttacgttttatgttagttggtctcccaataaaggagtgatcgttgatgttgttaagtctatttatttatatgaactcggcttctttttttctcttaccggtgacagtcagttattgaatcatggaccgatttaccgtagttaatgatttatcctcatgtactcattaaaacgtcgaccaagatttgacatttgatggataaatttaagtacacaatgtgtatgtaagacaagaaaataataataattggatatttttgtaaaaacaaaaacttaagggcgaccgctctagaggatccaagcttaggtaggcgtgcatgcgacgtc

SEQ ID NO: 131023 - DNA, 467 bp, Arabidopsis thaliana
ggctaaacgttttctgcttcttcttcctcttttgtcatctattcttcttcttgccgtgtccggcgcagcttactccacaacggcgccgtatcaaggctacaagccggagaaattcacccacctccacttctacttccatgacgtcatctccggtgacaaacctaccgccgtcaaagttgccgaagcccgcccaacaaccaccctcaacgtcaagtttggcgtgattatgatcgctgatgatccgttgaccgaaggaccagacccgagctcaaaggaagtgggaagagctcaggggatgtacgcatcaacagccatgaaggacatagtcttcacaatggtctttaactatgttttcacggcaggagagtttaatggaagcaccatcgcggtgtatggacggaatgatatattttcgaaggtgagagagttgccgattattggaggaactggtgctttcaggtttgcta

SEQ ID NO: 131024 - DNA, 428 bp, Arabidopsis thaliana
  unsure (1)..(428): unsure at all n locations
ggcgcgatggtgcatgcattcgagtgcttattctacaatacaatgtcggagaaggaccaaaggatggcgcgcatcatgcccgccaccttgtcacagaaaattgccaaactgtacccatttgtgtccggagatatgtcatcctgggcagtgtccattgccagagaagtgtggttaaaaggtggttgttcgttgcaagtgcctaaccttgaagaaagaatgggtatgccaggatgttcaagcagcccatagggccacaggttctgatcctaaagaagtaccaaagaacccgttcggtgttggcctcctcccttgtcattccaatctttaatttctttttcttgtttctaattattttttacacaattattcttttatataannnnnnnnnnnnnnnnnnnnnnnnnnnnnnnnnnnnnnnnnnnnnnnnn

SEQ ID NO: 131025 - DNA, 524 bp, Arabidopsis thaliana
  unsure (1)..(524): unsure at all n locations
gattccaacccttaataaaaagattggaaattaccctacaagtgacaacagtggaaccaaaataaagaccctaaaaccctataaataatactaccattttagtaaaatcctaatgtagataaacaaccaaatcaaacttgttaacagaaaatacagagaaagattggatttcaagttacattgacattaatatcggtatgcttgtttcttggatcggaagctaaagaagtctgccatgtattattattgaccggaagagacgagaccgaatggattgtccggtgatcagctgcactagagataggaattgcagcggtaggactcgacaacatgaaatcatgtttgttctttttcggtttctgatcttgatggtcagtgcccgctaaaaaacttcctacaaccacctgaaccggactcgcggctactagtaaaccggcgaggccaccgcctactacacgtncatcgngacttgctaacgatacactcattcctcccgttctacttcgtgttccgcctgaatcatt

SEQ ID NO: 131026 - DNA, 622 bp, Arabidopsis thaliana
  unsure (1)..(622): unsure at all n locations
ctatgacgacgcatgcacgcgtacgtaagcggtggaaaaaaccagaaaatggggttgcatccaatttccgacgccaatgaacacaatcccttcggctctctcaccgccgacgaattctacgccaaacattccgttagccactcctccgctttcatcaccaaccctcgcggtctcaaactcttcactcaatggtggtcaccactccctccaactaaaccaatcggtatcatcgctgtcgttcatggcttcaccggcgaatccagttggttccttcagctcacatcaatcctcttcgctaaatccggtttcataacctgcgcaattgatcaccaaggccatggattctccgatggactcatcgctcatatccctgacatcaatcccgtcgtcgatgactgtatctctttcttcgatgacttccgtagccgtcaaacaccgtcagatctgccgtgttttctctactctgaatccctaggnggggngattgcncttctaaatttggttngnnaaaaanggtttttngggtgggctttntcctaaagggggnttttnttnggaatnaagggtaaatttaaaacccgcngggccntttggggattttatnttgggggggggaattttt

SEQ ID NO: 131027 - DNA, 477 bp, Arabidopsis thaliana
gtgagcttcgccgttaaactttctccggtaccgggaaattaacgaagaaagcgaaaagtcactgttacactaatatcacaaatctctctctgtctctctctctctctttgtcgaagtcgtgcgtgatgctagttacggtggtgaagcagcggttagtgtactctcgccggagaaattggttatgaccggaatctcacctccgtgatcgaagaaactgttttcgtttttttatcgttacgaagaaatggaaaaacaggcgaagctaacgaggacacagtcgtcgttactccggtcatcgtcgaatctccgttcgtcatatcaaagcttatcttcaatcgtcggaggcgagcaagatctatgaagccggagagaaagaagggaaccagggaggaaaaccacctaaaccattcggttcaccaaatcctaaaaccggtttaaccagaatcaatccccggttagctttcacaatggtatctc

SEQ ID NO: 131028 - DNA, 431 bp, Arabidopsis thaliana
  unsure (1)..(431): unsure at all n locations
aacagaaatttcgcaggttgcctccgttgtctgaaggatctttggagaaggaaggnaaacaacaacaacggggggggaaaccaaaaagggggggggtaaaacaaaaaaaatgtctttcacaggaactctcgacaaatgcaatgtttgtgataagacagtctatgtggtggacatgttgtccattgaaggaatgccttaccacaagtcttgcttcaggtgtacccattgcaaaggaacccttcagatgagcaactattcctccatggacggagttttgtactgcaagactcattttgagcaactcttcaaggaatctggcaatttcagcaaaaactttcaaccaggaaaaactgaaaagccaaaactgactaggactcccagcaagatatcttccatcttctgttgaacacaaaacaagtgtgccgctttcg

SEQ ID NO: 131029 - DNA, 962 bp, Arabidopsis thaliana
gagcattcgaaaagttcgccggaaaaacaaaaacatgccgacgaacaacactccgttcctcgctatttttctcctctttcggggcttacgtcgcggttcgattcatttcccgggttagaagctgcaaccgggaaattagcttcgattccaggattatacgtgttcggagattcgttagttgatgccggcaacattaattactcaccaactccaatttctaaagctaattatccacataacggcgtcgattttccgaacaagaaacctaccggaagattctgtaacggcatgaacgccgccgatgctatcgctgagaaaggtggtttacccgtaccacctccctatctctcacttagaggcttactaaaaagggagaagagaaaatctgccgccgtgactggtgtgaattttgcttccggtggagccggaatcttcaacagttccgaccaaaaacttggacaagctattcctttatccaagcaagtcaacaattggctctctattcatgaagaagtcatgaaacttgaaccatccgcagcacagcttcacctatccaaatctctattcactgttgtcataggaagtaacggtcgtttcgattactttggatcgttcaaactccgacgccagagcaatcctcaacaatatacacaattaatggctgataaactcaaagagcaattgaagagaattcacgatagtggagcgcgtagattccttatcatcggggtagcacaaattggttgcacaccgggaaaaagagcgaagaactcgacactccatgaatgtgacgaaggggcaaacatgtggtgctctttgtacaacgaagctctagtaaagatgctgcaacaactcaaacaagaattacaaggctcaataacttacacttactttgataactacaagtccttacatgacattatttccaaccctgcccgttacggttttgctgacgttacatt

SEQ ID NO: 131030 - DNA, 621 bp, Arabidopsis thaliana
  unsure (1)..(621): unsure at all n locations
acggtcatgcgatnaagcttgatcatcgaattacgcggccgcagcttgggttcgagaagcagtctcggccaacatccccaaaaccagaactgaacaagatccagagacaacaactcagtaggcaacagacagagtcagcctccccgagaagaaagccagggataaaatctcgtggcctacagcaatctgaagaccgtttaagtgatgaaagcagtgacttgagaagtctaagatctgacagcaacgtaagcttggcctctaaccttgatactgaggttacaagcaggtataactatgagaggaacagcgacattacggagcagcacaccccgaaacaaaggagtccagacttgggaatgaggtcgctgtcaaaacctctgaaagttacagtggagcagcccagcccggtgtcagttcttgatgtagctttcgacgaagatgattcaccatcccctgtgcggaagatatccattgtcttttaatggggcggcaatcttaggttnttnnaggggcccntttggttgncaangncaacnacctttttttnggtcggttttttttgccctnngggnnannccgggtttnttgaaccctnnttgtttnccttccgggggggttttt

SEQ ID NO: 131031 - DNA, 492 bp, Arabidopsis thaliana
ccgtttcattagaagctcaaatttcaaatctcacttccttatcacaatgtcttcctctatctctcccctcctcacaaccgccatctccgtcgcaatcctcctctgctccaccatctccacagcggcgacaattccaaacatccaccgtccattcaacaaaatctacgccttcggagattctttcaccgacaccggaaactcacgctccggcgaaggaccagccggattcggacacttgtcaagtcctccatacggcatgactttcttccgacgaccaacaaaccgttactccgacggtcgtctaaccatcgacttcgtggcagagtcaatgaatttaccgtttctgccaccgtatctcagcctcaaaaccactaacgctaacggcacagcaacggatactcacggcgttaatttcgctgtctctggatcaacggtgattaaacacgcgtttttcgtcaagaacaatctgtcgcttgatatgactcctcagtc

SEQ ID NO: 131032 - DNA, 780 bp, Arabidopsis thaliana
  unsure (1)..(780): unsure at all n locations
cccggggtccggggacatttgagggaacttcccgggggatgttctttttaggcaaataaataaggggtgttttgtgctgggccagggcccagaggtgtcgatttggttgggagccgaactgtcagctgacgaggtgaagagtgctgcagtcttagcagcttgcagaacgttagctgaagagctaactgaattccggtttccagctccacgtattctcgcattcaaggaaggaagttccccagctagatattttgtttgccggcttataccagcacataaagaccctccttatgagcaggaagcaagatttccccagataagaacattggcggcagagcaaagaatgaaactaaagagtagttttatagagtttgatgaagccagtttctgcgaatggatgaggagtttgaaagtagtgcctcctgagcccaggtagtcatacattttattcttggttcatcggttttttttgccgccttttactgtcagaacattttttttgttctctgggagtcttttggttttaggattctctttaaatgatctccagttctttcaagtgaattatatactttgtccggtacagcaaaataatgtgtaaagatgttgaccgtgatttttatttttaccctttttcagtcgatgttaaaaaaaaaaaaaaaaaaaaaaaaaaaaagnnnnnnnnnnnnnnnnnnnnnnnnnnnnnnnnnnnnnnnnnnnnnnnnnnnnnnnnnnnnnnnnnnngaacgaaatcacaggcntttctaccgtggggggggg

SEQ ID NO: 131033 - DNA, 854 bp, Arabidopsis thaliana
  unsure (1)..(854): unsure at all n locations
ggacgaagcttctgcggtcctcatctccaagagaactcttttattagcgaaaaatcagaaggacgcagcgatatgcgtgctacagtagacgaaagantcaaagacattgctttgaaattcggntcacaagtgccaaaatcaaagctttatagcttccctaaggaactatcatccctcccagaactcctcttccatcttagaaggggtcctttactgggaaacatcattggtcatgaagatgaaagatcggtgctacgaaatttgtttctaaacgcatctttcgatctgtctcttcgtatggtagcaccccgttgcttgatgcaccaagaaggtggtacattcgaggaactaccagcgtatgatctctctatgcaatcagataaggctgttattcttgaccatggcacagatgtatttatttggttgggagccgaactgtcagctgacgaggtgaagagtgctgcagtcttagcagcttgcagaacgttagctgaagagctaactgaattccggttttcagctccacgtattctcgcattcaaggaaggaagttcccaagctagatattttgtttgccggcttataccagcacataaagaccctccttatgagcaggaagcaagacttccacagataagaacattgacgacagagcaaagaatgaaactaaagagtagttttatagagtttgatgaagccagtttctgcgaatgggatgaggagtttgaaagtagtgcctcctgagnccaggtagtcataccattttatccttgctcancgtttttttgccgcctttactggcagacatttttggccccgggncccttggtttanggtccctaaaananccnggc

SEQ ID NO: 131034 - DNA, 819 bp, Arabidopsis thaliana
  unsure (1)..(819): unsure at all n locations
aaaaaattgttatgcaaaaagatttgtttttttcattggtcttcttctactacacgcatttgggtcagcagagagagtgggttcctcagctcggcgattcaattctcagaagattatggctttcgctactggaatcacgacgtcttcaaatccaacttttcttggtctaaagatctccaacacaagtctacgttctgtggtttcatgtaattcgatttcgtttccttctttgtcatatgtgaatctcaacctcaatcggagaaaccgcctttctgttcgatccgcttcggttccagctgcacctgcaatggagggactgaagccggcgatatctctgtcagaaaatgcacttaagcatctgagtaagatgagatcagaacgtggggaagatttgtccttgagaattggagtccaaacaaggggggttccccgggtatgtcctacaccgatggactttgaaaacagggcaaatgcaaggcccagatgattcccccttcggattcccagggattcactatagtttgtgatcccaaagagcatgctctttcttttcggaatgcagcttgattaccagcgatgctttgattcngtggaggcttctctttctcgaaccctaacgctacacaaacctgtggatgtgggaagtcttttgctgccgagatgtgaaccagtttcacacattgcagtagataaacaatatagttatagttaatagaaaactttgtattatggttgtagaatgctcaaacagaatctgtaagttttttttaaaaaattgtatgatcaaaccataattttaataaattattcaacctggtt

SEQ ID NO: 131035 - DNA, 873 bp, Arabidopsis thaliana
  unsure (1)..(873): unsure at all n locations
ttgaaactcttgacaagagctatgattatacttacaaactgacatttgcgatatctgggggggatgttgtacaagtgggcccaggtattctcctaccacgggatcttgagcgagctgaactttctttctctgcttggaacgggataagtcaacccagtgagtttgatcttgacataaagcttccaatttcgtctctctgtaagaagcctatcctcttcttcttgaaagaggttggccaagaaggtaatgctacacttggaacgtactcaagatccttggtaaaggatgatttgaagacgaagcttctatggtttccacgctctctacctctgcacaaatgtggataaaatccaggtctcagggtttcctctgagtaaaaattggcacttggcgccgagacggttgtgttgcagggcaaccccaactactactaacgagcctctcagattaacagttgggcagtgtggtaagataattttgggttccacgattagttctcaatgaacacttatggtgaatactggatctctctaagcatgttgtttcagctctatcctgtacttgtacataggtaagatccagaaccttgactgttgtctgacctagaatgctaatatgcccaaaattgaatttgtcactcttttgtttgttccatgttccactttctttttttgtacatctgagatttcacgaactcaacatttcctgttgagaaacgagtgtaatgtgtacaacaacaaatctttaccagtgaaacctatccatctgtgtgttaagtaagaaaaaaaaaaaaaaaaaaaaagnnnnnnnnnnnnnnnnnnnnnnnnnnnnnnnnnnnnnnnnnnnnnnnnnnnnnnnnnnnnnnnnnnnnnn

SEQ ID NO: 131036 - DNA, 740 bp, Arabidopsis thaliana
  unsure (1)..(740): unsure at all n locations
aatggcctttcccggagactacgttaatgctctgtagtgctaaatttgtgaagcggtaatcacagatcatgcttctttacgaggctacaacccctcttgatgcagagcccaagaggtcagcccaagaagcattagcccaggcttgccctggtagaacatcaatagccgtggctcataggctacctacaatcaggaacgcacacgtgatcgctgtcatcgatgatggaaaagtggctgaacaaggatcgcattcgcatcttctcaagaaccatcctgatggaatctacgcgcgaatgatacagttgcaaagatttacgcatacacaagtgattggtatgacgtcaggttcaagttctagggttaaggaagatgatgcttagtacttactactttggtcatatagaagaaaaaagaaggagagtaaaaaacaacaaacaccagaagatgtttctgataaaaaactctacgaactcatcattttctctttttttctttctgttttgattttggggttacttatttttggaactacgtttcagatttgatggtatagtattattattgtgtattatcataattaatctaatttttcacctctgtaatatccatttatatgccatatcaatctatgagcctctgcctttctagtgaaaaaaaaaaaaaaaaagnnnnnnnnnnaacnnnnnnnnnnnnnnnnnnnnnnnnnnnnnnnnnnnnnnnnnnnnnnnnnnnnnnnnnnn

SEQ ID NO: 131037 - DNA, 375 bp, Arabidopsis thaliana
  unsure (1)..(375): unsure at all n locations
cgagctcacagtttcttcgttggggatcgaaatcgtgccatttgagttagcctctgtatagatcgatggctagcctgagaagagctctgctcgtagcagggaagacgaagagcagccgtagaaaactgccatttcatcaccggaatcaactacaacggtctcagcgtgaagcaactacaagagctccgtggaatcctccgtgaaaacacaaacacgaagctcctcgtcgccaagaacactttagtctacaaagccttggaaggaaccaaatgggagtctctgaagccatgtatgaaaggtatgaacgcttggctattcgttcaatctgaagatatacctgctgctttgaagactttcatcaattntcagaaagag

SEQ ID NO: 131038 - DNA, 332 bp, Arabidopsis thaliana
ggagaatattctgctttgttccactattgaccctgaagcagatgctcggaaatcggggattcctctggttcttccaactgtgaaggacaaggctgttcctgagagaccagttgaaaaagagaaacctaagagttatacgtatagtgcggatttgactaagaatcagaagaagaagatccgtaagaaagctaagaaagtggaaggttcagaggaaaatgagagagactcttctaactctgaggcaagaccaaatgggaatgcaactgtggagaggttggaagagaagtctgaaagagtaaaagatgcagagaatgttagtcaaaagagccggg

SEQ ID NO: 131039 - DNA, 608 bp, Arabidopsis thaliana
ggccgagatgagttatcttctgaagacgttaacgacgaaggaagagattgatcgggttatcagagacaccattgatgaagttcttgttttacgatttggtcgttcctccgacgccgtttgtcttcagcatgatgaaatccttgcgaaatcggtgagagatgtttcgaaatttgctaaggtagctttggttgatgttgattcagaggatgttcaagtgtatgtgaagtattttgatatcacgttgtttccttcgacgatcttcttcttcaatgcgcatcatatgaaattggattctggaactgcggatcatactaaatgggttggtgcatttcatataaaacaagactttattgatgttgttgaggctatatatcgaggagcaatgaaagggaagatgattgttcaatgtccaataccgccagagaggataccaaagtaccagctcgtgtacaaggatgtgtagacactaaagtttgttgtgcttacaatacaaaatctgtttctcatcttctgtgttggcaataatatttacatttgacattttgagatttacagttatgtttttgtacaaagttgaagaatgagaataaatatgcagatttttcgat

SEQ ID NO: 131040 - DNA, 435 bp, Arabidopsis thaliana
caatcaaacaaaaaaaaatcatcgctcccaattttacattcttcttctcgccaaaccctaattgtttcgatttctgctacattcttccggaaacttgttctatctctgacggatctcgaatcggtattctcagctgctgaaatctccggggaatgcagagaacgttttgctgcgaggtggagaacggttggaaggaatccctctctcaagggattgttatcgtaggtcctaaagcaagaactagggacaaaccttgggatattctctaatctttcatctttgattaggacagcaaagacttaagaagcagcatgactcggattttggttcaaagaggttcatcaggcagttcttccaactctagccggccttcttcctcatctaggtcttcctcgggatcagaaacacagattaacaataattttccgggtcctc

SEQ ID NO: 131041 - DNA, 617 bp, Arabidopsis thaliana
ggggccgcaaaaaatggactaggtagtaccgtgataagtcacatctaccacacggaaccgaaacgcaaacccagaaaagacatggtcctaaattcccaaacaaccccttcgtctcttacatacaccatttcccgatgatcaagaaggaaattcatgaatccgtaagccacacaataataatattaataatcattcactaatatataaattaaaagatgaaaaaaaaacgtaaaaaaaaaaattgaggttcagattttgatttgaggagaggaataatctctctgatcttcttttacaacacatcaccaaatcaaatccatgtctctccgaccaatctctcttccgatcggagcttttgaaccaccacaagtttttcaacggttgagatcgaatttttaattttttaaactttgaccattttcgcagccttgaccaccggatttcctctagcgatcgcctcacgaccagcggttttgtagtcgtagctacaatcatgacgatcggagttacggtgctctgagcagaaaagctcaccgcatcggcacctgaatccggtcaacccaactttcttccgacaaccaaaacatcgggttacgatctgttgatctctcttcttc

SEQ ID NO: 131042 - DNA, 665 bp, Arabidopsis thaliana
cttttgcatcattcttacaaaatccccaaaatcattcgaaacccctgagtattctccttaactctaagaaataaatttctgaatggatgcatcgtcttcaccgtctccttccgaggaaagcttgaagcttgagcttgatgatcttcagaaacagctgaacaaaaagctgagattcgaagcatccgtttgttctattcataatcttctccgtgatcactactcttcttcctctccttctctccgcaaacagttctatatagttggagtctcgtgtcgctacggttcttaagacaagatatacagctactggattttgggttcctggactgagtcttttcgaagaggctgagcgacttgtctctgatccttctgagaagaaacatttgaaatcttgcgttgctcaagctaaggagcagttaagcgaagtagataatcagccaacagagagctcacaaggttatctttttgagggacatcttacggttgatcgtgagccgccacagcctcagtggctagtacagcagaatctcatgtctgctttcgcttctattgttggtggggaatcctctaattggcctactgaaaacactattggggaaaccgctaacttgatgcaagaacttatcaatggtcttgacatgatcattccagattttcttgatgat

SEQ ID NO: 131043 - DNA, 493 bp, Arabidopsis thaliana
  unsure (1)..(493): unsure at all n locations
ccacgcgtccggtttttcaagtttgtcgttgcaaacccactctcagtgaggaccaaggttcgagttgtaaaggagacgacatttttagaggcttgcattgagaaccatacaaaagcaaacctctttatggaccaagttgattttgaacctgctaagcaatggagtgctgtaagattacagaatgaagactcaacagaagatcctccaaccagtggtctgagtggactgatacctaaaccgccagttataatccgatctggcgggggtatccacaactatctctacaagttaaacccatctgcagatgtttccgggcaaacaaaattccagggaagtaatatcctgggctaaatttcaaataacatggcgcacaaatttgggtgaacctggtcgcttacaaacacaacaaattctcggcgcgtcccgtaagccggtaaaggggttaatttgcgggttgtagggggttccncctgtttttcnntttantaggncc

SEQ ID NO: 131044 - DNA, 549 bp, Arabidopsis thaliana
  unsure (1)..(549): unsure at all n locations
gctttttcctcctcctcctctcgcttcttcttcttcctctcgaatctgcttttcgcagtctatttcgtcatcgtaaattcggaagctttcgtatttaattaagcaaatggcttcgtattactctggttttttgggttgtgaagagccacactttttggaatcgtgttctctttgccggaaacaccttggtcttaactccgatatcttcatgtacagaggagacaaggctttttgtagcaacgagtgtagagaagaacagattgaatctgatgaagctaaggagagaaagtggaaaaaatcttcaagatctctccggaaaaattcttctgaaactaaagaatccgccgccggaaacaccgtacggacaggaactctcgttcgtggcttagtaggagcttcagttacataatcaagcaaataggctttttttcctcccatataaaaaccctttttggtctaaaacctttanaccccccttaaaccccttttttcccccaaggncnctaaaaaggtttcccccgntccnattgaccttcnnatgggncgggg

SEQ ID NO: 131045 - DNA, 660 bp, Arabidopsis thaliana
  unsure (1)..(660): unsure at all n locations
atacgactcacctaggggaactactacgcctgcaggtaccggtccggaattcccgggttgacccacgcgtccgcccacgcgtccgtacggctgcgagaagacgacagaaggggactgatggcttcgctcaggctccccgctcaactagttacacgtggcaatctcatccaccacaactcttcatcctcctcctccgggcgtctgtcttggcgacgttctctcacaccggaaaatacaatcccgctcttcccatcttcctcatcctcatcccttaaccgggaacgatcaatagtagttccggttacatgcagtgctgcagcggttaatcttgctccggggacaccagtccgacccacgagcatcttggtggttggagccactggaactttgggaagacaaatcgtccggagagctttagatgaagggtatgatgttaggtgtttggtccgaccaagaccagctcccgccgatttcctccgtgattggggcgccaccgtagtcaatgcggatcttagtaaaccggagacaatttccggcggcttttggtcggggttcaaactttaatttaatttttccacggnccgnccttaagganccttttaagncggtaangtttgggaaggnaaagttncntngtanaatttgcaaagggaatgggga

SEQ ID NO: 131046 - DNA, 585 bp, Arabidopsis thaliana
  unsure (1)..(585): unsure at all n locations
gacccacgcgtccgcaagattcacaccatagattggacagtccagcttctcaaaaccgacactttacttgcttggatgcgagcaaattggtacggactactaggaaagaagtttaaagattctttcggacatgcaggcagttcgatcttgggaggtgtcgtgggaatgaagaaaaccgcaaaatcatggggtcccttactctctaactgaagatttcaccagcgtctatcgaatgcattctctcttacctgatcaactccatatacttgacattgatgatgtaccaggaactaataaatcactaccgttgattcaagagatttctatgagagatttgattggtcgcaagggagaagaaaccatgtctcacattggattcactaagctaatggtctcaatgggtcaccaagcaagtggtgcccttgaactgatgaattatccgatgtggttaagagacattgttccccacggccccaacggccaagctcgtccagaccacgtcgccttatcctttggggcttcagggcaggggggggngncccggtccacgggttaggggcntttgtntngtccgtnncnagtggg

SEQ ID NO: 131047 - DNA, 662 bp, Arabidopsis thaliana
  unsure (1)..(662): unsure at all n locations
ccctttaaagntnggnccccntncccngtggnattntggggggcctaaccccccgggggccctttgccggggaaggaaatccaagggttttgctaccagtggggctgctttttacattttcctcatcatggccacaaggcgattagaagcggataggtttttcaacgagtgatttcaatgaaacgatttacacgaagaaggggcttgaatgggtgaatactacagagagtctcaaggatgtgattgatcgtcattatcctgatatgacagacaaatggatgaactctgaaagtgcattttcagtatgggattcacctccacttaccaaaaatccaatccctctctatctccgaattccctcttaatttgatcattttaatgtgatctatggcacttcgaatgattttttttcttccttttttggcatttgttggctgtgagctgtgtttcgacattgtaatgtactatacagataaataaatgggtgatatacatgtgattcaataagttgtttgtaatactcttttgttataattaaaataatgtatatgcatgatataatttttataccattttaattaaaaaaaaaaaaaaaaagggcgaccgctctagaggatccaagcttacgtacgcgtgcatgcgacgtcatagtcttctatagt

SEQ ID NO: 131048 - DNA, 834 bp, Arabidopsis thaliana
  unsure (1)..(834): unsure at all n locations
cttgacattgatgatgtaccaggaactaattaatcactaccgttgattcaagagatttctatgagagatttgattggtcgcaagggagaagaaaccatgtctcacattggattcactaagctaatggtctcaatgggtcaccaagcaagtggtgcccttgaactgatgaattatccgatgtggttaagagacattgttccccacgaccccaacggccaagctcgtccagaccacgtcgacttagctgctttagagatctacagggacagggagaggagcgtcccacggtacaacgagttcaggagatctatgtttatgattccgataaccaagtgggaagatctaacggaggatgaggaagctattgaagtgttggatgacgtgtacgatggtgatgtggaggagcttgattcttcctcgtgggacttatggcagagaagaaaatcaaagggttttgctatccaagtgagactgccttttttacaattttcctcatcattgggccacaaggcaggcggtttagaagccgggtaggtttttcacgagtgatttcaatgaaacgatttacacgaagaaggggcttgaatgggtgaatactacagagagtctcaaggatgtgattgatcgtcattatcctgatatgacagacaaatggatgaactctgaaagtgcattttcagtatgggattcacctccacttaccaaaaatccaatccctctctatctccgaattccctcttaatttgatcattttaaatgtgatctatggcacttcgaatgatttttnttcttccctttttggcatttgttggctgtgagctgtgtttcgacatt

SEQ ID NO: 131049 - DNA, 447 bp, Arabidopsis thaliana
gtaatagacgagctctggcaactgatgaatggcttcgcgtagaaggaactgataatatatatgcccttggtgattgcgcaaccattaaccagcgcaaagtcatggaagatgtttctgctatttttagcaaagcagacaaagacaagtctgggacactgactctcaaagagttccaagaagcaatggatgacatttgtgttagataccctcaagtggagctctacttgaagagtaaacgtatgcgtggcattgcagatcttcttaaagaagccgaaactgatgatgtatctaagaataacattgaactgaagatcgaagagttcaaatcggctctatctcaggttgactcacaagtgaagtttcttccagctactgcacaggttgctgcgcagcaaggtgcttacctagctaaatgctttgaccgtatggaagagtgtgagaagagtc

SEQ ID NO: 131050 - DNA, 818 bp, Arabidopsis thaliana
  unsure (1)..(818): unsure at all n locations
ggcggtcaacgattcccttttgcattanggttcaggttctcgatcgaattgattttgaaatgggttcgggttggggtgctttcgaggagaacgttgggcactgatatgcccgtcatggctcagattcggagtttgatggcggaattgacgaaccccatgtctctcgcccagggagtggtgcattggcagcctcctcaaaaggccttagagaaggtcaaggagcttgtctgggatcctatcattagttcttatggccccgatgaaggtcttcccgagttgagacaggctcttctcaaaaagctgcgtgaagaaaacaagctaaccaattcacaagtgatggttactgcaggtgccaatcagagcgttgtgaaccttgttattacattatgtgatgctggtgattcggttgtcatgtttgagccatactacttcaactcctacatggcctttcagatgacaggagtcaccaacatagttggtggtcctggccagtcagacactctctatcctgacgctgactggttagagaggacactgtctgagtctaaaccgactccgaaagttgtaactgttgtgaatcctggtaacccaagtggcacctatgtccctgaaccgctgcttaagaggattgctcaaatatgcaaagatgcagggtgctggctgattgtagataacacatacgagtatttcatgtatgacgggttaaaacattgttgcgttgagggagaccacattgttaatgtcttctctttctctaaaacctatggcatgatgggttggaggcttggatatatagcttactcagagagattagatgg

SEQ ID NO: 131051 - DNA, 560 bp, Arabidopsis thaliana
ctcaaacattcctctcttcttctgccaagattttgatccccacacacactcacatcaacacatataaatctcctcgtaaaccctaaaccctagctagtttcaacaactctcttgttccaaccccaagaaaaaagttcaatttcgttagcaatggccaaagttgggaagctgacaaagcttaagtcggctatgaagaaatggccttctttcgccaagaaccaccaccactcaacctcctcagccgctgtttccgacgaactctcagaagacaacaatctccatgtggtttacgttggtcaaactcgaagaccttacatgcttagaccagacatcatctctcacccactctttcaagaactcgtggatcggtcttcttctagatccatcgaacaagatcgtgagattgttgtagcttgtgaagtcgttttgttcgagcacttgctgtggatgctcaagtctggtcaagaaggaggatcccgtgaagaattggctgagttctatacttattgacatcgaccgattgattttatacatttatttcgtataatatataccttttt

SEQ ID NO: 131052 - DNA, 458 bp, Arabidopsis thaliana
cggctcgagcggctcgagcggctcgagtaaaaacgaaacacacaaaaaaaaaaaaaaaaaagaagggacatggacgccattgattccgtcgtggatcctcttagagactttgccaaggacagcattcgcctcgttaagcgttgtcataagccagatcgcaaagaattcacgaaagttgcagtccgtacagcaatcgggttcgtagtaatgggattcgtgggattctttgtgaagctcatctttattccaatcaacaacatcatcgtcggtgctacttagataacaaagggaagataaaagatggagaagggtagttacagctttgttgttttcatgaagacacttcacagtttttttcttttttcttgttcagatactcaaaaagaggaaacattttgtgaacctagtttaaccacacatttgggatcaatctctagtaattttctttctggttaatg

SEQ ID NO: 131053 - DNA, 454 bp, Arabidopsis thaliana
  unsure (1)..(454): unsure at all n locations
agagaaagaaaagaagaagcaaaacagagagaaaatggcaggattgtttgataaacaagccgatctataccttgacgccagacgctaaggacccctctgagtggttctcgaagctcgctgatctcaccgatcaccacggtttagcctgggatgctgccaccggaaatggccaagcagctctcgccgttgcagagcattacgagagtgtcgtagcaacggacgtgagtgaatcgcagctgaagctagcaacgccacatccgaaaatcaattatcgccatacgccgacgtcaatgaccgacgacgagctagtggaattaatcggaggagaaaactcagtggatctaatcacggtcgcccaaggcgtacactggttcgatctccctaggttctactcagtggccacacgactcctncgtaaaccaggcggaatcatcgctgtctggggatacaacga

SEQ ID NO: 131054 - DNA, 596 bp, Arabidopsis thaliana
ccaacttttcgccttggttccaaagacggcgagctgttgctgaacaagaacagcgtagattatggaggctagctagaatgaagactgatatgaggcagattacgtctcagatgaatgaattggaagctgtggattccttcaatgccattgagaaacacattagtgaggaagtcaagtcgctggaatcaggaggaggtgcagattcagaaggaacgtttcagaaactgaagaaggatctacaagcggtgttcagtgtgcttccaaaggacatgcagcaacttctgcttttaaatccacaaagagcatctcttcttcaagatccatcagagctccaatgaatgctcttcttcactacggcgtccatgaggattctgatttcttttcttcccttttctgtttcattctttgaactgtaccaaagaaaaaagagaaaaattcttcatcttccctaattgtttactcgttttttcttttgaaacatgagaatcacacaacaccgaaatcactgatcactgctgtatttttaactctataaccagataaaaataacacttcttggatccaaaaaaaaaaaaaaaaaaaaaaagggcggccgc

SEQ ID NO: 131055 - DNA, 656 bp, Arabidopsis thaliana
  unsure (1)..(656): unsure at all n locations
aaaaagatgaagcaaaaaaaaaaatgagagagagaaaaagacaattcagagataatacaaaggaatggttttgtttgaagagagaaagagaaagagagaactcgacgaagaatgatggtgggaggttaaattccccaaacccccagagctcttcattttcttcatatcgacgatatgctaaatggctgctgctaccattactgatctcttctcttaagctctctttgtttggggcatggaagaagagcttgccatgcttagacagctcatcggtcagcttcaagagctcttgcacaacggctctcctcctcctccttcttcttcttcatctctgtcgtcttcttctccgtcatttttggttctccaccatcctcagtatcagaacggatggtgtttgccctgtattgaggatacttctgctgatgattgttgtgatattgtaatggctggtggaaagaggcctggnatcttcaagatgttagaacctgtcaagcctcccgtcaaacgaactcgaaaagaacggnctcaagggaaatnatgtacggaagtagatgngataagtgggnacatggntcaagaaatatggcaggaattccctcaagatctnttttgnagacggnggtttccagactaccaatgggtactttttttccagt

SEQ ID NO: 131056 - DNA, 709 bp, Arabidopsis thaliana
  unsure (1)..(709): unsure at all n locations
aaaaagggagggncgacgcggggcgagaactggtacggacatattgggtatcttgttccagtttatgccatgcgnggacatctaagagaggggacggatgtatatgcctttggtgttgtggctcttgagctagtgagtggaaggccaaactctgatgagaacttggaggatgaaaaaagatatcttcttgaatgggcatggaatctacacgagaaaggccgtgaagttgaacttattgatcatcagctgactgaattcaacatggaagaagggaaacgcatgattggcatagccctgctgtgtacacaaacatctcatgccttgagaccaccaatgtcacgagtggtggccatgctttcaggagatgttgaggtcagtgatgtcacttcaaagccaggctacctaaccgactggagatttgatgacaccacagcctcctcaatcagcggctttccattaagaaacacacaggcttctgaatccttcacgagctttgtggcgcctagatccgagatatcaccgagaaacaacgacgctaggccaatgcttggagcccagatgaatgagggaagatgacaaagaccctatatggtggctatagatatagtcatatagagattatgtttgtgtatatgaggttcactttattcttcttggattggaaaaactctagatttcactttggttaaataataataatattttagct

SEQ ID NO: 131057 - DNA, 458 bp, Arabidopsis thaliana
agaaaacgcgagagtcgacaaggaaaaggcattgcaagaagaagcttaaatctctcttctctgctcctgaagtctgttcatggcgatgtcgggaactttccattgtgacttctgactatgtccctggttacacactttcagacagccgttgcttctttaactctgctgtttcaagaagaacacttgccatattaccttgctcttcctgtctcgatcacaagaatgggcgtctgaaatctgtccccaatagaagttcttttgtgtgccgagcaagttctggcggctataggagaaatcctgatttctcaagacttaataagcatggttaccggggaaacaacaggcaaagcggagggagagaagattttgatatcgaaaactctgatatgttgtcttcaagaaatgggcctttattcaacctgtctagttcccccaaattccaagctacctcatcccct

SEQ ID NO: 131058 - DNA, 545 bp, Arabidopsis thaliana
tgatactccagctcactacgactcactattgggaaagctggcacgcctgcaggtaccggtccggaattcccgggtcgacccacgcgtcctcttatctcgacgagaaaaccctactgcgaaaaaactccgatctctctggcgagaagtaaatttttatctctgagcttggtttcaccatttctctatctctatctcctcgctgggttacggtttggtaaggtcagtgttctctaaggctgaaatttgggggtttctcagtctcgatgtggtcgtgctccgttaggattcttcacaatcattagggttatatttcttacaaactgatgctcattttctcttccctgtctatggctttatctgtgatccttcaaaagcttagtgtcttcggccctggtttgaatccttctttcccttactgcatcgccaatcactcctttgcctcccgttaattgagttgctctctttcaacttaattacattagtctgcttcctttgctgtctagtctggatagtgttgcaaatcaagtagtatcttctttagacat

SEQ ID NO: 131059 - DNA, 901 bp, Arabidopsis thaliana
ttttaggtcacactatagaagagctatgacgtcgcatgcacgcgtacgtaagctcggaattcggctcgagcttaaagcttctcctccattcttcacacgagtcaatttaattgagggttttgtttgatcgattcttgaatcagatcaatcttcaaaaactaggatggcgactgagaaaccgattactacggagactgttgctctcactgagaagaaaatggacatgtctttagatgagattatcaagatggaaaagagcaataccaatgtgaataagggcaagaaacagagagtattgaataaaaaggagaaatttagtggtgctgcgaagaatagtgcggtgaaagcacagcgttatatggactctcggtctgatgttagacagggtgcttttgctaagaagaggtctaatttccaaggaaaccagtttcctgtaacaacaaccgttgctcgtaaagccgcttctgctactccgcgtggtagaccttataatggtggaaggatgactaatcccaatcaatcaaggtttattgctccaccagctcagaatagagcttcacaaagagggtttgtcgcttagcatcagctgcagcaaagggagaagattgtgcatcatcaggcctctggaggaggaggagggctaagtgcatggccttaaacactgtattctcgggttgcaaacatgaaggaagagagattgagaatgagatcgtttgctgacaattgaagccctgtttgctacaatggagttggatctgcttaccaccctcgttgatggttctctgggtgagaagagcttcaggattccccaacttggttaatgaccttcccgaattattgttgttttctagggataggggtggcccattttttggcctaacttatcgttagttttggcttt

SEQ ID NO: 131060 - DNA, 822 bp, Arabidopsis thaliana
  unsure (1)..(822): unsure at all n locations
gagctgaagtcagtcatgggtaaaaaaaccagtcaagattctggtntgtggtgtgatgtgaatgttcagaagagtggtggagtcagcagcacaccgangtatgagaggtacggtgtgttacatgcacccagaatgtggaggaggaggtgtgttgtctgagaaatgcgatgtttatagtttggggttctgcttntggttcttgtctcaggaagacggccattgcaggtgactgcttcgccgatgtcggagtttgagagggctaacttgatttcatgggctaagcaattagcttgcaatggtaaattgttggagttagttgataaatctatacactctttggagaaagagcaagcggttctttgtattactattgcattgctttgtctgcaaagatctccggttaagagaccaacgatgaaggagattgttgagatgctttcgggtgtgtctgagccaccgcatttgccgtttgagttctcaccctcgccgcctatgggttttccgtttaagtcaaggaagaaagcacggtgaaattcgggtttggttatgacttatgagctcagtcatcaagtgtaggatttttccggtccaaagctaaaccaattgcgagttgtaggaactatttgattccgtaagattagctttttgcaaatatttatgaatatttagttgcttaacaaattagtttagacaataaagaagttccaattgacatcaagaagatgatcatgattataaaaaaaaaaaaaaaagnnnnnnnnnnnnnnnnnnnnnnnnnnnnnnnnnnnnnnnnnnnnnnnnnnnnnnnnnnnnnnnnngtgt

SEQ ID NO: 131061 - DNA, 424 bp, Arabidopsis thaliana
cgacgcagcgtccataagccaaagcattctcatggctttatacagtaactgttaacaaatatgctgcttccgatgttcaagctgtacgcagaaacgataccaaacgccattctttaactgctccacccgctgatttaggacgcagaaacattctcttctcctccacgtctgtcatcgccgctgctttgaccagcagcgaccagcttctccaaaagtatttgaagaagactgaggaaaacaaagccaagaatgataaggagagattggacagtttttacaagaggaattataaagactactttgagtttgttgaaggatctataaagggaaagacagaagcagagctcagtgaatctgaaaaacggattctggaatggctcaaagccaacaaattgatatgatgaattgatgatgatgatgatga

SEQ ID NO: 131062 - DNA, 651 bp, Arabidopsis thaliana
  unsure (1)..(651): unsure at all n locations
agagaaaaatataacaaattttaagccatgtcctcgtcactattctcttatgtngtcctcttaatcttccttttcaccatcccatacattcaaagccagcccactgctccagctccaaccactgaaaaaagtcccatcaatctcacagcgattcttgaagctggtcaccaatttaccacattaatacaactcctcaacacaactcaagtcgggtttcaggtaagtgtacaactcaatagctctgaccaagggatgactatatttgccccaacagataacgcattcaacaagcttaaacccggaaccctaaacagtctgacatatcaacaacaaatccagctcatgctctaccatatcattccaaaatactactctctaagcgatcttctcttagcaagtaatcccgttagaactcaggctacgggacaagacggaggtgtttttgggttaaatttcacagggcaagcacaaagcaaccaagtgaatgtttcccccggtgttgttgaggtcggtccantaatgcnttaggnaanagtttccttttggnattttanggggtgggacagtttttttttccgggggtttttttgggnacaanggcctttccncnggggttttttcccnaantnctaanttntggtttggngtttt

SEQ ID NO: 131063 - DNA, 467 bp, Arabidopsis thaliana
atcagacatcactcatatctttagattcacattaatgcttttcaactaaatcctcttcgtgtgattctccgatgacgtccatcagttcctccgatcacccccttccggtgagcaagaaacgattaaagccattgatattacgagatttccttctcgatgatctcagctcttgctcatccaacggcttcaaatctttccctcgtctcctcaacgctgagatccaacggtcaggaatgttccaccacaatcgccgtattacctgcggattagcgtttagtcacgccgttcataaagcttcgacggcgttactcaccgccgttaaactcttgcccttcccttcctccgttaaatctcagtctcgtgatagagataacaagaaaggacttttctcaagaagcttctggaagaaactttcccgacgtgaacttaacgtcgacgtcggagagaaggaacggagaacggatgat

SEQ ID NO: 131064 - DNA, 370 bp, Arabidopsis thaliana
aaacactagaatttcacatggttctagttcatatatcaatggaagactaatattagcaatgttcgatatgaaaaaatgaaagtcttcttgaaatttcgttatgagagcaaggtgcataggtgttaaagttcattcatggattgaggtgtagctttggtttaaacaagttcaagtgacttcatggggtagatcataacttcaccatgattcgccgccgttaagagccaagggtctgatgttttcagtagagattttttttttctcaccggcaagccatttttttggttccctttcattataacattttgtattcactccattgttaggttttcttgggttttctcgtatggaaaataagtttttctgtaaa

SEQ ID NO: 131065 - DNA, 616 bp, Arabidopsis thaliana
ggtcaaactagacacaacacttaatgcattgagcagaagaagaagaagaagaattaagaagagaaagaaaacaaaaaacatggaagttaatggagaagaagagagaagaagtagaagagaagatgaagaaaaagaagattactactactctcttctcaactctccatgttctgtttgtaacaaatttgttcaagccatattgaagtgtcttggtcttgagtcatcatcaataccaccatcttcatcatcatcatcaccatccttagtagaagaagaagattcaggaactgaaactgttgaagaaacaggatttatggcgaggataacagcagtgttaagaaggagaccaagaccaccaccttatagctcaggacgacctggtcaaaacaattgattctgattaacactcctgaagacaagcttgtgtctctccgtgtggatcttcttgttgtttaaaattcacttatgatctttatttttttttacccatctttttgggtatgtgagcggtttgcttttttttttcttaatttatctgaaataagacaaaattggtaagactcttttgtaaaatagttttcatgtttaccttcttaaaatacgtgagacttttttt

SEQ ID NO: 131066 - DNA, 592 bp, Arabidopsis thaliana
  unsure (1)..(592): unsure at all n locations
ggcttcttttagcttctaagcttcagagcagcataaaaaaaacaatggagaagcgccggagatagatctgctttcttccattctccggaccttctctagttcacgaaccaacttcttccactttattctcattcgttggagaaatggactctctcgcaaccgatccagctttcattgattcggatgtatacctcaggttaggacttattattgagggcaaacgattgaaaaagccaccgactgttctctcacgcctctcttcttctctggagagatctctgttactcaatcatgatgacaagattctgcttggatcgccagactctgttaccgtgtttgacgggagatctccccctgagatcagtattgcacactacttggatcgcattttcaagtactcttgctgcagtccctcctgcttcgtcattgcgcatatctacattgatcacttttctccataaggcccgagccctttttaaaccccttaatgtcaccgccttatcattacaactgtcaggtaggtgcgaagcttcgtgtaggattnacatganctcggaggtggggttgctggnggttaacagtnggtggtttc

SEQ ID NO: 131067 - DNA, 787 bp, Arabidopsis thaliana
  unsure (1)..(787): unsure at all n locations
ctcaatcatgatgacaagattctgcttggntcgccagactctgttaccgtgtttgacgggggatctccccctgagatcagtattgcacactacttggatcgcattttcaagtactcttgctgcagtccctcctgcttcgtcattgcgcatatctacattgatcactttctccataagacccgagcccttctcaaaccccttaatgtccaccgccttatcattacaactgtcatgttagctgctaaagtcttcgatgataggtatttcaacaatgcatactacgcaagagtgggaggtgtgtctacggggagagttatacaggatttggggttggagttgttggtttacccttgacttcaaggcttcaaggtagatcctcaagacggttttcacacaacactgtttgtcaagttaggaaaagcggaacagagacggcttccagatcgagtggcccataaaagaagcatgccgagccaacaaagagacttggcagaagaggacacccgactcactgtgctctcaaaccacagcacgctgatcggcgagggtaagataggattattttgtgttttagtagtgatgattcttctgcatgatggattgtctgtgacaattgtgtgacgtagaaattctgaaaatttctaccaactcattctttaagaagttgctataatatagtttccttgataaaaaaaaaaaaaaaaaaaaagnnnnnnnnnnnnnnnnnnnnnnnnnnnnnnnnnnnnnnnnnnnnnnnnnnnnnnnnnnnnnnnnnnnnnnnnnnnnc

SEQ ID NO: 131068 - DNA, 908 bp, Arabidopsis thaliana
  unsure (1)..(908): unsure at all n locations
aagagccaatgaaaaaatgggctgaattgcaagaaaaaagaggttcctggttaaaaaggctggtttttattttcccttatccccacacgaccattggatttttaccttaaaagggaaaggattggaaattcttcctttattgaatctctttttgttgaaggtgttttttgggttggccaggttggaaagagattggaaaccattcaaggaatttgtgttctcaaaactccaacccaagttgcaagtcatgctcaaaaatctttttcaggctaactcgatgaaccgaaatagaaggcggtttagcattctcgacatcaccactgtgaacaaccaagctcctgcggttacaggaggaggacaaccaaccgcaagtggttaaacatagaccaggtcaaccacaaccacagccacaaccgcaaccacaacaacatcatcccccaacaatggctggattagggatgtatggtggtgcgccagtgggacaaccgatcatcgcaccacctgatcatatgggttcagctgttggaacacctgtgatgcttccacctccaatgggaactcatcatcatcaccatcaccatcattttggagttgctccttatgctgtaccggcttatccggtaccgccattaccgcagcaacatccagctccgtcgacaatgcactgactgaaaacaatacagttggtattaaaactgacatatattgtactgaaaacttgtgtacattctcaaatcgaatagcgaaactgcggcaaataataatgtacagcagaggaatctgtttttccatttcaaatctatgattttcttctnnnnnnnnnnnnnnnnnnnnnnnnnnnnnnnnnnnnnnnnnnnnnnnnnnnnnnnnnnnnnnnnnnnnnnnnnnnnnnnnnnnnnnnnnnnnnn

SEQ ID NO: 131069 - DNA, 794 bp, Arabidopsis thaliana
  unsure (1)..(794): unsure at all n locations
gccacnnnnnnnnnnnnnnnnnnnnnnnnnnnnnnnnnnnnnnnnnnnnnnnnnnnnnnnnnnnnnnnnnnnnnccacgcgtccgacggctgcgagaagacgacagaagggggaccagaagaagaagaagaaaccaaatcctggcacctccgggataagtagctccaatggaggaagaagtggtggctcgagagctgagcaagagagaagaaaagggattccatggactgaagaagagcatcggtttcttcttcttctccttcatctccatcatctatccattgatattatttagacttaaaagagtgaaaaaagatttggaagattctttacctttattgaatactctgttttgtttggaaggttgtttcttttgggtttggacaagtttgggaaaggagattggagaagcatttcaaggaactttgtgatctcaagaactccaacacaagttgcaagtcatgctcaaaaatacttcatcaggcttaactcgatgaaccgagatagaaggcggtctagcattcacgacatcaccactgtgaacaatcaagctcctgcggttacaggaggaggacaacaaccgcaagtggttaaacatagaccagctcaaccacaaccacagccacaaccgcaaccacaacaacatcatcccccaacaatggctggattagggatgtttgggtggggcgccagtgggacaaccgatcatcgcaccccctgatcatattgggtccagctgttggaacacctgtgatgcttccacctccaatgggactcatcatctcaccatcacc

SEQ ID NO: 131070 - DNA, 700 bp, Arabidopsis thaliana
  unsure (1)..(700): unsure at all n locations
ccggaacggaangggccgggccgacgccatgcgcggcaaagatgtactgcgacaacaacaccatctcttatcttctttcaaattgtcagacccaagattccaagcgtccagttaaagggccaccatgatgatctaccactctcttggtcctgtttcaagaaagaaagatcttgtccttttagcggttcttcgtcttcaccaagaaaaaacccaactatggagagtctctgcaactccggaagaaatttcccaagagatcgtttcttctgattcatcttcttcttctggagcagttgtgtctagtggtggacaagatggtgttgctttgattatacaagtgcttctctttgttgcatttcttgctctcacggttctcaccattggtgttgtgtacattggagtgactgagtttcttgggaagagggagagagagaagtttgagaaagacgaggcagcaaagaagtctaagaaaggtgggaagaagaaggcaatgagagccagagctggaccaagaggttttggtcagaagattgaagatgatgacatcgacattgatcttgagtgattttgtgtgtagtagagagacaaagattgattttgtttgtaatgttgctcagtgattgtcacatctatgatatgtttcttgtgtaccaagcaacttgatggtcgatataaccaaaaattttgcaatttttcccgg

SEQ ID NO: 131071 - DNA, 458 bp, Arabidopsis thaliana
  unsure (1)..(458): unsure at all n locations
accagattgtagagatatgattgaaaatgcatttattctcattggagaaattggagggagtgattacaacttcccatggtgggatcgcaagaacatttgacggaacgtcaaagagctggttccccttgtgatcactactatttcttcggcgatctcggacttggttgatatgggagcaagaacattcctagttcctggaaattttccacttgcatgctctgtagcctatttgacgttatacgaaacaccaaacaaagaagaatacaatcctctaacaggatgtttgacatggctgaacgacttttcagtataccacaacgagcagcttcaagcagaactcaaaagacttaggaatctttacccgcatgtcaacatccatatatgggggctacgacaatactctgttgcgccttttgcnggnccatcccnnttcggggtcctgggcngncctttggccg

SEQ ID NO: 131072 - DNA, 840 bp, Arabidopsis thaliana
  unsure (1)..(840): unsure at all n locations
tccggggtcctgctaccccgaggaagactaatggttatcaacaacaaggtggatacatgccgaatggtaccttgacgcgtcctgaaggggacataatgaacacaacaatatttgttggagggcttgactctagtgtcactgatgaagacttaaagcaacctttcaatgaattcggggaaatagtgtctgtcaagattcctgttggtaaaggatgcggatttgttcagtttgttaacagaccaaatgcagaggaggctttggaaaaactcaatgggactgtaattggcaaacaaacagtccggctttcttggggacggtaatccagccaataagcagcctagagataagtatggaaaccaatgggttgatccgtactatggaggacagttttacaatgggtatggatacatggtacctcaacctgacccgagaatgtatcctgctgcaccttactatccaatgtacggtggtcatcagcaacaagttagctgaggaaactaaaagcttaatctgagcatctatctataggacaacaaaaactcactcaggttaggtgatgttaggaagaacaaggcaaaaattgttggcttcttgtctctccttgagtttagggtttatcatctagtggacatcgaatttttggtggaaaccatacagtaatttaggggacttggatttgattgattaattttatttgtttcttctgatacttttgactatggaagttattgatcaagaagaagtgagttgcccctctgaaaaaaaaaaaaaaaaaaaaagggcggccgctctagaggatccaagcttacgtacgcgtgcatgcgaaatcannnnnnnnnn

SEQ ID NO: 131073 - DNA, 930 bp, Arabidopsis thaliana
  unsure (1)..(930): unsure at all n locations
cccacgcgtccgaaagctgttgaatgggcttttttcggttgcttctggacaaatggtcagggctgcaatgcaacttcccggcgtggtgttcacgaaagcatcgcatctgagttcatagagaagcttgtaaaatggagcaagaacattaaaatttcagaccccatggaagaaggatccaggcttggtccctgtagttagcaaagggcagttcgagaagatattgaggtttatctcaacggccaagagtgaaggagcaccgatcttgcatggtggttcccgacctgagcatctggaaaagggcttcttcattgaaccaaccatcataactgatgtaaccacttcaatgcaaatatggagagaagaagttttcgggcctgttctttgcgtgaaaacatttgccagtgaggacgaggcaattgagctagcaaatgactctcattacggactaggagctgcagtgatatctaatgacacagaaagatgtgcccgtataagcgaggcctttgaagctgggattgtctggattaactgctcgcagccttgctttacccaagccccatggggtggtgtcaaacgcagtgggtttggacgagaacttggagaatggggacttgataactacttgagtgtgaagcaagtgactctctacacttcaaacgatccctggggatggtacaaatctcccaactaagtaatgaatacattgtcatggaaatggaaaccaaaccaaatgctgtctgttcaaatctttgtgcttttattatcagtctgtctagttcggtcctgaaactcttttgtaaaacctgttgaatttataatgaataaaagatgctttgctgataaaaaaaaaaaaaaaagaataaaaaaaaaaaaaaaaagggcggccgctctatannnnnnnnnnnnnnnnnnnnnnnnnnnnnnnaacga

SEQ ID NO: 131074 - DNA, 460 bp, Arabidopsis thaliana
agaaaaagtaaataaaaaagagatggttttgatcaaagagagagagatggagattccagttattgattttgcagagttggatggagagaggagaagcaagaccatgtcacttcttgatcatgcatgtgataagtggggattcttcatggttgataatcatggaattgataaagagttgatggagaaagtgaagaagatgattaactctcactatgaggagcatttgaaagagaagttttaccagtcagagatggtcaaggctttgagtgaaggcaaaacctcagatgcagattgtgaaagcagtttcttcatctcacataaaccaacttcaaatatctgtcagatcccaaacatttcagaggaactcagcaagacgatggatgaatatgtttgtcaactgcacaagtttgcagagagactcttcaagctcatgtgtgagaatcttggtcttgatcaggaa

SEQ ID NO: 131075 - DNA, 402 bp, Arabidopsis thaliana
gcacagcgatcatggttatcatctatatatttctttttctcctcctcagccattatagattcacctgggttggcaaaggcccggaagtgggatgcaattggggggaagggaggcaagcagtgggacgatggagctgaccatgacaatgtagcaaaggtttatataagaggtggtcttgaaggcatacaatacatcaaatttgattatgtcaaagagggaaaacctatagaggcatctttccatggggttttcgggtagcggtttcacacagacgtttgagattgattatcaaaacagtgaatatattgtatctgttgatggctactacgacaaatctggtaccatgcaagcacttgaaattaaaaccaaccttaagacttttgaagtgattggatattcaaa

SEQ ID NO: 131076 - DNA, 583 bp, Arabidopsis thaliana
  unsure (1)..(583): unsure at all n locations
gacggaactcgtatgtccagcgagacacaggtggctccaccagaagagatcagaagaaaacgatcatttaaccgcttgggtatacaacatggttaagaactcgggctctgtcgatttccggttcatgaccaggcattactgtggaaatgcaatcaagaagcttatgttcgggacgagaacgttctctaagaacactgcacctgacggtggacccaccgtagaagatgtagagcacatggaagcaatgtttgaagcattagggtttaccttcgctttttgcatctctgattatctgccgatgctcacttggacttgatcttaacggtcacgggaaggttatgtagagaatcaaagtgcgattcatgggacaaagtatcatgancccatcattcgacggggggnttcaagattttggggngaaggaaagngacccaaaatcgaggttttnttgaantttcaacccctttcaaggcggcaaggaancccttgttnccnccgttgaattaancccccttaggggtttattngggnccanaacctntaccccngnatgcctggggntgtacaccgnttccaaattgtc

SEQ ID NO: 131077 - DNA, 452 bp, Arabidopsis thaliana
aagaaaacgatcatttaaccgcttgggtatacaacatggttaagaactcgggctctggcggtttccggttcatgactgggcagtactgtggaaatgcaatcaagaagcttatgttcgggacgagaacgttctctaagaacactgcacctgacggtgtgacccaccgtagaagatgtagagcacatggaagcaatgtttgaagcattagggtttaccttcgctttttgcatctctgattatctgccgatgctcactggacttgatcttaacggtcacgagaagattatgagagaatcaagtgcgattatggacatgtatcatgacccaatcatcgtcgagaggatcaagatgtggagagatggatagagatcttcaaatcgaagattttcttgatattttcatctctatcaaagacgaacaaggcaacccattgcttaccgtcgatgaaatca

SEQ ID NO: 131078 - DNA, 562 bp, Arabidopsis thaliana
  unsure (1)..(562): unsure at all n locations
accccccttnntcccccgntgnccggcncatcctccgngcccatggctnnggncntctttcntgggcatcggccaccccggaggcggatcaccgacaccatcctcgaacacgctagtcaaatttgtgctgaaaaatctgtgaatgtgaaaacacaagtggttattggggatcccaagtataaaatctgcgaagctgtagagaatttgcatgctgatcttcttgtcatgggctcccgggcttatggccgcattaagagaatgtttctgggaagtgtaagcaactactgcaccaaccacgcccattgtcctgttgtgataatcaaaccaaaagaggattcttctgcataaagaggatatatatgtacatatgcaaagggatatcaagaccatctgtaatcttttgaagttttgtgaagctatagaagccaagcaagaattctaccagattacttcccaaataagtggtgtgaatgtaaattaataagagctacagaaacattgattggctcagtatatgtgttgtattcatattcgttgttttattttatacggttgagaattg

SEQ ID NO: 131079 - DNA, 587 bp, Arabidopsis thaliana
gaagaaaatcacagaaagccttagcacagagaagagagattgaagaagtcatggatgtttcaggaagcttgaattgcgttgttgtggcggtagatggaagcgaggtgagtatggaagctctgaggtgggctctagacaacctcaagctctcttcgtcttcttccgattcatcattcgtcgtgctccacgtccagccgtcgccttctgtagccgccggcgtgagtcccggcaccatacctttcggtggtcccagtggtcttgaggttcctgctttcactgctgcaatcgagcaacaccagaagcggatcaccgacaccatcctcgaacacgctagtcaaatttgtgctgaaaaatctgtgaatgtgaaaacacaagtggttattggggatcccaagtataaaatctgcgaagctgtagaggaatttgcatgctgatcttcttgtcatgggctcccgggcttattggccgcattaagagaatgtttctgggaaggtgtaagcaactactgcaccaaccacgcccattgtcctgttgtgattatcaaaccaaaagaggattcttctgcataaaaaggatttatatgtaca

SEQ ID NO: 131080 - DNA, 506 bp, Arabidopsis thaliana
cccaattccaccaccacacagacaaagcacttcgaaaatggcggtttcttctggaacattgggcactttcctctgcatcaaaacgacatctttccgcaacccatcaactcctctgtcctctctccggttcgcctctcacccggcggctaaactacgcttggttcgagcggtaacatctgcgacggaatcttcagagccaaccgcaaccaataagagagtgccacgcggtatcatgaaacctagaccagtttcaccagagatgcaagacatcgtcgaacttcctgaaatcgctcgcacacaagctcttaagcgtatttgggcttacatcaaagaacatgaccttcaggacccacaaaacaagagagaaatactgtgtgatgagaagctgaagaagatattcgaaggaagagatcgggttgggttcctagagattgcaaagcttatcggtcctcactttctctgatggattgttttcgcggaactttatttggatgattgtctatgtt

SEQ ID NO: 131081 - DNA, 450 bp, Arabidopsis thaliana
agccaagcaaggtatgtaactttttcttgccctcgtagttccattttcatcgaaacgtctgctctttgaaccctctggattctaggctactacaatcagctgaaaaaaaccctaattcagtctctctttctcgtcgtgcaaaaaccctaaaccctgggaattgtgagatcgatctcatgtttcagtaacttgttaaatctgtacctctttctgttgatttagatttagatttctgttttcaattccgtttctgttccgaaattgttcaaggtgaaaaattcaacctcaaaggaaagtgtaaaattcaagtcttaaagaagagaaaaatggtggaggtgtggtggctcactgataggagcagcagtgcctgcactaattgctggtcaagcttggaggataaagaagagacatggcgaagaagagaggatcaagagtgctcgaggaagagag

SEQ ID NO: 131082 - DNA, 579 bp, Arabidopsis thaliana
cgcgtacgtaagctcggaattcggctcgacgttgctgctaagaatctctctgaagcatctttcaaggtgactgttcttgaatcacgcgataggattggtggtcgtatccatacggattattcctttggttgtcctgttgatatgggagcttcatggttacatggagtctctgatgagaatcccttagctcccattatacgccgtttaggactgactttataccgaactagcggggatgactccatcttgtatgatcatgatctggagagttatggactttttgacatgcatgggaataaaattccgccgcagttggttactaaagttggagatgcattcaagagaattctcgaagagacggagaaaataagggatgaaactgccaatgacatgtctgttcttcaaggaatatctattcggttgggaaaaaaatcccgaacttaggccagaaggggtggcgtccgaagtttttcagtggtacttatgtaggatggaggcgtggtttgctgtagatgcgaatttaatttcactaaaatgttgggatcaggatgaatgtctttcaggtggtcatggtctaat

SEQ ID NO: 131083 - DNA, 647 bp, Arabidopsis thaliana
tgttcaatatcccgtcccggtatcgataagcttatatcgaattcgcggccgcctgatttttttttaaagcactcgcatgaattgctttcacaagatctttccatagaccctttcagtctcatgttgaatgaaatgcaagaaaacatatctcttgtctcattttcaaggcgacttgctacacagatttggtcacagatgcagagtgatttcctaccaaacttcattctttgcaataccactcagcgatttgtccgttcatcgaaagttcctcctactcagaaaccatcagggccttctgctaagcctagttcctattgtggcactcaagacttaaatgcaccgcatcaaagttttgcacgattgcctagtggatttttcgggataccacatttattttccattgttaaacttcttgggtccagatcattgccttggctactaagagctttactggaccatatttcaaataagactacctcactttgagccaatcgatctctggactgcaagacgcattgcccacgtccattgggactgcttttctttttcgatgggcggtgtttccccggtatgtaattcaaagtctttaataagcgacgtagccacacttttaaacctggcgggtccaccttcatactttacaacaa

SEQ ID NO: 131084 - DNA, 681 bp, Arabidopsis thaliana
  unsure (1)..(681): unsure at all n locations
acgaggctgggnttctgctnccccaatgtaaatcattntccccctggtagagttttcttccaggccgattggtttccagcccagttaagcaaacggaggtagattgcgaatacttgaaacggtgcgtagagaagctaacggaagagacccggagactccagaaagaggctatggagcttcgaactctcaagctgtctccacaattctacggtcagatgactccaccaactacactcatcatgtgtccttcgtgcgagcgtgtgggtggcccatcatcatcgaaccatcaccacaatcacaggcccgtttctatcaatccgtgggttgcttgtcctggtcaggtggctcatgggctgaattttgaagccttgcgtccacgatcgtaattttttattttagtggtgggaaaagggtgtttttggtatttttcgttatcgttatatagtctatctgtgtggggtcattgtaattttggatgattggccttctcatgaactagtcctatgtatgatgcaaccttaaaaagatttaaattagcaaaaattagttacaaacttgctatatttaccaaaaattatgaaactatctttttttgataaaaaaaataataaatatttatattaatattttaaaattaaataattaattattgggtggtcgcttttgaggatccaattttac

SEQ ID NO: 131085 - DNA, 1121 bp, Arabidopsis thaliana
  unsure (1)..(1121): unsure at all n locations
ataaccaatagttggtatatttcaattattccatcatttaccatttagtcgtctccttggtgaggcaaatacttcatcacgcttccttcatagcaaattcttttcgtctatctcatacatttaaacaaacatagacatacactaatcaatcttccttaatttaaaaaaaaaacatggagaaaacccaagaatcagtggttagatatggaaaaaagatcgagaaaatgccatatcttatgcccgccggccgagttgtctttgcatctgcgttcctcgtgtctgcttggagagagtattatggtttcggattagctgccgatgagttaagaccaaaacttggtttctttgagaaccaggcaaaagccatagttgctcttggtatattgatgaagtttgttggagggatcttattcatcttcaatacgtacgtattgaagatgcgcttttgcttgtataccaagccatcttgagcccgatattgtacgatttctacaatcgcgattacgatagagaccatttcaccgttttctacacaaagttcaaagaatttgtggaagagacgacgtcagctgatggtggagtggccatgagcctctatacctctgtggttaacgaagaatcgcgccagaaattcatcgatcagcttaacgagattgcgagaatagccatctcgaatcctctattcacaccaagcgatttcaacacattgttcataaggtttattaagggtgttggaatagcagctgcattggcgtgcttcattgcgatgaaacataggcatgcggtgctcatcgagaagacgtccaagaagcaaaaaactaactgatccgatttggcttatttacttgtggatctcaatcaacaagtgatctctatgtttttcaataattattagtttcttttaagatttgtgagttttgctttttgctatgaataaatagcaagtatttaattatgatgttgtactgtaatttcatatccgaacaaatttaaatttccttcggatcaaaaaaaaaaaaaaaaaaaaanaaannnnnnnnnnnnnnnnnnnnnnnnnnnnnnnnnnnnnnnnnnnnnnnnnnnnnnnnnnnnnnnnnnnnnngaattgcaacctaaccggg

SEQ ID NO: 131086 - DNA, 723 bp, Arabidopsis thaliana
  unsure (1)..(723): unsure at all n locations
ggcgaatatttatcggacgaaacagctggaaatctttcgacaatgttcgatgtaggaggtgtggttggtggaatcatggctggttacatttcagaccgaattggtgcaagagctattacggctgcgagtttcatgtactgctcaattccagctttgttcttctaccgtagctacggacatgtatcgttattagccaacgcgtctctcatgttcttgaccgggatgttggttaacggtccttacgctttgattacaacggcagtttcagctgatcttggaacacacagctcgttgaaaggaaactcgagagctttggctacggtaacggctattatcgatggaacgggatccgttggagcggcggtcggacccttactaacgggttacatatcgtcgaggggtagctggaccgcgggtttcacaatgttgatgggagctgcgtttgtggctggactattgttgacgaggctggtaatggccgaagtagcggagaagatagctgagtctaggccatcggaagaatgtagatctccggtggnctatgtccaagatcaatgttattggaaagtgttgatcancaacttttgatccgccattttttttaggaagcgttttaaggtttnntttatntttttcanaaggggagnttttcggnccaaangttaaggcctttngnaatttttaaacaagnaacctgattgnnanncnatgncaaaanttcnt

SEQ ID NO: 131087 - DNA, 417 bp, Arabidopsis thaliana
  unsure (1)..(417): unsure at all n locations
cggaanncccgggncgggccaagccgtccgttaagctccaagagctgaaggagaagatagcttgcggatcaactcaagaaatcaaagacaccatggcagttcttaaccaagaggggatgcaaattggccagtctctgtacaaccaaccccaaccaggtggtgctgattctcctcctggaggtgaagcttcctcgtcgtctgacacatcatcctcagccaaaggtggagacaacggcggtgatgtgattgacgctgacttcacagacagcaattaatacgaattggattcatacaaggattatttatggggtttgtccatgattttgtaggaatgataatgtgatttgttggcagcccatgaatggtaagagtcaaattttgtctttttaaacacatgattgaagcaatattctggag

SEQ ID NO: 131088 - DNA, 776 bp, Arabidopsis thaliana
  unsure (1)..(776): unsure at all n locations
ctaaaaaaaagggcgaatttttccatggtgttgtcggagtttcagctagctctgagcttggtggtcttgttcttctagcgtgggggatcgaaaccccatgttcttatgattttacacgacctaatccaaaactccaggtccttgattgattcttctctctctccagctccagattcttctgatttcttttgctatcatttgtttttgtaagatttgtatccgtttttgggttttgcttagctgattcttgctggatcgagagttgaataactctgcttttcttcaatctgggtttttttttttgtttcatagaggagaaaggttgtggatttctcaggtggggatttgagaattaggggtttctgattgggggttttcttattgatgttaccttcaccaaattgttgtcggagatctagatttggttcagtnatggaataatggctcgtctcttgccatctctattcgtaattagcatctncttcttcatccaaagactcctcctttcttcgttaatccatcgccagctattgaatctgaagcaaatctgagaatctaccgaactcacggacctgtatatngcttacacggtacagagcacacgggagacggggtacatattgtccagcgcaagtnaaagcaagngcctttttggctattgatgggtgaggagtagctgcacaatgacccnggtttgaatnttgggcctggcctnggntaccccacctgnccaacgggcttaaattggtnttggcattnccccttangcttttttc

SEQ ID NO: 131089 - DNA, 1382 bp, Arabidopsis thaliana
  unsure (1)..(1382): unsure at all n locations
ggaagaatgctgtgcatgaaataaagagaaaagcttcctgcgatagattncctcgtctgcngttattccccgaaggaaccacgactaatgggaaagttcttagttccttccaactcggtgctttcatccctggttaccctattcaacctggagtagtccggtatccccatgtacattttgatcaatcctggggaaatatctctttgtttgacgctcatgtttagaatgttcactcaggtttcacaatttcatggaggttgaatatcttcctgtaatctatcccagtgaaaagcaaaagcagaatgctgtgcgtctctcacagaagactagtcatgcaattgcaacatctttgaatgtcgtccaaacatcccattcttttgcggacttgatgctactcaacaaagcaactgagttaaagctggagaacccctcaaattacatggttgaaatggcaagagttgagtcgctattccatgtaagcagcttagaggcaacgcgatttttggatacatttgtttccatgattccggactcgagtggacgtgttaggctacatgactttcttcggggtcttaaactgaaaccttgccctctttctaaaaggatatttgagttcatcgatgtggagaaggtcggatcaatcactttcaaacagttcttggttgcctcgggccacgtgttgacacagccgctttttaagcaaacatgcgagctagccttttcccattgcgatgcagatggagatggctatattacaattcaagaactcggagaagctctcaaaaacacaatcccaaacttgaacaaggacgagattcgaggaatgtaccatttgctacacgacgaccaagatcaaagaatcagccaaaatggcttgttgtcctgcttaagaaaaaaccctcttctcatagccatctttgcacctgacttggccccaacataactcagagagacaaaatggctggctaagatttgtggtgcgatgattgtaaacttgtctttgtggtatattattataccttttgttttgtcttcatatttgatttcagctagtaaaaagaagggactgctatgtttttagcctatatatataccctcctccaacatggatccatccttttgagtgttggactataactgcgtgtcgttttccaccccaaaaaacgctatggtgtttgctcctctagttctgagcaaactttgctgtatttgtttttttgtcatttttggggttacattacatatgtattattccaaatctcgattgtattcagtggaaattttatttttaaattattttaccaaaaaaaaaaaaaaagggcggccgctctagaggatccaagcttacgtacgcgtgcatgcgacgtcatagctgttctaag

SEQ ID NO: 131090 - DNA, 565 bp, Arabidopsis thaliana
cagatccagactcaaaaaatggagtcaccgcactcgaatttgctccctgaagtcgattctttacccgatggattcgcgacggcgcaacagagccgcctctcaattctcccaagacccaggaagaaacaacaaaccatgaaactgttgcgatcgagaaaacagagaagccaagaacttttcggttccgttgtgtgaaactgatggttatgaagatgacgaagtagctgacctaattcaagaatcaatcaagcttgagtgagagttcgagcagaaagaaaaagaagcttctcctcctatttctcaaacattgtcagaagggtcaacctcaaaattcaaccttgtctaaggaaatggattcactcaaacccaaaaaacaacaggaggtggttgagagcaagcgtaagggttcaaagaatatgttcaaatcagagaaagagtttttggaatttatgctcaagtatcagcaagtcctttctgaaagagattctgctattactgttcgtgacaagcttgaatcactttgttgagagttacaacgtcagaacaaaatgttaatggaagaatg

SEQ ID NO: 131091 - DNA, 419 bp, Arabidopsis thaliana
ggatacaaagcagtaggcattagactggattcaggtgacttagcctatctttctactgaggtcaggaaattcttttgtgccatagagagagacctcaaagttcctgatttcgggaagatgatcgtcactgctagtaacgatctaaacgaagagacagtcgatgctctaaataaacagggtcatgaagtagatgcatttggaattggaaccaacttagtgacttgctatgcgcaagctgcgttaggttgtgttttcaaacttgtggaaataaacaatcagcctcggatcaaactttctgaagatgttactaaggtatcgattccatgtaaaaagcgtacttacagattgttcggaaaagagggttaccctcttgttgatataatgactggagagaacgaaccacctccaaaggtcggtga

SEQ ID NO: 131092 - DNA, 440 bp, Arabidopsis thaliana
ctctcacactttcttaagatttttttcttcggctcggacgcagatgactaacagttacgctctgtcaccggcgattatcggcgccgttcgtcctccggcatctcaagactatctagttgctgcttctcttagtggacgcaaatcgatcaactcttcatcttcgtccattttcgtacctatctcattatctacttcctacggtcgaagcaaatgcgccttctcaatctcgcggaagaatccaaaatcgacgattcgttgcgatattgctgtgaaatcggcggcttctgtagacgcggacgctgatctatcgtcatctacgtcgttggagacggaggaagacgagaaagcgaaggaaaagattggagctagggttagggttacccgttccgttgaaagtttaccatgtggttcgtgtacccggagttgaattgatgggaatg

SEQ ID NO: 131093 - DNA, 712 bp, Arabidopsis thaliana
ctcgacggcaactgggttttgctgtacactgctttctctgagttgattcctctactagctgcgggttcgacacctttggtgaaagttaaaagcataagtcagtcaatagacacaaacaatctcattatcgacaactccactacactctccagcccttttgcagacttctccttcagtgctactgcttcatttgaagttcgaagcccttcaaggattggggtccttctttcaaagaaggcacgcttaaccccccggtgatcaaatcaagtgtagatctcccagagagtgtgggcgtctttggccagcagattagcctttcgttgttaaagcagtcttttgaccccctacaaacatgtggcagcaaacatttcacgggcactctctggtcagccacctctcaagcttccgtttccaggaaaccgaggcagctcttggctcttgaccacttatctcgacaaggatctcaggatttctagaggagatggtggccttttcgtgcttgccagagaaggaagctctctgcttgagctctgaaatatttgataaagtatatatatagcaggcttcatgtaaaaaccgtaaccactacagtagagacatcttcagaataatgctgaatgcagattattgggcctaatcttaaattttaattatgtaaaaaaaaaaaaaaaagggcggacgctctagaggatccaagcttacgtacgcgtgc

SEQ ID NO: 131094 - DNA, 525 bp, Arabidopsis thaliana
  unsure (1)..(525): unsure at all n locations
gatgttgttcatgctatgcaatctatctnacctccggtttattcagttggaccgcttcanctcttagcaaaccgggagattgaagaaggtagtgagattggaatgatgagttcgaatttatggaaagaggagatggagtgtttggattggcttgatactaagactcaaaatagtgtcatttatatcaactttgggagcataacggttttgagtgtgaagcagcttgtggagtttccttggggtttggcgggaagtgggaaagagtttttatgggtgatccggccagatttagtagcgggagaggaggctatggttcccccggactttttaatggggactaaagaccgcagtatgctagcgagttggtgtcctcaagagaaagtactntctcatcctgctattggagggtttttgacgcattgcgggtggaacctcatattggaaagtctttcgtgtggagttccgatggtgtggtggccattttttgctgaccagcatatgaaattgtagttttgttgtgactag

SEQ ID NO: 131095 - DNA, 473 bp, Arabidopsis thaliana
tcgaccacgcgtccgatggattgtatctctcggtcgatccaggcttcgtgagtgacttcgacgacgacgacgagtcacactactcttgagcttctcatacttcacccaggtcgatttgggaaataatggatgaatctctggagcatcaaactcaaacacatgaccaagagagcgaaatagttactgaaggaagtgccgttgtgcatagtgagccatctcaagagggtaatgttcctcctaaagttgatagtgaagctgaggtcttggatgagaaagtcagtaagcagattataaaggaaggtcacggttccaaaccatccaagtactctacatgctttttgcactacagggcatggaccaaaaactcgcagcacaaatttgaggatacatggcatgagcagcaacctattgaattggtcttggaaaagagaaaaagaactagccggtttagccatccgtgttgctagcatgaa

SEQ ID NO: 131096 - DNA, 397 bp, Arabidopsis thaliana
agatattaaaaaaaaaacagagaaaaatggtgataaaaaggatagagctgtgtatagagctaatgaagataggtatggagtttgtagtggtggtggctgaagccgtccagattgttatgcggcaacacctcaaccaccgtgctccacctcctccgcctgtcctccgccagggtcttctcccttataccgcttcttacccttctccattcctatttggatttctcccttgaatacctttttcttgttatgaaattattctgcttcttttcttcttctttttttttgttctctgtgtagatatttagatcttattcttcttaattcttgtaactctgtatactgcttaatttcttcaaccagatttgcagcctctcttacaatttttaataatcaagtg

SEQ ID NO: 131097 - DNA, 531 bp, Arabidopsis thaliana
  unsure (1)..(531): unsure at all n locations
ggcgactaagcaaaggtgggttcagatgcatttcatcttgaacaggatgagaaagacacagagccggaaaatggaaaggatgagaaatttctctggccagatgctgctgttcctcaagtgtgtgctcttgagaatgcttcacatgcttctcttgcatcggattttcagaaatataaccaaaagatgaggacactggttttcaatctcaagaacactgcactgctggctagacgactgctcaatggcgagttagagcctgcaacgattttgaacatgtcacccactgagttaaaggagggtctaactgctgacgagacaacaaagaaggagcctgatgatgctgatcgaatgcagatgacttctgtaagatgctcgagatgcagtcaattgacggttggcctgagggatatcatccaagctgggcatggagatcgatatcagttggagtgtgttgactgtggctattcctggtatgcctcaagggatnaggtatcaactctgacaatagtcacagntaaancntgccccang

SEQ ID NO: 131098 - DNA, 497 bp, Arabidopsis thaliana
  unsure (1)..(497): unsure at all n locations
ccggaaattacccgggatcgaacccacgacgtccgcatncaatgnacgattccaatggcgtcgattctgggtgatttgccttcctttaatcctnacaatttcagtcaacatcgtccctccgatccttctaatccctctaagatggttcctaccacctatcggcctactcacaaccgtacacgtccgcgcaccagatcaagtgataactacagaagtgaaaaacattcttatacgcagcttctatcaacgagctgaagaaaagttaagaccaaagagaccggctacagatcatctggcagcggagcacgtgaacaagcatttccgtgctgcgtcttcttcttcatctactcagggcttataaaaaacttaaggtcaagcctataacaaatggtcatttgtattgggtacctcttatttaggggtttccaatttggggggaaaaaggtaagggcngttcctngggggaaattttnggtnaaatnnggngggaccataac

SEQ ID NO: 131099 - DNA, 454 bp, Arabidopsis thaliana
  unsure (1)..(454): unsure at all n locations
cctcacttgtctcactccgatccgatcatggctttcgctgtctcggttcagtcacatttcgcaatcagagcgttaaaacgagaccacttcaagaacccttctcctcgtactttctgctcgtgttttaaatcgaggcctgactcgtcttaccttagtttaaaggaacgtacttgcttcgtttccaaaccgggtttagtcactactagatacagacatatattccaggtcggagctgagacgggaggagagttcgccgacagtggagaagtagctgattcgcttgcttctgatgcaccagagtcattttcttggtcttctgtgatactcccgtttatcttcccggctttgggaggattaattgttgggtatgacattggggctacctncggtgctacgctctcacttcagtcacctgcgcttagcggaactacatggtttaacttctcacctgttc

SEQ ID NO: 131100 - DNA, 623 bp, Arabidopsis thaliana
  unsure (1)..(623): unsure at all n locations
atccccaactgctgctggcttaggattgccagttactggtgggaaggtgtcatggttccggaaatgtacttcaaagatgcttaagttgtccccaataaaaatgacagaaccctctgttacttggaatttggctgatcaagaacctcaatctactgagcaagctaacgtgggtgggccatcaactaccgttcaggcagcgacgacctattcctttgatgttcaaaaggccgaatctgaaactggcacaaaagaagtcgaagtcaccaatgtaaactcagacggtgatcaaagcgacatcaacagcaaggctcaagaagtcgctgcagattctttgtccaatctagatgttgatggccaatcacgcatgaaagggaaagggaaagccagaaccagaagaacacgctctgtcaaagatgttgttgatgatgctaaagctttatatggagaatctataaacctatatgaacccaatgattcaacaggaaaatgttgacgggctctacttaaagcaacgcacagggtgaaacctgggccgttctgataaagccanttttcgtagnatttgnccggaancgtgggccgtnttgggttcttttnaggaccttngtncttcttggnaggtt

SEQ ID NO: 131101 - DNA, 584 bp, Arabidopsis thaliana
agaagatgtaagtgtacaatgacaatactgaaatgaggtcactagagacacaaccaatcaaggaaacagctttggaagggtacaatgatactgctgaaataaggtcaccagagacacaaccaatagatgaaacagctttggaagtgtacaatgacactgaaatggttgcaccagagacccaaccgatcaagcgacgcatgaagaagtcgatggtgtgggaacatttcacaatcgaggcggtagaaccgaactgcagaagagctttttgcaaaggatgtaatcagagttttgcttacagcaacggtaacaaagtggctggtactagccatcttaagcgtcacatttttaaggggacatgtcctgcacttatccatacgcatgacaatgacaacaacccactgatgtctactccttacactcccaagactgacactccgagaaggcgttaccggtctcagaacaacgctagtccctatgttgcgtttaatcaggacaagtgtcgtcaagagatagctaagatgatcattatgcatgactaccctcttcacatgggtcagcatccaggttttgtctcgttcgtgcag

SEQ ID NO: 131102 - DNA, 846 bp, Arabidopsis thaliana
  unsure (1)..(846): unsure at all n locations
ctctctctctctctctcacacacacacacaaacgcacatacttgagcaaagtcatcacaatgagcttcttcatcgaagattctggtctcatagtcactcagcttctctacaaaatggctgttctcatcaccgtcttgagatggatcctcgcttggatcttacgctaccgatccagatccagatccacctcttcttccacttccgcctgtccttcgatttcctcacaggcgatcaaagaaagcctctccgtgacgacgttccgtgacgcagctgagagatctccggcgatgatcaacgacacctgcgctgtgtgtctcggagatctggaagatggagatgaggttagagaactcaggaactgtagccatatgtttcaccgtgagtgtattgaccggtggttggattatgaatgttgcggtggtgatgagaatacccgaagcgtgtgggggggataatcccccgtccgtgtcctcttggtaggacctccgctactggctgctaatccgacgtcgtgtggtgattggccgactaagaacgaacctagctgggccgttgaacggcttctctacctcttcggagatgatcttcacgtctgattaaatttttttttgtcttttcatttgattttttatttagtgggatcgattttgatcaattagaaatttaagtagtgagagtggttaatttttgtaaattgggggatttaatgtgttagattaggaaatataataataatatcatcgattaatttnnnnnnnnnnnnnnnnnnnnnnnnnnnnnnnnnnnnnnnnnnnnnnnnnnnnnnnnnnnnnnnnnnnnnnnnnnnnnnnnnnnnnnnnnnnnnnn

SEQ ID NO: 131103 - DNA, 1081 bp, Arabidopsis thaliana
  unsure (1)..(1081): unsure at all n locations
caaaccaaaccctaaaccatctttctcaacatggcgcttcttcacaagcaaaacatttcctttgtgatactcctcctcctcggtctccttgccgtctcttatgcttgtgattgtagtgaccctcctaaaccatcaccacaccctgttaaaccgccaaaacatcccgctaaaccacctaagccccctaccgttaaaccacctactcacaccccaaagcctcccactgtgaagcctccacctccatacattccatgccctcctccgccctatactccaaaacctccaaccgtgaagccaccaccacctccctacgtgaagccaccaccacctcccactgtgaagccaccaccacctccttacgtgaagccaccaccaccccctaccgtgaagccaccaccaccacccacgccgtatacttcaccaccacccacgccgtatactccttcaccacccacggtgaagccaccaccaccaccggtcgttaccccaccaccgccaacaccaaccccagaggcgccatgtccgccaccaccaccaacaccatatcctcctccgcctaaaccggaaacttgtccaatcgacgcactgaaactaggcgcatgtgtggacgtgctaggcggtttgattcacatcggactagggaaaagctacgctaaggcaaagtgttgcccacttcttgacgacttagtgggtcttgacgcggcggtttgtctctgcaccaccattagagcgaagcttctcaacattgacctcattatcccaattgctctagaggttcttgtcgactgtggtaagactcctccacctcgtggcttcaagtgtcctactccgctaaaaaggactcctctcttgggttgatctcttttgtatttcatttgatacaacaaaaaagggtttgagacgttaagatctactagattcttatttatgttttgcgaaacaataattaaaagggtctaaatttagtaattgttctaaaaatataaagcaaattttatgtattgtatgatgattatgtacgttgaaataatgttatctgaaatttgatttttaacggacaaaaaaaaaaannnnnnnnnnn

SEQ ID NO: 131104 - DNA, 800 bp, Arabidopsis thaliana
  unsure (1)..(800): unsure at all n locations
cggaattggaaggnnccgggccagacccacgcgtcccgaagagaggagagagaaatacaaagaaaaataaatggagaacggcaaatgcaacggagccacgacggtgaagttaccggagatcaaattcaccaagcttttcatcaacggccagttcattgatgctgcttcagggaagacgtttgagacgatagaccctaggaacggtgaagtgatcgcaacaatagccgaaggagacaaagaagacgttgacttggccgttaacgctgcacgttacgccttcgaccatggtccttggcctcgcatgaccggcttcgagagggcaaagcttatcaacaaattcgcagacttaatagaggaaaacattgaggaattggctaaacttgatgcggttgacggtggaaaattgtttcagttgggaaaatatgctgatattccggccacagccggtcattttcgatacaatgcgggtgcagcagataaaatccacggcgagactcttaaaatgacgcgtcaatctttgttcggatacacctcaaaggaccaattggggtggttggtaatatcatcccttgggatttcccaagcattttgtttcccacaaaggtggctccggctttggctgctggttgcaccatggtggtcaagccagctgaaccagacttcantctctnctttgttctatgcccatctttcaaaagaagcgggaattccctgaatggggtnctcaanattgnaactggntttggntcaactcctgnagctnccannggctcccaatttngacggngcaaagtaagttc

SEQ ID NO: 131105 - DNA, 624 bp, Arabidopsis thaliana
  unsure (1)..(624): unsure at all n locations
ggaacttgcgataaaaaattggtggttttagatgatttagctccttggatcaaaatccctagcagttgggtacagtactacactccgttgctagcgattcaacccccttcagggcacgatgcagcggatatagtggctaagataaacgaaggtttgagctcgggtaaagtagagaatgggaagtacttgaaggtttatctcaaagaggatttacctagcaggctgcattatgtagacagtgaccgcatcccgcctattataggactagtcgatgagggcttcaaggtggagcagaagaaaagtaaagccaaggaatgcggtggagctcacgggtatgacaatgccttcttttcgatgagaactatattcatcgggcatggtcctatgttctcaaaaggaaggaaagtgccttcttttgagaatgttcagatatacaatgtgatcagttcgattctaggacttaaggcagcaccaaacaatggatctgatgagctttcttcaagcattctcttgccacgcgtgtagaagggtanggtaagtttattcttctgtcgataaaaggcagtctagactcttgagaccttgttgtcaaaacataaacgcgtgtgacctcttagacgtttt

SEQ ID NO: 131106 - DNA, 563 bp, Arabidopsis thaliana
  unsure (1)..(563): unsure at all n locations
ggtcttttcaaaagtggaaatacaacaaaacaatgtcgggacttagattggatggcaagatcgcaattataacaggcggantagtgggattggagctgaagcggttaggttgttcacggaccatggagctaaagtggtcatcgtggacatacaagaagagcttggccaaaacctcgccgtttcgatagggctagacaaagcaagtttttaccgttgtaatgtaaccgacgagacggatgtcgagaacgccgttaaggttcaccgttgaaaaacacgggcaaagcttgtacggttctgtttaagtaacgccggggtctttggagcccttggaagcgttcttgatttggatcttgaggcgtttgatcggacgattngcggttaacgttcgcggttcggctncgnttatcaaacacgnggcacgttccattngtggctagtggtcctcgtgggtccattgtatgtccgccgngtnttcggcanaataggtgtcccgncctatagttcacgggttttaanacggnttntngggcttatcccgtcacnnntctngccttggnaaaccg

SEQ ID NO: 131107 - DNA, 730 bp, Arabidopsis thaliana
cgtactaggacagcgagggttttttagtcttattttttgctataaactcttacaacttcatttttatagttttatgttttgctataaactcgtacgacttcattttttttagttttattttttgctataaactcgtacgacttcattttttttagttttattttttgctataaactcttacaacttcattttgcattcattcatacgttgattaattatacttacttgtctaatatataccgaagattggatggcaagatcgcaattataacaggcggagctagtgggattggagctgaagcggttaggttgttcacggaccatggagctaaagtggtcatcgtggacatacaagaagagcttggccaaaacctcgccgtttcgatagggctagacaaagcaaggttttaccgttgtaatgtaaccgacgagacggatgtcgagatcgccgttaagttcaccgttgaaaaacacggaaagcttgacgttctgtttagtaacgccggggtcttggaagcgtttggaagcgttcttgatttggatcttgaggcgtttgatcgaacgatggcggttaacgttcgcggagcggttgcgtttatcaaacacgctgtacgttcgatggtgtctagtgtttcttgtggctccattttatgtactcactagtttttgcggtagatttaggttcttcctaattttatattttctctatctttatattttactctctttt

SEQ ID NO: 131108 - DNA, 373 bp, Arabidopsis thaliana
cttcttcaatgtagtttcatgtccctagaaattttcgttttcttctctgtgaatcatctatcgttttctaagaaattgagttcactcttcggcgatggagcgaaactcgtcggacgacgaagaagaccaccagcatttgattccccaaaacgacactcgaatccgtcaccgggaggattcagtttcctccaacgccaccacaatcggcgggaatcagagatcggcgtttcagatcgacgacattttacatcgagtccaacaccgtgggaagatctcgctcaacaagcgttacgtcattgtcttcgtttctctaattatctcaatcggtcttctcttcttactcactgatcctcgtgaactatttgcggcgaat

SEQ ID NO: 131109 - DNA, 481 bp, Arabidopsis thaliana
aacagaaccaaccaaccaaccaaccaacaataagaagaatccaaagacatgaaacttttcgttattgttctcatctcttttctttccctcctccaagcatcaaaaggattcgatttcgacgaaaaagaattagaaaccgaagagaacgtatggaagctctatgagaggtggagaggccaccactctgtatccagagcctcccacgaggcaataaagcggttcaacgtttttagacacaatgtccttcatgtccacaggactaacaaaaagaacaagccttacaaactcaagatcaatagattcgccgacataacgcaccacgagtttagaagctcctacgctggctctaatgttaagcatcaccgaatgcttcgtggaccgaagcgcggatctggtggtttcatgtatgagaatgtgaccagagttcccagttctgttgattggcgagagaaaggagctgtcacttgagtcaagaattaac

SEQ ID NO: 131110 - DNA, 583 bp, Arabidopsis thaliana
  unsure (1)..(583): unsure at all n locations
gcaagaaaccaactgtttgcattggtaagttttgacttgggacaacactgctcttagtttgtcttcattgccatcgcaaagagagaaaggagatgatgttaacatgcacatcacaagactagattttgacctgaccttacacactctctttctccatctctccagttatctaatcctctaaagctgctcaaaacttacatgaaacaatggaaataaactcactcttctcacaacaatgggaaacacaggctagatccactccttcgggttgatgcaagcatccaatagcttccactcttcggtcccctcttccgggttatggtcatattcccatcttgctgaaagcggaagagagacgagaatgctctctattcgtcctcctgtcttcagaccaaatggcggtncccgatcatataccaagttgaatcgncanacgnccccgtcggaatggtggcangccttgggtggncggaaatccangcttcctttcccacaaanggannaagcggacatgggttgggatcaggggaagnanggatcngncaagctagggcnaaaaaccccagccgnncaaaggggggga

SEQ ID NO: 131111 - DNA, 771 bp, Arabidopsis thaliana
  unsure (1)..(771): unsure at all n locations
agagagacactgaaacatagagagaagaaaaagaagaggtttagagagagaaaaatggcgtcaaagctctgcgattcgtgcaaatcagcgacggcggcgttatactgcgcggccagacgcagcgtttctatgcttaagctgcgattcaaaagtccacgcggcgaacaaactcgcgtcacgacacgcgcgcgtgtggatgtgtgaagtgtgcgagcaagcaccggcacacgtcacgtgcaaagcagacgcggccgcgttatgcgtcacgtgcgaccgtgatatccactcggctaatccgttagctcgccgtcacgaacgcgttcccgttactccgttttacgattccgtctctagtgacggttccgttaaacacaccgccgttaatttccttgacgactgttacttctccgatatagatggtaacggaagccgtgaagaagaggaggaagaagctgcttcgtggctgttacttcccaatccaaagactacaacgacggcgacggcggggatcgttgctgttacttcagctgaggaagttccgggagatagtccggagatgaacactggtcaacagtatttgttctcggatccggatccgtatctggatctggattatggaaatgttgatccgaaggtggaatcgttagagcagaatagctcccggtactgatgggtggtgtcccggtggagaatcggacggtaaggattccgccggtgaacgagaattgcnttgaatggntttaccggnggtcnaaggttactatggggggg

SEQ ID NO: 131112 - DNA, 1140 bp, Arabidopsis thaliana
  unsure (1)..(1140): unsure at all n locations
aggtgaactatagaagaactatgacgtcgcatgcacgcgtacgtaagctcggaattcggctcgaggagatgatggctgcgaagcttcagaaatggcgaaatctggcaggtcgtctagatctgatgaatcggagcggcgctgtgtcgacgaggcggttcctgcacgaaggtccagataccgtggaggagcttctcgaaagacatctagcgaagaaagagaaaccaataatcgatcacgatgaggctgagtttctgaatagacggcgtctgacgagcacgcgccgggaagcgttgagtttgtacagagacatattacgagcgactcggttcttcacgtggattgattccaggggaaatttatggagggacgtgttgagagagaacgcgaggaaggagtttgaagcggcgcgatttgagacagatccggaggttatcacaaggcttctgataggtggaagcgacgccgtttcgtctgctttagataagcttgcggagaagcaaagaagagatgattgagaaacaacgccgtggtgatcaacgctgatttgacggatcatagggcatgaatgtttcaacagaatgatccatcgagtttaaagtggttggtgtttgaaattcttgctgtaaaatggttgcgagaagaagaagcgagatcatttagaaacgtgcttacagaattttgggtttgatgtttgagtgttgtaattcacttgcacaacttancccacttcgtttctgaaattatcattcatgacattgtagagtttgtatacactgccacagagctataaacaaggctgttgattttaaaactggattctgtaacctcttttgtttcgtcaagaatcatcctgagagaagtatgattttggttgcttgaaagagtatgaaagatgagttcccttgtttagatgacatgtctcgtggtctgcacagtcagttgatgtgcaagtcgagagattaatttactttttataatccgcttctacgaagcaagcctactatctcagcaagatctgaaggcggtggacatgaaaactttactatttccccagtgcacggatgtgtaaagccgagaactatagcatgaaggcaaggtctatccattctggaaataagctctatgatctcttcttgatcg

SEQ ID NO: 131113 - DNA, 501 bp, Arabidopsis thaliana
gtacccttcaagttgaagaccttgaggccgttgatactactctgcgtcttgattcccgggcctctgcgatgtataatgccaaggtaatcaaaccgaaatggaatttgattgatggagctgatcctttactctccttaaggctcggtcactcttgaagctcggctgatagcagagggagttcggcaactgcttgcacgagtttatcttctgccagacaaactgaggaggcgtcctccatggatattgagctcgactttagcctccatcttggcaacgagaaaccgacggctagcaacatagaaccagctaatttgaaaatgaaagggttgcaggtcccttccccgaaatttgatcttgaattgagtctttctggtggaggatcttgtcaatctgagatcactgccgtccagcagcacgccaaccgatttcaatctcttgcggacatgctgcgtgcaaataatgaacaatctgcaacgtgtggttggaggcaagggttttgat

SEQ ID NO: 131114 - DNA, 678 bp, Arabidopsis thaliana
  unsure (1)..(678): unsure at all n locations
acgnnnnnnnnnnnnnnnnnnnnnnnnnnnnnnnnnnnnnnnnnnnnnnnnnnnnnnnnnnnnnnnnnnnnnnnnnccacgcgtccgcccacgcgtccgtacggctgcgaagacgacagaaggggcaatgggatacggtgtttacaagtacgtcgacaagtatggagctgactcagacattgcgagaagaaacgtgcatggaagacgctgtggtgtgtactcgtagtcctttaaacggcaaccgttggatatgctttcacgtttaagggaaatagcgtggcggagctgactcagacatatgatatgaaccgtataagaagatagtaagagttggtagttggtacaagactcgttgttacatagattgaaaaaaggcgtcggcacatgaaccttgcttaatctatagactatttgtaagagttttgataataggaaggacttataaattattttttgggggaatataatacaagtttgtttttgtaaataagcgatttctttgtaaacgaacatttggattttgggggtttatttgtgtgagcatggattcataaacaaaaatcattaatttcttaaaaaaaaaaaaaaaaaaaaaaacaccaaacnnnnnnnnnnnnnnnnnnnnnnnnnnnnnnnnnnnnnnnnnnnnnnnnnnnnnnnnnnnnnnnnnnnnnnnnn

SEQ ID NO: 131115 - DNA, 542 bp, Arabidopsis thaliana
ccgttggatatgcctttcacgtggtaaaggataatagacgtggcggtgggcgtgactcagcacattgctgagaagaaaccgtgcatggagagacgcctgtggtgtgtaccttcgtagtcctttaaacggcaagcgtgtttctctcttcgtttgcaacttcctcctaacaacggaacattgcatgtcattttactaccctccagcgcgagcctctagaatcgacccgagacaattagaaatgagtgattgtgtgattgtttggtgaagcatatgatatgaaccgtataagaagatagtaagagttggtagttggtacaagactcgttgttacatagattgaaaaaaggcgtcggcacatgaaccttgcttaatctatagactatttgtaagagttttgataataggaaggacttataaattattttttgggggaatataatacaagtttgtttttgtaaaaaaaaaaagaaaaccccaaagggcgaccgctctagaggatccaagcttacgtacgcgtgcgttcgacgtcatagctcttctat

SEQ ID NO: 131116 - DNA, 513 bp, Arabidopsis thaliana
  unsure (1)..(513): unsure at all n locations
cctttaacgggcaagctgtttcctcttcgtttgcacttccctcctaacaacggaacattgcatgtcattttactaccctccagcgcgagcctctagaatcgacccgagacaattagaaatgagtgattgtgtgattgtttggtgaagcatatgatatgacccgtataagaagatagtaagagttggtagttggtacaagactcgttgttacatagattgaaaaaaggcgtcggcacatgaaccttgcttaatctatagactatttgtaagagttttgataataggaaggacttataaattattttttgggggaataataatacaaagtttgtttttgtaaataagcgatttctttgtaaacgaacatttggattttgggggtttatttgtgtgagcatggattcatnnnnnnnnnnnnnnnnnnnnnnnnnnnnnnnnnnnnnnnnnnnnnnnnnnnnnnnnnnnnnnnnnnnnnnnnnnnnnnnnnnnnnnnnnnnnnnnnnnnnnnnnnnn

SEQ ID NO: 131117 - DNA, 580 bp, Arabidopsis thaliana
acgaaaaaaaattggcgtcgattgatagagactatgaagaagaagaaaatgccgtgcctcaacctctccaccaacgttaaccttgacggcgtcgatacatcttccattctctcggaagcttcctccaccgtcgcgaaaatcatcggcaagcctgagaactatgtgatgattgtcttgaaaggctcagtgcctatgtcatttggcgggaccgaggatcctgcagcttatggtgaattagtttctatcggtggccttaatgcggatgtgaacaagaagctaagcgctgctgtttccgccattcttgagactaacctatcggtgcccaagtctcgattcttcctcaaagtttatgacaccaagggatccttctttggttggaacggggcgactctttaattccgtggtaggtgattagtgtgattgtcttgaaatgtatgatctactctcatcgatcaagtaactttgaacaacttcgtattgtaaacatatctaaggtttgatggagttgcattaagaaataacatttatgctatatatgatgctacaacttactatcagggtaaacaatggttatttagtc

SEQ ID NO: 131118 - DNA, 424 bp, Arabidopsis thaliana
cggacgcgtgggtagttttttccgccacactcttccgccattatttttgttacttggagctagcgtagctaaaaaatatggggagcgataccgaagcacagaagtcgattcaaaaggagaagaagaagtacgctattactcttgctcctatcgctaaacctctcgccggcaaaaaactccagaagagaactttcaaactcattcaaaaagctgctgggaagaaatgtttgaagagaggagttaaagaagtggttaagagcataagacgaggccagaaaggattatgtgtaatagctggaaacatttcacctattgatgttattactcatcttccaatcttgtgtgaggaggctggtggtccttatgtatacgttccttcaaaaaaagatcttgcgcaagcaggggcaacgaaacgaccaacatg

SEQ ID NO: 131119 - DNA, 705 bp, Arabidopsis thaliana
  unsure (1)..(705): unsure at all n locations
cgtccgaaccacaattacaaaacattccattacacatttcacaaagcacacactttttctttcttttaaaccccaattgcaagagaaaatggcgaaagagtccaccaccatcgacgtcggcgagccaagcactgttaccaaaagttcaagccatgtcgtaaaggacgcgaagaagaagggctttgtggcagtcgcctcaagaggtggtgccaagagaggtttggctatattcgatttcctcctccgtttggcggccatagcagtcactattggggctgcctctgtcatgtacaccgccgaggaaactcttcccttctttactcagttcctccagttccaagccggttacgatgaccttcctgcgtttcagtactttgtgatagccgtagccgtagtcgctagctatctcgtcctttcacttccattctccatcgtatccattgtccgtccacatggctgtcgggccccgggctgatcctcctcaatttgcggactctcctgggtcgtgacggtcaacaacattaagaagcagcagcgggcagattcattcacctaaccttggaaaaaaggggaccaaaggaccaacttgggtccctatttggaagaagtttggggattttccaaaacggtagaccccggggtttggtnatnttttccgggtctttttttaatggctaaaaattaagaatngccaaaagngtggtt

SEQ ID NO: 131120 - DNA, 448 bp, Arabidopsis thaliana
ataagataccttggagaggagattcatttcttaaagatggaagtgaagataatctggatcttgtccaaaggattatatgatgctggagatcatataaagtttggttttccaatggctttcactgctacagttttgtcatggtcgattctcgagtacggtgatcaaatgaatgcagtgaaccaattggatcctgctaaaaactctctccggtggatcactgactatcttatcaaagctcatccttctgataatgtcctctatatccaggtaggagatcccaaagtagatcatccatgttgggagagaccagaggatatgaaagagaagagaccacttactaaaattgatgtagatactccagggacagaggttgctgcggaaactgctgcagctatggcttcagcgtctttggtgtttaaggatagtgatcctacatattcagcaacgg

SEQ ID NO: 131121 - DNA, 791 bp, Arabidopsis thaliana
  unsure (1)..(791): unsure at all n locations
ccaaatgagcaggagagatacttatgattattaccctctccaaggaaactactacccagggccatctctcgcatggtatggggggatccaatggtcagagattctccgtgcactctcgtcaatctctcggtgttgcaagcctcaaagagggttggttggagattatgctgtacagacggttggttcgtgatgacggacggtgtctagggcaaggtgtgatggataaccgcgcaatgaccgtggtatttcaccttcttgcggaatctaacatttctcaagcagaccctgcttccaacactaacccgaggaacccttcgcttctctctcacctcataggtgctcacttaaactaccccataaacacattcattgccaagaaaccgcaagacatatctgtgcgtgttccacaatacggttcctttgctcctttagccaaaccgttaccatgtgacctccacattgtaaatttcaaggttcctcgtccatccaaatactctcagcaattggaagaagacaagccaaggttcgctcttatcctcaatagacgagcttgggattcagcctattgccataaaggaaggcaagtaaactgcacaagcatggctaatgaaccagtaaacttttccggcatgttcaaagatcttgcagcttcaaaggaaaccaacttactggattctnttcaagaggttttggggtttttggtcggtgnccagnggncctggggtggtnaaagcccgggaggnggntttggttttncntggaaacggggtttaggtnacttggcnnaangc

SEQ ID NO: 131122 - DNA, 696 bp, Arabidopsis thaliana
gacccagccaaaaaaaagctgggcaaaaacccaaaaaaaaacccgtcctgtccagaacgggaattcgcaactcggcgtttatctttttggcaagcctcggtgagaagcttgttgtctgcccaagggatccatttcgggttcctcttgttccagaggaatcacgttcgttattgtcggtctagatttgatcggggaacaggtcagttagtttatataaccctttttctcagtttaaaactacattgaaccataccacctgaagagcgaacaagacccaaagatcaagtcaggaaggaacgaaccaactcactcgcaggtcttttcgttacagatagattcataaaacccattcatttaaagtttctgtcttgggaacatgattttatactccacttgggttggtttagatccttcctttttttacggatagtattagagaatggcagaaacatccgtcggagaggattccaaagacttgcctacctgtctttgttgtggtattaagccaaaccttggtttttttgttgtgcaaaaattgttgttagggtgttggttttttgcttcggatgatgtggcagaaacatattttaagctttgctctaatgcccctctccaattttttgttaaaaaaaaaaaaaaaaaaaaaggcggccgctttaaaagattccagcttacggtcggcggccatgcgaggtc

SEQ ID NO: 131123 - DNA, 464 bp, Arabidopsis thaliana
ccggggcggcccacgcgtacggtccaaagatagagaagaaatcccttttatttagaaaatgcataaccttatgaagaattagaggcttgatggacaggggcggtggatatactgctcacactaaccgagctcgaaatggtgagctttaccgctacatcgcggatacaagaggtgcttttgctcagcctgcgttctacgaggcttttggacttacggtagtggaagcgatgacttgcgggctcccgacttttgccacttgtcacggtggtccagcagagatcatcgagcacgggcttctcgggtttccacatcgatccataccatacctgagcaagcggggtacataatggctgatttctttgaacgttgtaaggaaaatccaaaccattggaagaaaatatcagacgcttgtcttcaaaggatataccaaaggtacacattgaagatatactctgagagattga

SEQ ID NO: 131124 - DNA, 439 bp, Arabidopsis thaliana
gcgtacgatgtcgccttatctgttcgtcatggctctgtagagtagcctcatgttcttattcttcttcgtccttagccattcggggaggcaaaaacagagtcttttattctttggtgattctgtgaaatggaagctacgaggaacttggtttcttcatctccttcgtttcagacaaagactcatctcaagagcagctactcttctccttcctctgtagtgatgcttcatgatcaaacaacaactcctgttgttaactcacgtcatctcaattctctatctcgacattttcctgcgtcggttctcttacaggagccacgggaagagtctaggcctctgtcacatgcgttaagagacgatagaacatcccagttgactctggagaggaggcagtttgatgaattggtttcatctcgtgaagattgggaatttgaacagcaac

SEQ ID NO: 131125 - DNA, 452 bp, Arabidopsis thaliana
caattttctctagatccactgatccattcttctcgggaaaattcgaaatccgccggtgaagggaaactcattcattgagttagctaaaacatggggaccgagatccctagatcggcggagatatcagaggcattgttaccaccggaatctgagaaaaccgtgacggcgacggaggagcatgtacctgagtggaaagagcagataacgattcgaggattaaccgtgagtgcgttgctcgggactttgttctgtatcattactcataaactaaatctgacggttggaatcatcccgtctttgaacgtcactgcgtgattactcggtttcttctttcttaattcatatactggttttttttctaatcctagtttttcatgtgttatctttaacttatctataaacaccgtttttcaaactttttattttttttttctatttcctttttctttact

SEQ ID NO: 131126 - DNA, 518 bp, Arabidopsis thaliana
tggagattggagcggagatctcttgaataacggcgaagcaacaacaaaaggagattaaaagaggagctacgggtaagatgatatccttaagaatgaaagggcttggtcattgcctagtttatgtcgtggtctttagtgtcattgcggctatagtgacagcatacgactcaccctcttcaacaccacaatacacttccccttatccacctaaaaactattctccttatctctcagaatcacccccacccccaccaccacaatatagaagacaagagcctaagtacacaccacacccagagccaaatgtctacgattccccgacacctctaccatattactttccttttcctaaactagacatcaagtctccaccaccaccatccgtctacaccttctcaccacctcaactatattactccccttctcctaaggtagagtacaaatctccgccgccaccatacgtttatagctctctgccacctctaacatattattctccttctccgaaggtaatctac

SEQ ID NO: 131127 - DNA, 736 bp, Arabidopsis thaliana
gcccacgcgtcggttaaatttctagggtttcgaaagaaaaattattgactccaatcgaatggctaagtccatggattcacgataagtttcgattctcaacttgttgtagtactagtagtttattgtatttgcatgcttcgagctttttccgagatcgatcttttggttttcgtcagaatccgaatcgattcgtctccaattcatcgattcaacttcctcaatcagttccagggtcgataaaccaggaaaggtttaatctttggcaagggttttcgaggaagaagagtactagtagtagtagaacgtattctgaattgtcaagaaggtgatcagaaagcgagctcatgtgaaggagaagggaagaccaataaggataaaggacggaagcaaggtaagaatgagttatggtggtctaaagggaagaaatggcaatggaaaccgataattcaagcgcaggagattggtgtaatgttactacaattgggtattgttatgtttgttgtgcgattgctcctacctttaatcccttttcctttttcttttccttatacacatacatcgtatattattaatctcattatattttttagtgttatatctttaattatttagtttatatatattcttgggttttatttattttataatttgtatttatatttatatttttatatttcttaaattatatttcaatttttatttttattttatttattaattctataatttttttttt

SEQ ID NO: 131128 - DNA, 442 bp, Arabidopsis thaliana
  unsure (1)..(442): unsure at all n locations
gctttggatgatggtaaagatcttggaatgctctgatggagttctcattaatggaaaganagccttacctatacaatgagcggggttgttgcttatgggatcgatttcgaaacaatcacagtccatcctggaaaaacttatagacttcgagtgtcgaatgtgggaatctcgacgagtttgaactttaggattcaaggtcacaacttagttcttgcggaatcagaaggatcatacacagttcaacaaaactatacaagcttggatattcatgttggacagtcttattctttcttggttacaatggatcaaaacgcgagctctgattactacattgtcgcgagtgctcgggttgttaacgaaaccatatggagaagagtcactggagttggaatcttgaattttaccaactcttaaatgaaaagcttaaggtcaattaccctct

SEQ ID NO: 131129 - DNA, 514 bp, Arabidopsis thaliana
ctcctaaacccatcactcttctctttttttccctctccctcgcactctactgcaggagcggtcctttccaccactgggccatttccaatttccccaatttcgtctctcacgaatttatctctccacgtcccgacgaagttccatgggagagagattcacaaaattcacttcagaaatcaaagattctgctgtttaaccaaatccaaggtccggagagcgtcgcctttgattctctcggacagtggtccgtacacaggcgttgctgatggtagaggttttgttttgggatggagagaaatggattgatttcgcttatacttcgagttatcgatcggagatttgtgatccgaagccttctgctttgagttacttgaggaatgaacatatatgtggtcgcaccttatgtcttcgtttcgataagaaaaccggagatctatatataactgatgcttatatgggacttctgaaagtcggtcctgaaagaggtttaacaacgccagttgtaactgaagct

SEQ ID NO: 131130 - DNA, 505 bp, Arabidopsis thaliana
  unsure (1)..(505): unsure at all n locations
ctcagggtactgtataccaatggagcgaggaagtttgctttgataggagtcggggcaatcggttgcagcccgaacgagctagctcaaaacagcagagacggacgcgcgggtgacgaaagaatcaactctgcgaacagaatctttaacagcaaacgcatagctatagtcgacgcttggaaccagaacacaccagatgcaaaattcacttacatcaacgcttatggcatcttccaagacattattacaaaccctgctcgctacgggtttagagtgacaaatgcacgatgttgtggagttgggaggaacaatggacagataacttgtcttccaggtcaagcaccatgtcttaaatagggaatgaggtatggctgttttgggatgcggtttcaatcccgggtgaagccttcggattattngttntttgggaggccggtctttttaagcgggggaagggtgnttcttnatggcncatccntnntggtttttttgnngcttgntncttttt

SEQ ID NO: 131131 - DNA, 676 bp, Arabidopsis thaliana
  unsure (1)..(676): unsure at all n locations
actatagangagctatgacgtcgcatgcacgcgtacgtaagctcggaattcggctcgagctttacatcgtctcttccataaaacaaacctctttcaaacagtggaaacactttttatcttttagttccccaaagtttttgaaaaggtcaaaatgtcaatggagaagccacctttggcctccggtttagctcgaacacgatcggagcagctatatgagacggttgcagcagacataaggtcacctcacggctccatggacgctaatggtgtgcctgcgacggctccagcagccgttggaggaggaggaacgttgtcgaggaaatcaagccggaggttgatggggatgtctccggggaggagtagcggcgccggaacacacataaggaagtctaggagcgctcagcttaagctcgagctagaggaagtgagtagcggcgcagctttgagccgtgcgtctagcgcatcgctcggtctttcattntccttcaccgggtttgctatgccgccggaggaaatctccgactctaaaccgttcagcgacgacaagatgatacccgaagatattgaagcgggaaagaagaagcctaagtttcaagcagaaccaacattgcccatctttctcaagttcagggatgttacataccaaagtggtgatcaagaaattgacttcatctgt

SEQ ID NO: 131132 - DNA, 465 bp, Arabidopsis thaliana
gcgaccaaaacctagatccggcggtctcatgtctccacagctttgtggccgcctccgagaagcggccaccaccgacgaaggagtccggttttcgtctgtagagactcaactccaacgcaccaacccaccacaagactcccggaaagctagccgctccgacgtagcggttccacggaaccggatcccgacctagcaacccgaaacactcagcgataacacttctctcccatcaccggaaaatagcaaagacccagagccaaacacacgtcgatccggaccggtggagaccaaaaacggcagacctaaagactggtggctcagtcagactctctagatccaaaacccgctgcagccatctaagatccaaacagatctactgttaaccaccgcatcagacaacgaacccccccttacccctctccaacttccgccgtggacgcagcgactagaatcacgggtgagcct

SEQ ID NO: 131133 - DNA, 833 bp, Arabidopsis thaliana
cgtacggtcagtttccgaggttaaacctaaaaacctcggggttcgacctggggaagctctagccggaagctttgcctttgtgcttcatcgtatgccagacgaaagcgtgagcaccgagaatcaccgcgaccggttattgagaatggtgaagagcttatctcccaaggtggtgactcttgtggaacaagagtcaaacacaaacacagccgctttcttcccgaggttcatggagacaatgaactactatgccccgatgtttgagtcaattgatgtgactcttccaagagatcacaaacagaggattgttgtggggcaacattgtcttgctagagatctcgtgtacatcatcgcatgtgaaggagctgatcgggtggagcgacacgagctcctaggaaaatggaggtcacggtttgggatggcgggtttcactccttacccgttgagtcccttggtgaattcaaccattaaaagtctgcttaggaactactcagacaagtacaggctagaagaaagagatggagctttgtatcttggttggatgcatcgagatttgggtgcctcgtgtgcttggaaatgagacagtgacatttctttagtgtgatggccattaatgtgtttccacctgtaagccaattagtcggtcatttgaattttccaaacctttgaagaattttatgtttactactaaagacccagagtgggcccaatggtccaatgtcaaagtccacttcttcctccatccaaattttaggaagtaggtccccccaaaaaaaaaaaaaaagggcggccgctttaaaagaatccagcctaaggaagggggccatgcacgttca

SEQ ID NO: 131134 - DNA, 737 bp, Arabidopsis thaliana
  unsure (1)..(737): unsure at all n locations
actcaaacttctggcagagagctatactagcagggatcaggtttcgattattcctttccgaggggatgctgcggaagtgctcttgcccccttctagatcaatagcaatggcaaggaatcgtctggagagacttccttgtggggggggggctcctcttgcccatggtttaacaacgcgctgtaagagtaggacttaacgcagagaagagtggtgatgtcgggcgcataatgattgttgcgataaccgatggtcgagccaacattacactgaaaagatcaactgatccggagtctattgccccagatgctcctagacccacgtccaaagaattgaaggatgagattctggaagttgctgggaagatatacaaggcagggatgtctcttctagtgattgataccgagaacaaggttgtttcaactggttttgcaaaggagatcgcaagagttgctcaaggaaaatattattacttgccaaatgcttcggatgctgtaatctcggccaccactagggatgcactatctgatctgaagaattcttgacctcattttgtctgcaataccttgattctggatcaaagtgtatattctaattgtgcaacacatcagtcactaaacatgaaattataagaaatgaaattttgtttaaaaaaaaaaaaaaagnnnnnnnnnnnnnnnnnnnnnnnnnnnnnnnnnnnnnnnnnnnnnnnnnnnnnnnnnnnnnnnnnnnnnnnnnna

SEQ ID NO: 131135 - DNA, 531 bp, Arabidopsis thaliana
tacggctgcgagaagacgacagacgggtacggctgccagaagacgacagaagggtacggctgccagaaacgacagaagggtacggatgcgagaagacgacagaaggggcacaagattcagctacaaggttctttgacttacctgccgatgagaagatgcatctggtttctgataattttcaggagccagtaaggtatggtaccagcataaaccattcaacagacagagttcattactggagagatttcataaaacattactcccatcctctctcaaactggatcaatttgtggccttccaatcctccctgctacaaggaaaaggtggggaaatacgcagaagcaacgcattttttacataatcaactaatttaagctatctcagatagtctattactgtataaaaattacttacattaagtaattgattattgctcacaagtcatttctatttacttctatccatcttttttctaacccaatatttgccttggaattcctccactctctaactatttttttcttacatttt

SEQ ID NO: 131136 - DNA, 436 bp, Arabidopsis thaliana
gcgtccggctgcgaacactctcaacgtttccttcttttcctcgtcgccacacaacgaccagacgtgaacccaatctcaccgtcattggccgtaatccgacgacatcaatcgtctgtaaatcaatagctaattcagaaccaccagtttcactctcggaacgagatggatttgcggcggctgctccaacccctggagaaaggttcctggagaaccaacgagctcatgaagctcagaaagtagtgaagaaagagatcaaaaaggagaagaagaaaaagaaagaggagattattgcacggaaagttgttgatacctcagtctcatgttgttacggctgcggagctccgcttacaaacttccgacgttcgattctccgggatttgtcgatttggttacttatgaattgaaaaagaagcatcaccagttaagaactatgata

SEQ ID NO: 131137 - DNA, 405 bp, Arabidopsis thaliana
cgtccgaaacaatggttgaatcggagaaaacgaatctctcttgtctccgtctcgaaatctccggcgccgatccaattttcgtcagaggcacttggcataattctcgtttcgatatctccgtcaccgatggttcctcctcttggatttgcaatgcgacggaggaggaagtggcggagagagcagcacaatgggaccagcctgtgtcagagtatttaaagctcgccgagcaatacttatggtttcaacaacctaattcggtctatagtttctccgatgctctagagggatctaaacggctctcttggacgtttgaaaaagaatggactaaacttgagtggaggtggtaaagtaaaccatcagatgataaccagaagatcacctgtgggatcttggattttcttatgg

SEQ ID NO: 131138 - DNA, 662 bp, Arabidopsis thaliana
  unsure (1)..(662): unsure at all n locations
nnnnnnnnnnnnnnnnnnnnnnnnnnnnnnnnnnnnnnnnnnnnnggcgaaaatggaggaacgcggccgcggaaccggtgccggcgaaagcagtttgttggatggatcaggtcactggtggtgggcattgggaagtggagcccaaatcatgtggggaatacgattgattcggagaggttacgccggcgacgttcgattaatgccgctcaaagccttcggtgtcgcatcactcttcgtcgggtcgttagccaccagctccgtcgcattagtccgcgccacggggatccacacggttcaagatgcgattgatcttggagccaacattagaaccaatttgggggttactcctcaaataccggataagcaaatcaccgagagagacgggtgatttatcatgaacagatcgagcttgaagctctatcggaattactgtgagacgatcatggaattagggtctcctggtaagaatgacttccataattatgtatgttttatataagataagaccataatttataaggtttttgggttcataaaaatcagatgttatgtgaaaaattaaaaggttagcggccgannnnnnnnnnnnnnnnnnnnnnnnnnnnnnnnnnnnnnnnnnnnnnnnnnnnnnnnnnnnnnnnnnnnnnnnnnnnnnnnnnnnn

SEQ ID NO: 131139 - DNA, 424 bp, Arabidopsis thaliana
  unsure (1)..(424): unsure at all n locations
ccacgcgtccgaaacgaccaaaccaagaagaagaagatggtgaaactggagaactcgaggaaacccgaaaaaatttcgaacaagaacatccccatgtccgatttcgtggtcaatctggatcatggtgatccaacggcgtacgaagaatactggaggaagatgggtgacaggtgtacggtgacgatacgtggttgtgatctcatgagttacttcagcgacatgacgaacttgtgttggttccttgagccagagcttgaagatgcgatcaaggacttgcacggtgttgttggtaacgctgcgacggaggatcggtacatagtggttgggaccggttcgacgcagctttgtcaagccgtcgtccacgcactctcttcactagccaggagtcaacctgtcagcgtcgtcgccgccgctcctttntact

SEQ ID NO: 131140 - DNA, 587 bp, Arabidopsis thaliana
atctgcttcacatctgtagatggtgagaaagctccatcaggagagagctttgaggaatggctggaacctcttaacaaaagcaacaatatttacgcagttggtattaactgcgcacctcctcaattcatcgaaaatctgattcgcaaattcgccaagctgacgaagaaagcaatcgttgtttacccgaataccggagaggtttgggatggaaaagctaaccaatggctgcccatcacattgcttgggtgatgatggattggagatgtttgcaaccgaatggcgtgacccttggagctaaactcatcggaggatgttgccaggactacaccttccaccattaacgctatctcccagagatttgaaacgaagatgatttttcttcagggagaaaagactgaagattctttttcaactttttaactagcttgaccattgttagggctatctatctgttttctgttgttttcttgttgttcacgttttctttgtggtttgatgatatgtattcgtaaactaggccttgggcgttttcaatgtaatggcccataaaatattttctttatcaaaattacccgatttgaatcttt

SEQ ID NO: 131141 - DNA, 558 bp, Arabidopsis thaliana
gcaggagttggttcatctagctcaaagcctcgaagcagttacgaaccaaagaaacccgaggtcgatcccgagaaacagagactcgctgcatccttgtttggtggatcatcatcaagaactgacaaaaggtcttcttctggtggtcacaagccggcgaaaggaactgctaacaaaaccgcaaccgtacccaaggaaaatcaaacccctgttcaaccgccaccggacttgctcgacttcggtgagccaactgccacaaccgctacagcaatggatccttttaaagaattggaaggtcttatggattcttcgagccaagacggtggttcatccgatgtgatgggactatactcagatgcagcacctgtgacaacaaccacaagtgttgactctctcttatccgaactgtctgatagctccaaaggaaactcacgcacgtaccaacctcaaacctccaaaggaccaaacacaaaggaagctcttgagaaagacgctcttgttagacaaatgggtgtgaatccaacaagtcagaaccctacactgttcaaagatctcctcggg

SEQ ID NO: 131142 - DNA, 441 bp, Arabidopsis thaliana
caaaagtacagtttctttattcccttttttgttcactttaaacatcatcactcttgaaacacttcaaatctccggtcaacaaaaaccatgacttcaatttcttaaacaaaaagtttcaatctttttccaaacaaaacccatttcagattttgttctttgagaaaccaacatgagaaagacttctgtttcatctaatagctttggtgggtttttaagtcccggagctccgagttacgctgacaacaaaggttggagctccgagagagttcctcatccttcctccactacttcctcctctgcaattaacggtggtcgtcgtcacatcggctcttcttccgctttaacgacgccgttttacagcggcagagcaattccttcgaaatgggaagatgctgagcggtggatttgtagccctgtgtcgacttacccacaaggtgtttg

SEQ ID NO: 131143 - DNA, 418 bp, Arabidopsis thaliana
gcggttcaattataccagagagtactttctctccaaaaagaatcacatctgatgctgatagggagtttcaacagcgtagatatcaaacagagcggagctacagcggatcattataccgcaccaagagagattccgtggacgagacgtcagaagtcccgcatgtggagcacaagggacggtttaaggtcacatcagcagatctgagtcccaagggatctacaaactctacattcacaccatttagtggtggtacaagcagccctagttgcctcaatgctacaaccgcctcaatcctcccatcaattcagtcgattttgcagcaaaatgctatgcaacgggaagagattttgagactaatcaaatacttggagcaaacctctgccaagcaacctggatcgcctgagacgaacgtcgatgt

SEQ ID NO: 131144 - DNA, 845 bp, Arabidopsis thaliana
gccatggcgaccacttcatcgacaaaacaagtcattgtcttcacaatttcccttctcttggttgctttccaagcagtccatgcagactattaccgtcagaggccaccggttacccctaccccttacgttcctaagccacggtacccacttccgagcccgagccccaagcctgtttatcgaccacctactacccctagtctacccgctggctcaatcgctagactattccttgatccacataacgctcttcggtccggactaggtttgcctccattgatttgggacggtaaactagcgagctacgcaacatggtgggctaaccagaggcgttacgactgctccttaacccattccaccggcccatacggtgagaacttgttctggggaagcggctcgagctgggcaccagggtttcgcggtgcagtcatggatcgttgaaggaaggtcatacaaccacaacaccaactcgtgtgacggaagtggaatgtgtggtcactacactcagatggtgtggcgggacaccaaaaggctcggatgcgcacgtgtggtgtgtgagaacggtgccggagttttcatcacttgtaactaccgcccaccgggtaactacgttggcgagaagccatactaaaaaaacaaaacacattaaacggggtttttgtttggtatttgatttcatttaatatcttttgtatctgttttcgttatatcttcgtgaaattaaaatttccgacaaatctaatttgtatgtatcattgtatgttgttgtttccaatgttctctcggtcatgtcctcaaaattttgttgagtggcctacttatttaaacatcgtaaaacaaacagtcag

SEQ ID NO: 131145 - DNA, 438 bp, Arabidopsis thaliana
tacggctgcgagaagacgacagaaggggagagaaagaaagaaaacagagcaattacttgaagaatccataggaagctgaagatgagaagaattcctcgtatcaaatttcctcagagacattctatctcatctggttctggaccggcgccgggatctgtttccggcgttaagaaaaatgtgacggcgagttctgatgttccggcagctccgaagaacactgctgatggagggaaagcatctctccagccgaaacgtacacctgtctccgacaaagaaatcgaatctattatgttgggtggttgcatatgacatttggggagttacgaagatttgatcgaacacattggtgttcttgtcttgttcggctggtgatgtttattttgctgtttttaaatgtaaagaagtaactaataatgtagagaatatgattttataaga

SEQ ID NO: 131146 - DNA, 405 bp, Arabidopsis thaliana
  unsure (1)..(405): unsure at all n locations
gcggaatcggttgtgagagagagagacggtgatcgggaaatgtcgacgaaaggcgcggcggcggcgtaccctagcgcggctcggatatctgattctccatgttatcttcagtactctgcttctctcaaatgtcttgaagaatttggatcagacaagagtaaatgccaggttcattttgatgtgtacaaggaatgcaagaagaaagagagggaagctcgactggaacgcaataagacacggtcgttgttctcgtgaatgcagatcctcgaataccaatgatgtctcagaacatcacctagctagtagtatcctgttgtttcatttgcaatggctgtgtttgtatgatctatctaagtaaacaagtgggaagtgtttgttaatgttactttttaccccccttggngg

SEQ ID NO: 131147 - DNA, 693 bp, Arabidopsis thaliana
gctaacaaagtactttggaatttcgggtggtagcttaccggctataacagcggttgttgttattttagcaactgtctttccgtcccagtttggtcgtcttgctccatctggagaagccatggctctaattttaatgcaggtgttcttcacagtggtgggtgcaagcggaaacatatggagtgtgatcaacacggcgccgagcatattcttgtttgcattggttcaaattgggacacatctggctgtgatattgggcataggaaagctgctaaacatcgagctaaggttactgcttctagcatcaaatgctaatgtcggaggacccacgaccgcagctggaatggcgacggcaaagggatggaactcgttgatagttcccgggattctggccggaatatttgggatcgccattgcaactttcataggaattgcatttggagttaaagttcttaagttcatgtgaagatggtagtataactaaactatggacctgactctgctcagtgctcactctctctctctctctctatatatatatatatatatatatatatatatagtgagtgatattgtaaaccccacaaaatttcaagtgggcttaatttgccaaagggttccttactgtgttttattttgaggctttgtaccttcgaatggaatttgttcataccacggagctcattactattcttt

SEQ ID NO: 131148 - DNA, 533 bp, Arabidopsis thaliana
  unsure (1)..(533): unsure at all n locations
tcacgtcncccccgaccttgtccacgtgcaggttncagggccncggaccctggngcnccgtcgatctcctaggaccgtggntngaggccacncggggaaattngggccctgttngggaaccccacagcggnncatctcccaggaatgctgcggacaaactcgcacagctatgccaagctctggacaacaatgacttcagcacagcccttcaaatacaggtacttctgactaccagcgaatgggacgaatgcaacttctggctggcaacactaaagcggatgatggtcaaggccaggcaaaatgtgcggtgattatttattttctgggttcatggattttttttattataaatctaaaggagggacgtgtgtatcaaactccttttgctttcttaattttggtctttttaaaacgccggtgctgctctaatcttcttttttttttttttttgtcatttatgaacctcatctgctacttccagtcactcttttgtttagatagtatagagatcatcagattgctgaaacattctc

SEQ ID NO: 131149 - DNA, 581 bp, Arabidopsis thaliana
  unsure (1)..(581): unsure at all n locations
cgctcttctcttctcttctcttctcttctcttctcttctctcctcttcaacctcaatcacttaacaaaaccctcagtagaaaacttccactaagtttttagtcatcgttggttttcacaataaagcagctcacatgcaaacattctcgtttaagaggagacccaaccattcacatttcccatcaactctcttcttcttctttctctctttaactctgttcatctctggtgtgagttctcgtgtactaagtcctgtccctctagataactcgagcttgatctctgatggtgtccatggcgcctcggattacaagtatctcactctcgaccctccaaagaacgtttccaaagcagcttgcatacatgtctacgggttccttccatgtggcagacaatattggaggttatggcttccaaagttttttcctttggctgtctcttgatcattggtgacaanttcttgtccaagnagatcaaactctttggaatctngagggcggggttatgggggganggntccttacctnacaatgntccaagaatggccnaagnaanggctgggnagagggncngaggggggtc

SEQ ID NO: 131150 - DNA, 883 bp, Arabidopsis thaliana
  unsure (1)..(883): unsure at all n locations
atacaaaccccgagaaggagattctgagcataaggagaagccaatgcagcaaatagagtcacttgaaggcgatgatggtgctgataagagcacgcacagagagaaagagaaggaagccccaccagagaatatgttagcgaagactgaagcatcaatggcgaagagtagtaataagctgtcagagcccgtggaagagatgaggcatcatcagccagggagcagaatgccaggggacacagtactgaagatactgatgcagaagttaaggtcattggacttgaacctatcgattctagagagatacttagaggaactgaacctgagatacgggaacatattcaaggagatggaccgcgaagccggtgtgagagaaaaggcgattgtggctttgagacttgacttggaaggtatgaaggaaaggcaagaggggatggtgagtgaagcagaggagatgaaagagtggcgaaagagagtggaggcagagatggagaaagcagagaaagagaaggaaaacataagacagagtcttgagcaagtaagtaaaagacttgagtggatggagaagaaatgcttaacggttttcaccgtatgtctagggtttggcattattgcggttattgcagttgtgattggtatgggaactggtctagcagagaagaccggtagtggggcttggctcttgttattgattagctcaacattcattatgttcgttttgtctctttgatgagagttttggtcttatttttacactgtagagtcatgttaccaatggatgaaatataccttgtttttcaaaaaaaaaaaaaaaaaaaagnnnnnnnnnnnnnnnnnnnnnnnnnnnnnnnnnnnnnnnnnnnnnnnnnnnnnnnnnnnnnnnnnn

SEQ ID NO: 131151 - DNA, 783 bp, Arabidopsis thaliana
  unsure (1)..(783): unsure at all n locations
tcttnnnnnnnnnnnnnnnnnnnnnnnnnnnnnnnnnnnnnnnnnnnnnnnnnnnnnnnnnnnnnnnnnnnnnnnnnccacgcgtccgacggctgcgagaagacgacagaaggggactccgacgtacctcctcttccccgttaccttctcagagtttttagtagtcttcctttggaacaatgagtgacgtgtttgatggatatgagcgacaatactgtgagctctcggcgagtctttcaaagaagtgttcctctgctatttcgcttgatggagaacaaaagaagcagaagttgtctgaaataaaatccgggctggaaaatgcagaagtattgattaggaaaatggatctcgaggcaaggacccttccacctaatcttaagtccagcctccttgtcaaattaagagaattcaagtctgatctgaacaatttcaaaactgaagtgaagagaatcacatctggacagttgaacgctgctgctcgtgatgagttgctagaagctggtatggctgacacaaagacgggcttcaagctgatccagagagcaagattgatgatgtcaactgagccgtctttgggcccgaacccctgtcaagagtcaagggacagtcgtagaaccaatgacttggggcctgaaggaatccggtggttttaatccctccaagnctttcaacnggttagnggcaatnttttttttaggggccncggaancgtttnattgggggtagccggtaacattggnaaggcaagnaggtnttttcaaacattncgggggggttaccttc

SEQ ID NO: 131152 - DNA, 377 bp, Arabidopsis thaliana
tcactactgaagcacggactagtagtctctccaatgtctcgtcattctgagccatacgggggaggacgagatgatcctaatgggaataattttgatacggcttcgactaaatcgcttcccaataatccctctgtggcggcttccaatctcatattagacctattgtcattggatgacgtaagtaacacggcagaagcagaagatgttgaagacaagaagaagcaagaccattcaaaggcagagactttcgatccttgcgaggcgtcgctgttgagagatgatccgaagaagaagatagaaacgattgaggaggaaccttcaaccgctgaggaccatcagagagattcagggaattgggtgcttgcgttagaagaaac

SEQ ID NO: 131153 - DNA, 585 bp, Arabidopsis thaliana
  unsure (1)..(585): unsure at all n locations
cccaagcgtccggccaagcctccggggaaaagaacacaaaaagggaacaaaatcagcggagcaaaagttacttccgaaaccctaaaaaaaacacgatgatgctcaagcaagctgcgaagaaggccctagggcttacgtcacgtcaatcaacaccgtggtctgttggtatcctccgaacctaccatgagaacgtcatcgaccactacgataatccccgcaacgttgggtctttcgataagaatgatcccaacgttggtacgggactcgtaggagctcccgcttgtggtgatgtgatgaagcttcaaatcaaggtcgatgagaagactggtcaaatcgttgatgctcgctttaagacttttggttgtggttcagccatcgcttcttcatctgttgccactgaatgggtgaaaggcaaagctatggaggatgttctgaccatcaaaaacaccgaaatcgcaaagcatctttctctcccaccaggcaagctccactgcagtatgttggcgggggccgttaaaaggacatgtgaaanctcaagggaaccggtaaanaaatggtgtcacacaggggaccncaggttntctt

SEQ ID NO: 131154 - DNA, 538 bp, Arabidopsis thaliana
  unsure (1)..(538): unsure at all n locations
cnattttaaaggcttagctttgttcctctgtcgccttggagaatctccagaagcgtatcatgtggccttcgtctcgaaactcttcgcagcctcaagctatgagacaagaaaagaagtcgatatctgtgagttttagagcagagaatctcataccaggggttgtgataggattcatcataggtatgatattggatttatcacagcaagtgacctccccagtgaaaaggagcagacttttatccagcaaggtccagaagcagagttctgtaccaggcaatggcaaggaccaagagcttaaaatggtactggtagttaggcaagacttgaagatgagaacgggcaaaattgcgtcacagtgtgcacattgctgccaccggcatgtatgcagagttgatgcagagtgaccgataccttctgcggcgatgggaggaaattggcagccaaagatagtcggcacttcaaaacccgcangaatgattaggtccagggctcttangngtggcnccgctttttttgntntctgaggctaggtcgntgc

SEQ ID NO: 131155 - DNA, 604 bp, Arabidopsis thaliana
tggccgttctgcagtaccggtccggaatttccgggtcgacccacgcgtccgaatttgatgttgacacacgattggttgaggggcttgttcttgatcatggtgcgagacaccctgacatgaagcgacgtgcggagaattgtcacatcctgacttgcaatgtgtcattggagtacgagaagagtgaaattaatgcgggattcttctactcgaatgcggagcagagggaagccatggttactgctgagcgacgttccgttgatgaaagagttcagaaaattattgagctgaagaacaaggtttgtgctggtaatgataacagctttgttatcctaaatcaaaagggtattgatcccccgtcattggatcttcttgctagagaagggataatcgcccttagaagggcaaagaggaggaacatggaacgtttggttttggcatgtggtggagaagctgtgaactctgtcgatgacttgacccctgattgtcttggctgggctggacttggtcttgagcacgctcttggagaggggaagtacacatttgtgtgacgaagcgaagtaattctcattgatgtgctatcctcataagatggcctaatgaccac

SEQ ID NO: 131156 - DNA, 650 bp, Arabidopsis thaliana
gtgacaatagaatcaaacgatcatcgagattttgttagattgcagaatctttcagaagctgacattagatctctggtttctagtgcgctagtcactagaaataatacatctaatgcttctgaatctaacttgggaccagtttcaggtctaagcgctggagttaacaaacaggaagacgcatctcagaaccaagagatcaccttggagaagacaacaagctggggcacagcataggagcaacacgtccctctaaagaaccttctgagtgaagcaagatcaccaaggctgcaacaacaagcaaaggatcacgagagtaacaacataccgagagtgagttcgatactgggacaggagacatcccctgaagatggtcactggccagagaaaagagaagtgagcgaggaatggaattcaccagcaaagtatccagtggacttaaagagagaggagaagaaagtgaaaggaagacccttttgggtgccatttgtttgctgctccaatgttaaatagaccaccactctattgtataatgtgtaggagatgatgaatggtttctgaagacttgctagtacaaagacgtgttagtagtttggttcttgtaggcgctactgttgcttaggctttgaatacttttatgcagaccacttttg

SEQ ID NO: 131157 - DNA, 461 bp, Arabidopsis thaliana
tgaagattatggacaaacattctgcatattttcatgaagatgttcggcttcaagcagttactggtttgaaacatatattggctgcagctcatgctatcttccagactcataatgatggaactggaaaggcaaatgaaattcttgatacagttatgaataattatatcaaaactatgactgatgatgacgacaaggaggttgttgctcaggcttgcatcagtgttgccgatatcatgaaggattatggttacccagccattcaaaagtatttatcaccccttgttgatgcgacattgctactgctgacggaaaaagcagcttgccagcagttagaagatgagagtgatattgatgatgatgatactggacatgatgaggtcctcatggtatgcagtttctgaccttccttcccgcctttgcatagtgtatggggtctcaatttgaacctgtctttgcccaat

SEQ ID NO: 131158 - DNA, 808 bp, Arabidopsis thaliana
  unsure (1)..(808): unsure at all n locations
tcccggtttcttccattcttccgggccccgggcaaagggaaaaagccaagaaagattctaaagggctatttgttcccggtcgtcccctaaagaagttaaggcaagagaaaaaaagaaggttcagttattcgagatgctgttctggcaaaagttgagacataaaagaggatgtcacttttcaaagcttgggaagaggctgagaaatgcaaagtgaagaacaaagttgagaagaagctttcttcaattggatcatgggagaccaacaagaaagcagctgtggaagctgagctcaagaaaatggaggagcatttggagaagaaaaaagcagagtatgtggagcagatgaagaacaaaatagctcaaattcccaaggaagcagaagagaagagagcgatgattgaagctaagcgtggagaagaaattctcaaagcagaggaattagcagccaagtaccgtgccactggaaccgctcccaaaaagcttttcggatgcatgtgatctctaatcatctcgatggggaaacaaatgaaatatggtattgatgtaatgacgttctttagtttgcttaatgtgggtttaatatggcaacatagaaagttataaggtcaacatcttatattgattggggtgcgtttgttaattatttaatttgtatttgtacatctttccattgaaaggctttctcttagctttatgaattggtaagtacaataatacataaaaaaaaaaaaaaaaagnnnnnnnnnnnnnnnnnnnnnnnnnnnnnnnnnnnnnnnnnnnnnnnnnnnnnnnnnnnnnnnnnnnaacg

SEQ ID NO: 131159 - DNA, 509 bp, Arabidopsis thaliana
acagaacatcactaccaaacatctccagctcagtttcttcaaaataaaaacagttaatctctctaaaacaattttttgttttctctctctcttaaataaccagagagttcagaatcattttgattctctttgtaatctttagttgttgtacctaacatcatggctgaagaggaaccgaagaaggtgacagagaccgtgtcggaaccaactccaacaccggaagttccggtggagaaacctgctgctgctgcagatgttgctcctcaggagaagcctgtggctccacctcccgttcttccatctccggcaccggcagaggagaagcaagaagactctaaggctattgttcccgtcgtccctaaagaagtagaggaagagaagaaagaaggatcagttaatcgagatgctgttctggctagagttgagacagagaagaggatgtcacttatcaaagcttgggaagaggctgagaaatgcaaagtggagaacaaagctgagaagaagctttc

SEQ ID NO: 131160 - DNA, 566 bp, Arabidopsis thaliana
  unsure (1)..(566): unsure at all n locations
gtctctcttctctttcctctctctctcacacatcttcgagaagtttccccccgcgggagcgtatcaaagacaactgctgggcagaaatcagagatcagacatatgaacattctcttctccagattctcctttttgcttctgtttctctgttcttggaccagtttcactttcaccacaacagaagcttatgatgcacttgatccatatggaaacattactataaaatggcatattatgagctggactggtgatggttatgtggctgttgtaacaatctttaatttccaacaataccgtcacattgaggcgcccgggtggcaattaggatggagttggatgaagaaggaagtaatatggtgtatggttggtggtcaagcaacaggacaaggngnttgtctaagtttaagggtacattcccattnctgcaagaaactccggctatcgtngnttnttnccgggnctccttttancngcaggttccacctgttttggggggggtttgtttgcncgtgggnnagacccgnacccggntttnttcgtcaaccaatnttgcnagctgncacnaa

SEQ ID NO: 131161 - DNA, 825 bp, Arabidopsis thaliana
  unsure (1)..(825): unsure at all n locations
gnnnnnnnnnnnnnnnnnnnnnnnnnnnnnnnnnnnnnnnnnnnnnnnnnnnnnnnnnnnnnnnnnnnnnnccacgcgtccgcggacgcgtgggcggctgcgagaagacgacagaagggggggtagagtagtaagatggccaagtacaacgagattgcgaagaagaagagagaggctaaagccgatagaaaacgagccattcacggcgatcctctcaccaataaattgaagaccagaactccggtcccctccgtctccggcaaacgtcagagaaagctccttcgcaaatggcgcagagagcagaaagatatggtggagaagggtcttgttactatggaagatgtggagatggcttctgctcaagctgcatcagaagactccaagaaatcccccagaaaatttagcgttaagaagagcttgaagttgaacaaactaaataataaaggcaaaaagaagaaaaaccagaaagccagtggtgaaaaatctgctgattgtatgctagaatgagtgtcgtgtatacctgtaaacccatttcttctaacggatgatagaggtttctcaatgtctggttagattctttcaaaaatgtgaaacgtgtgtttttgcatccggaggatgcgaagcagaggaatggagggtttgatatgattttatttaagttttccgaatcctttaatttctcaatctaatttttgtcttatcaaaatatcatattttgtattcaaaaaaaaaaaaaaaaaaaaaaaaanaaagcggccgctctagaggatccaagcttacgtacgcgtgcatgcgacgtcatagactcttctataggcgacctaa

SEQ ID NO: 131162 - DNA, 1065 bp, Arabidopsis thaliana
  unsure (1)..(1065): unsure at all n locations
gaagggccgggccgacgcgtccggcctggaatggctaagaacgttatgagcgtgttcaaacccgaagtcttaccgntttacagcgagttagcgaacgagttcggagtgttcnatcgatggttcgcttcaataccaacttcgactcaaccgaatcggttctacgttcactcagctacttctcatggatgctcaagcaacgtgaagaaagatctcgttaaagggtttcctcaaaagacgatctttgattcgttagatgagaacggactcagttttgggatttattaccaaaacatccctgcgacgttcttcttcaagtctcttcgtaggcttaagcatttggtgaaattccatagctatgcacttaagttcaagctcgacgctaagcttgggaagcttccgaattattctgtcgtggaacagagatatttcgatatcgatctttttccggctaatgatgatcatccgtcgcatgacgtggcggcgggtcaacggtttgttaaggaagtttatgagacgttacggagtagtccacagtggaaagagatggctttgctcattacttatgatgagcacggtgggttttatgaccatgttcccacgccggttaaaggtgtgcctaaccctgatggtatcattggacctgatccgttttactttgggtttgaccgattgggtgttcgggtccctacctttctgatctccccctggattgagaagggcactgtgatacatgaacctgaaggtccaacaccacattcacaatttgagcattcttctatccctgcaacggtgaagaaactcttcaacctaaagtctcacttccttacaaagagagatgcatgggctggtacatttgagaaatacttccgtatccgagattctcctcgccaagattgtccagagaaactgccggaagtgaaactatcgctgaggccatggggagcaaaagaagactcaaagctctcagaattncaggtgggctgatccaactggccttnaactcgttgnggcatctctaaactatatcnngcattgggngncatgcagaagtnagnacaattggtg

SEQ ID NO: 131163 - DNA, 477 bp, Arabidopsis thaliana
cttttacaaacacacaaaaaaaacaagaactagctaaaaggcaaaacactaaccacgcgctccgcaatggctatcacacgtgcctcctttgcgatttgcatcctcctctctttggctaccattgctactgctgattattacgctccctcatctcctccggtttacacttcaccggttaataaacccacgcttccacctccggtttacactccaccggttcacaaacctacccttccacctcctgtttacactccacctgtccacaagcctacactctcacctccggtttacactaagccaactctaccacctccggcttacactccaccggtttacaataagccaacgctcccagctcctgtctacactccgcctgtttataagcctacactctcccctccggtttacactaagccaactctcttacctccggttttcaagcctacactctctcctccagtttacactaagccaact

SEQ ID NO: 131164 - DNA, 681 bp, Arabidopsis thaliana
cgacaaagattgccggaaaactagccgtaacttaggggagctaggtgagaccagcgggggttccatcctcgtgagtaaagcagtgatcgtcggtccgttcaaatccgacaacttcacaaccatcaccgatgctattgcagccgcacctaataacactagaccagaggatggttactttgttatctacgcaagagaaggtgtctatgaagaatatattgttgttcccatcaacaaaaagaacttaatgcttatgggagatgggatcaataagacgattattacagggaaccataatgttgttgatggtgggactacgtataattgctcgagcttcgctgtggttggagagcggttcatggcggttgatgttacattcagaaacacagccggacctgaaaaacatcaggcagtggctttgaggaacaatgcggaaggatcaagtttttatcggtgtagttttgaaggctatcaagatactctctacgtccattctcttagacaattctatcgcgaatgcgatatatatggtaccgtcgattttatattcagaaatgcagccgcaatttttcaaaactgcaacatatatgctcgaaaaccgatggccaagcaaaagaacgcaataacagcgcatggaagacttgatccaaaccagaataccgtattctctatcatcaattgtac

SEQ ID NO: 131165 - DNA, 515 bp, Arabidopsis thaliana
aatacgactcactttagggaaagctcgtacgcctgcaggtaccggtccggaattcccgggtcgacccacgggtgcggcggagggggaaacaagtatgttgatgactttgttctcctttaaattatcatcacttcatttctcagagatttacgcacacagagttctcttcttcgtcctagtttcttctattccaggtgagaagaaaaaatggcgtttgtgaccactgcggaagtgtgtgacgcgaatcaagagatgattcgaagtggccagctccgagctctgcaacccgtttttcagatttatggtcgtcgtcaaatattttcaggtccagtagttactgttaaagtctttgaagacaatggcttaatccgtcacttcctcgaagagaaaggcaatggtagagttcttgtggtggatggtggggggagtttaccctggcccatactgggggggaacccgggtcgacaaggcccaaagaagcgggggggcaggggttcataggggatgggatggct

SEQ ID NO: 131166 - DNA, 614 bp, Arabidopsis thaliana
gtatgctaccatgattgacattctcggtaaatctaaccgtgtgttggaaatgaaatatgtcattgagagaatgaaggaagattcttgtgaatgtaaagattcggtttttgcatcggttattcgtacattctccagagctggaaggctggaagatgctatttctctcttcaagagccttcatgagttcaattgtgtgaattggagtctatctttcgatactcttttacaggagatggttaaagaatccgagctcgaagctgcttgtcatatcttcagaaagtattgttatggttgggaggtgaattctcgaattacggctccgaatttgcttatgaaggttctttgccaggtcaatcgctctgaccttgcgtctcaggtttttcaagagatgaattaccagggttgttatccggacagagacagttacaggattttgatgaaggggttttgtctagaggggaaacttgaggaagccactcacctgttgtattcaatgttctggaggatctcacagaaaggttcaggtgaggacattgtggtttatagaattctattggatgcattatgtgatgctggtgaggttgatgatgctattgaaattcttggtaaaatct

SEQ ID NO: 131167 - DNA, 680 bp, Arabidopsis thaliana
  unsure (1)..(680): unsure at all n locations
gaaaaccggggcgggccgaagcaaacaaactctctcaacaaacacataatttttttttttttacctacatcaaattcttcatgcacgtggtattaaaaagaccgtatgcattaacataacgacttttaccttctcttctcgtggggcacaaaccatgaacaccatgttcgtcaagccgatgcttaggaaatcaattcacaagaagagtgcctcgcatgatatagtgagggatacggtgaagactgagggctctagctccggagaggaggtgaagacgatgagaggcttctacggcgccggagaaacgtcgtcgccggcgagtagtttgggtgccacatgaaggtacgggaatatactatccaaagggacaagagaaagtgatgcaagatgtgcctcctcctccagctggcagccacgcggacgagctcgttaattggttctcttgatccattagtctcgagtgactctcttctcatctcgatctcgtcgaagactcgaagtctcttatattattgtctattgttctaatgggaaaccataaaatatatgtgtaattaagtggaaatatattgtcatataaccaatgataatgaataattaatgatgattaccnnnnnnnnnnnnnnnnnnnnnnnnnnnnnnnnnnnnnnnnnnnnnnnnnnnnnnnnnnnnnnnnnnnn

SEQ ID NO: 131168 - DNA, 437 bp, Arabidopsis thaliana
cgggctggaccgcacgcgtccggaaacatatacgttcttagtggcaaggatggtcctatcggccgtccttacccatgcgagggctgatggaagagcggtggacgcgaacttcttcttgttgatctgaacaagcgaggtgagaaaaagaagggtctcaccatcgttactacatcctttgacggttacctgtatctcatagatggacccacctcgtgcactgacgttgttgacattggcgaaacttcatacagcatggccttggctgataatgttgacggtggagatgatctcgatcttattgcctcaactatgaatggaaacgtcgtgggcttctcaacgccttcttctcaccatccccttaaggcttggagatctagtgatcaaggcaggaacaataaggccaatcgttatgatcgtgaaggcgtttttgtcacgca

SEQ ID NO: 131169 - DNA, 651 bp, Arabidopsis thaliana
ctggttctttctactcaaaaacaaaggcaatggtggaagagcttctaagagaatttgacaacgtatgcaccttgagagtgcggatgccaatctcatctgacttaaataacccgcggaacttcatcacgaagatctcgcggtacaacaaagtggtgaacattccaaacagcatgaccatactagatgaactcttacccatttcgatcgagatggcgatagaggaacctaaggggaatatggaacttcgccaatccaggagtggtgagccacaaccagatattagagatgtacaagagttacatcgagcctgatttcaaatggtccaacttcaatttggaagaacaggctaaggtcattgttgctccacggagcaacaacgagatggatggtgccaagctcagcaaggagtttccagagatgctttccatcaaagattcgttgatcaaatacgtcttcgaacctaacaagagaacgtaaaacacagacacacacacgcacttccccgctctgtgttcactataatgtttctactatagttttatctgattcatttactctctttttttgcaaaaaaaaaaaaaaaaagggcggccgctctagaggatccaagcttacgtacgcgtgcatgggacgtcaagtaaatctatagtg

SEQ ID NO: 131170 - DNA, 543 bp, Arabidopsis thaliana
  unsure (1)..(543): unsure at all n locations
gcnnacccncgtgngnncctagggaccntctctctgtgtccctcngctttggtgtgntgtgctatggancaattttgccgccgccgtggatatggtgtnccactggtttggtggaagtgaaaactttccccaaggcagctccactaatgctggctttgatgacaagtttgagagcaaccaaccattaggcaatgatacggatcatcagactgaaagcggtttgggaggcgatgaacaatttggtggcagtgacaatcaatttggagatgcagagaacggtaacacagagaatggtccagttgggtttgatcaaactgacgatggcgatgttgccaagagagcctagtctccacgatgttgtgccgtgtatgtttacgtcatggaacttttgttttgcagtttcagtctaaaacttacgaactttcttaatctctctatttaacgtttgaggttgtttatcatgtagagagacctctttagttggtctgtttttcttaaaatgttgggccaattaattaaaaccggtaataacctcccgggtcc

SEQ ID NO: 131171 - DNA, 716 bp, Arabidopsis thaliana
  unsure (1)..(716): unsure at all n locations
caacaatcccacctccggtttacactccaccggtttacaagcctactccctctcccccggtctacaaaaagtctccaagctattcgtctcctcctcctccatacgtaccaaaaccaacctacactccaaccaccaagccatacgtcccagagattcttaaggccgttgatggcatcattctatgcaaaaacggctacgaaacctaccctattctaggagcaaagatacagattgtntgttccgacccagcatcatacggtaaaagcaacaccgaggttgtgatctacagtaatccaactgactctaaggggtacttccacttgtcgttgaccagtattaaggatctagcttactgtcgtgtcaagctctacttatctccggtcgagacttgcaagaacccgaccaatgttaacaagggtctcacaggagttcccttggcgttgtacggataccgtttctacccggacaagaacttggagctctttagcgtcggacctttctactacactggtcccaaggctgcccccgccactcccaaatacttgatccgtgatgatcatcttatgatgatgatggttatggttttgcatgcattatataagggggcgctttaatcaactttattttttggaattttttccccttgaaaatgtcctttggtttttttgttccggtttaatttggtcnaaatgaancantccccttgggntggtttt

SEQ ID NO: 131172 - DNA, 482 bp, Arabidopsis thaliana
  unsure (1)..(482): unsure at all n locations
acgcgtccgaatgggaaaagagaggaattaatcttcatctcattttctgcagactcacctgagtatttgttttaatcagatcttcaatgatggtaatctctaaaatctgagtcttaaactcttttgtttgcttgttaatcaggtggagcttgctagattcagtgaaagattacactcatctactcatttccattcctcctttagctgacattggtgatccgatgttgcggaatgtagaacttgtgagagacaagctttcgagtggaaatcttcgatggctttgttatctctcatcaacaaagtgtgtatggagattggggtggtgcgtgggtcaatgaaaatcatctcccaaatcctaaaactcagtccagcccaaggtgagattagctgcagaaccaaggatggttaanncttgggcngtnatntttggggttcggctcaaaancttnggcttnggggggttttttggccctgggcnnagg

SEQ ID NO: 131173 - DNA, 536 bp, Arabidopsis thaliana
cggtttttcagttaccaagtttgtcaccggtagattcctttccgttttactcccacaccacttaaattttcaaatcgtaggagaatcaactttttccggccattatcagcaaccgacgattctcgatccggtgcaccagatccagaatcgccgaaccaaatgttcattctcgggatgggattcgtcggaggtttttttgcgcaacagctcaaagaatcagactgggtggtttcagggacttgcaggagtgattctaagaagaaagaatgggaaaagagaggaattaatcttcatccattttctgcagactcacctgaatggagcttgctagattcagtgaaagattacactcagctactcatttccattcctcctttagctgacattggtgatccgatgttgcggaatgtagaacttgtgagagacaagctttcgagtggaaatcttcgatggctttgttatctcttatcaacaagtgtgtatggagaatgtggtggtgcgcgggtcaatgaaaatcatctcccaaattctaaaac

SEQ ID NO: 131174 - DNA, 889 bp, Arabidopsis thaliana
  unsure (1)..(889): unsure at all n locations
gcgggtcgacccaagcctctatactgattcgaaataacgacagaggggaaccaaaaaaaaaacacctccgatctcggcgagagaaagagaaacgatctgtgagagagaatggatcagatcttgaacaaggtaggctcgtactggttaggtaagaaggtgaacaagcagctcgattccgtcggtgacgatatcaactctttgtcttcgagcatcgaaggaggaacaaaatggttggtgaacaaaatcaaaggaaaaatgcagaagccattgcccgagttactaaaggagtttggtttgcctgtggggatctttccacgtgatgcaaccaactacgagttcaatgaacagacgaggaagttaactgtctttattccatcaatctgcgaagttggttacaaagatacatcagtcttgagattcaccactacagttaccggatttctcgagaagggaaagctagctgatgttgaagggatgaacaccaaagtaatgatatgggttaaagtcacaagtatctctgctcattcttcaaaggtacatttcgcggcagggatgaagaaaatcacaaccgacgatgcttattaggttttaagagatggcgttgagattgatcaattctagctctgtttggctggtaattcacaattccttcatcctctttctccaatctcaatctttaaagtttcacccccccccccaaaaattttgtacaccctcattctcaaccatgttgaagctcacgaatttgataatctgaacaagatggtaactcagtacgccaaacaatgttcttatgtcatttgggatgacttattgagtcactgtttaagcaatattataacacccgcctcanacancggagcgaacgctctagaggatccnagcttac

SEQ ID NO: 131175 - DNA, 516 bp, Arabidopsis thaliana
  unsure (1)..(516): unsure at all n locations
cagttaccggatttctcgagaagggaaagctagctgatgttgaagggatgaagacaaaagtaatgatatgggttaaagtcacaagtatctctgctgattcttcaaaggtacatttcccggcagggatgaagaaaagcagaagccgagatgcttatgaggttttaagagatggcgttgagattgataaattctagctctgttttgctggtaattctcaattcttttatcctctttctccaatctctatctttaaagtttcaactttcttcaaaattgttttgtatatgctgattttcaattatgttgaagttcatgaatttgataaactgaagaagatggtaactcagtacaccaaacaatgttcttatgtcttttggtattacttactgagtcactgtttaagccaaaaaaaaaaaaaaaaaaaaccaaanngannnnnnnnnnnnnnnnnnnnnnnnnnnnnnnnnnnnnnnnnnnnnnnnnnnnnnnnnnnnnnnnnnnnnnnnnnnnnnnncg

SEQ ID NO: 131176 - DNA, 1018 bp, Arabidopsis thaliana
cggacgcgtgggctgatgtgtcgtttcctctagcagggctgagtacagcccatatcgaagctatatctttccatccatgtgcccaagttccagcacatgggattgacaagcagaacattgttttccagcctcccttgggtaactttgttctcatgcgataccaggcaggttgtggactcggaccaccagtgaaagggttctatcagctatcaatggtttcagaagacgagggtgcattcctcttccaaggtgccacctcatgggaaggtttacaagggctcctctgtccaatggaatttttggccctattactatgccctttccacggagacggatagtggcatttgatgggactccgtcagctgggactgttttaaccacagaacactctgttgagtggaggattctgggcagcggacgtagtctttctggaaaaagccttgaggcacctttccctgggacaatcaagtttagtccattgcagaccagaagaaaaggggatggggttgatgaagagagtgaggatgagacccctgagattgtggtgaacgtggaggcctccttggtgcagaaaatgaacaagggatctcccagcagctgagttggaggaaccggtcctgctggcaagcctatgactatgccaaggtctcgttcaagattgtcggggcatctgtatctcgaatgtcaatcgacacaaaatcagtcaatatctacccaaccacaaagtcaccggttgagttttctgctcaggtgacttcaggggattatatattgtggaacacattggggaaagctccatcagcagccgtcgtgtgatttccccaagtcgcagcctcactggtattgtattttcccatcccaaggaagtgatttatttgtttgagtttgaaagcattaaacgtatgaatgagcagtttgatttttacagcggaagtgtatctggacattattgttgtttcttgagagataaagaaaaattaatgttgtttgcggccgcggatttgaaatccagcttatc

SEQ ID NO: 131177 - DNA, 537 bp, Arabidopsis thaliana
  unsure (1)..(537): unsure at all n locations
accctttntggaaccntnggcccntnccggttcagcnggngtcctncttnaancccggnattcccgnnacccctttggttggaaccttgaagaacacgttatctgcacacttctgtcgaaagaaagacaaagcaaggatcgcttctgaaaagttctctgagatttacagggatgttacgatgaacaatctgatgggaatgtcgataacattggcgattgtatactcgagaggattgaagtgggaatactcaatagaatctcttcttgttgtggtagttggcattgcaattggcttaccggcttatgtgagatcgacttatccgttctggatctgtgtaatggcctttgctatgtatatcttctctcttgtccttatctatatccattttcatcttcgaggtcagagctaaagctttcaccttttagctctgatcagactaaaagagtatatcaacttcaaagtgttcttttccattttcattaagaccattttttttttgtttttaaattatctatatttgtttttctttattcttt

SEQ ID NO: 131178 - DNA, 719 bp, Arabidopsis thaliana
ccaatggggtattttgcttccaacaaagccctgaaaccattgagggccctgtggctcagggttaatgccagagcttccggcaagaggtattcccccgttttgttatcacggaagcttttcccagtcccagagattaggtgtgtgggatcgagcatggatcccacggcaaggtttttattggctaagctgattccatcagcgacttccgactatgcaaacgagatgtcagctgggtcagacataatcttcactgacgaatgtgagcctgcaagtctttattgaacatcttcagaaactggccgtgcaatcctgagcaaagtagtcacagtcccagtttgtgttttgcttaaattatctatatcttcctgattacccgcatgcccgtttgtactattttagagctctttgttattttggtctcacataaaatacatcatagttggaagtcttttatttgcattgggatttgtctggagtacagagatttactatttgcttcttctttcttttttttttgggatgaaatctcttgtatgattgatcaattatatggtttgggtctgtggctttagtgcttttgggccttgggcaacttctctgcttctggtccagtatctcgcgctactgcgtttgatttaaagaggtctctaaaacacaagctgactaaaaatgaagggcggccgctctagaggatccaagcgtagggacgcgtgcaacaa

SEQ ID NO: 131179 - DNA, 762 bp, Arabidopsis thaliana
  unsure (1)..(762): unsure at all n locations
gtcagctttgctggatgtggcttccattgcatctttcaagatccttctattagatccatatcgggagtgttgtctgccttccatgcgatgactatatcgccaatggccgaaaccatggggttatcttcatcagcctgaacatgaggcctttgctcacttattgcaagctccgcaagaggattcccagatgttagtccgggagcgtttcccagtcccgagattagttgtgtgtgatcaacatggatcacaggcaaggtttttattggctaagctgaatccatcagcgacttacaacaatgcaaacgagatgtcagctgggtcagacataatcttcactgacgatgtgagcctccaagtctttattgaacatcttcagaaactggccgtgcaatcctgagcaaagtagtcacagtcccagtttgttttttgcttaaattatccatatcttcctgattacccgcatgcccgtttgtactattttaaagctctttgttattttggtctcacataaaatacatcatagttggaagtcttttatttgcattgggatttgtctggagtacaaagatttactatttgcttcttctttcttttttttttgggatgaaatctcttgtatgattgatcaattatatggtttgggtctgtggctttagtnnnnnnnnnnnnnnnnnnnnnnnnnnnnnnnnnnnnnnnnnnnnnnnnnnnnnnnnnnnnnnnnnnnnnnnnnnnnnnnnnnnnnnnnnnnnnnnnnnnnnnnnn

SEQ ID NO: 131180 - DNA, 653 bp, Arabidopsis thaliana
  unsure (1)..(653): unsure at all n locations
gttggatgagagcaaagacgttggtgcatccaatcgtcgccatctcgctgcactatactgtggtgctacttctggatttgagcttatccatggcctggtcgataggatcatggaagtgatggcaataccatttctaacaatccatgaaaataacgtaccaatcaatgaaaaagacggatactatgtaaagctctcccaagaacccgagtttctaccgggcaggcaagctagcatcattgtcagagggaaacatattggtaactttggaatcgtgcatcctgaggttttgaacaactttgacatccctgatccatgctcttacttggagttagacatcgaagctatcttatagaaaaagaaaccaaccaaaatgttttcttctctttgtgcaatatcgttatctggattatttgaagttgttgattttgtttggttagaggatctagaacacgcatgtcgagagaattactacaaatatttaacttgctctgctgttttttaccccatttgtaagatccagcttttattttcaattcgattgtaattttcattaaaaaaaaaaaaaaaaagnnnnnnnnnnnnnnnnnnnnnnnnnnnnnnnnnnnnnnnnnnnnnnnnnnnnnnnnnnnnnnnnnnnnnnnnnnnnnnnnnng

SEQ ID NO: 131181 - DNA, 708 bp, Arabidopsis thaliana
  unsure (1)..(708): unsure at all n locations
tgccccaagcagctgccattgtgttcgtagtggatgccttggagttcctcccaaactgtcgtgcagcttcagagtacctatacgagattctgaccaatgcgaatgttgtcaagaagaagattccagtcctcctttgctgtaacaagaccgataaactcactgcacacaccaaggagtttatccggaagcaaatggagaaagaaattgagaaactgagggcttcaaggagtgcagtctctactgctgatatagcgaatgacttcaccattggaattgagggagaagtgttctccttcacgcattgctccaacaaagtcactgtcgctgaggcatctggacttaccggagaaaccatccagattgaagacttcattcgagaatacatcaagccatgagctccaacatgccttcatagattgaatctaccacaagtttcttatgctttgggctgtgactttgatttgagtttagagatccttttgtatatgagatctttggatgatttagggtgttcaaaactgagtagctgtattttcgagttagataatctgttttaaatcggaatgattttaaggaaatgttaaatgacttaattctcttgcnnnnnnnnnnnnnnnnnnnnnnnnnnnnnnnnnnnnnnnnnnnnnnnnnnnnnnnnnnnnnnnnnnnnnnnnnnnnnnnnnnnnnnnnnnnnnnnnnnnnnnnnnn

SEQ ID NO: 131182 - DNA, 761 bp, Arabidopsis thaliana
atctctttgggatgctacagggaactagatttgttttatatgcaaacggtagagaatccatcagtgttacaatccaggaagtgacaccaacatctgttggggctattatagctctttatgaaagagctgttggtttatatgcctcaattgtgaccataaatgcttaccaccaacccggtgtggaagctgggaaaaaggcagcagcagaagttctcgccctgcaaaagcgggtattgtcagttcttaatgaagccacttgtaaagatccggtagagccattgacactggaagagatagctgatcgttgtcatgctcctgaggaaatagaaatgatatacaagatcatagcgcacatgtctgcaaacgacagagttctgatagcagaaggaaactgtggatcgccacgaagtatcaaagtgtatttgggcgagtgcaatgtggatgacctgtacgcataacaaaacccaacactttctcaaactccaaactctcattctctccattccttatttctttctgccatgtctatgattttgaaaaagaaaaagattgcaataagagccaggaaacacttgtgtacttgttttgaaataaagataatttcagaatgttacaaatgttgattgtaatgataacattggagatagattcatcaatcaagcaggctcatgtgaaacaaaaaaaaaaaaaaagggcggccgctctagaggatccaagcttacgtacgcgtgcatgcggcgtcatagtctagctatagtgtc

SEQ ID NO: 131183 - DNA, 560 bp, Arabidopsis thaliana
ggagaaagaggcagcagtgaaaaaagagtttggacagacttgtgactggataaagaaacgattgggtgacaaggttgccagtgttcaaatttccaaccgtcttagttcttccccctgtgttcttgtatctggtaaatttggttggtcagccattatggagaggctaatgaaggcacaatcaactggtgacacaatacgcctcgactacatgaaagggagaagagtgtttgagatcactccccaccactcaattatcaagaacataattgctgcttacaatagccacccaaatgacgaagatgcaatgagagccattgttcttatgtatgacgcagcactagtttctagtgggttcacgcccgataatccagcagagctgggtgggaagatatatgagatgatggatgtagctctttccgggaaatggtcaagccctgaggtgcagccgcagcaacagcagaggcacattctcacgatgcagagacgtttgaagtctgaagtggttgaaccagtcgaagtggatgggaagaaatgaacacaagcctaatgttttatgtccc

SEQ ID NO: 131184 - DNA, 642 bp, Arabidopsis thaliana
gaagaagtccaagaagaagaagaagaagatttttatcatgaatcttctccagaacttgtggatagtaagaaatcagattgggttagatctgttcagctatggaatcattcaccggatctaaatccaaaagaggagcgtgtagctaagaaagcgaaagtggtggaggtgaaaccaaaaagcggtgcgtttcagccgtttcaaaagcgcgttttggagactgattggcaaccggcggtgaaagtagctagttcgatgccagcgacgacgacgagttctacgacggaaacttgtggtggtaaaagtgatttgattaaagctggagatgaggaaagacggatagagcagcagcaatcgcagtcgcatacgcatagaaaacaaaggcggtgctggtcgccggaattacaccgtcgattcctaaacgcgcttcagcagcttggaggatctcatgttgctacaccaaagcaaatcagggatcacatgaaggttgatggattaacaaacgacgaagttaaaagccatttacagaaatatagacttcacacaagaaggccagcagcaacatccgtggcggcacaaagtaccgggaatcagcaacaaccacaaattgtggtggttggaggcatatgggtaccatcgtcacat

SEQ ID NO: 131185 - DNA, 435 bp, Arabidopsis thaliana
cggccgcctggcttcttcttcctcttcaactctcaaacaatctcttccttcatcatcttctatctcttcctctgttccttcttctggttttgccaatcaccaaacctgactaacccttctcctcctcctctctccgtcgctccccttcgcggggatgccaattctccaccgccggaatcttcttcttctccggcgacgaaatcttctttaatgatttcttctagagatcccaatgccctctttagcggcggtggaatcagcctttttagcaggagttagaactgtgaagtttagttatggttatcctagtcttaaaggtaaaaagagcaacaatggaggattacttcgaaactaggaatctctgatgttaatggacaaatggttgctttctttggtgtctttgatggtcatggtggagcaagaactgcagaatat

SEQ ID NO: 131186 - DNA, 511 bp, Arabidopsis thaliana
  unsure (1)..(511): unsure at all n locations
cccnngcggtcctcttntntcccatcggggacccntacnctggnactcaaaattcagcccggaggaggtgttcagatccggaggacgaatggctgaagaaggctacccggggaggaccagccactgtatacccgcatagcttaccttgtatcgaagcgtggctgaggaaattagggttttaccaaagtaaagacgatagagctgtttggttgattcagaaacctgattggcatgctcaactatctcttgatgtcactgatctctgcattaggtacatgaaaagtgggccgggaaatctagagagagacatggaaagaaggtttagctatgcgttgagtagagaagataccgagaatgccatacttggaggaccttaaagaataaaaagagtttgtttgagtatctttgttcttaaactttgctttttcagtagtttctcgttatatgatgcatttgcttgtttgatccgaaaaccatttttatcacaattctttagcaggtacggtctttc

SEQ ID NO: 131187 - DNA, 511 bp, Arabidopsis thaliana
  unsure (1)..(511): unsure at all n locations
gatagaacaaagattacgaaaacttcctccgcttcanatttttcctttctgcaagaattttcctgggaaaatcaggaattttctcggagaaaattctcgtaatcatgaactgtgtttctgcatttgaatttgttccttcaagtgctctatttccatgtgcacaatcatcaatccctgcgaaatttcttcacattttgagctcaaaagcctcgatttctcccagatgtcgtagtttcgcttcttcttcttcttccacaattcggaggaagcctctaactctagtatcttcaaaatcttcagacgcggaggaggtgtcagatacggaggacgaatggctgaagaagctaccagagaagaacaatgccactgtattcgcatagcttaccttgtatcgaagcgtggctgaggaaattagggttttaccaaagtaaagacggtagagcctgtttggttgattcagaaacctgattggattgctaacctatctttggngcnntgncnttgattaggg

SEQ ID NO: 131188 - DNA, 821 bp, Arabidopsis thaliana
  unsure (1)..(821): unsure at all n locations
cttactcatttctactatacagtataatggcaaaccaaatctacataatctccttgatcttcttgtctgtgttactttatcaatccactaccgtcttatctttccgacaaccattcaacctagcgaaaccatgcaagcgtttcgtcttctacctccataatgttgcctacgacggtgataacacggataatgctacatcagcagcaattgttaaccctttaggtctaggagacttcagttttgggaagtttgtgatcatggacaaccctgtgacaatggaccagaacatgctctcggaacaggtggctcgtgttcaaggcttcttcttctatcacggtaagacgaaatacgacacttggctctcttggtcagtagtattcaattcaacacaacacaagggggcattgaacataatgggtgaaaccgcgtttttggagccgacaagggaccttcccgtcgttggtgggactggtgatttcggcatgacccgtgggatcgctacgttcatgactgacctcgttgaaggcagtaagtatttccgtgtcaaaatggatattaaactctatgaatgttactattagagttactaatacatgtcttgggtttgatgtttctatcttgatatttttgggtttgatgtttctttgttggcactttgttgcttttctctgttcgtagttgatgttgtaccaagtttccaataaatgttatattgaaaacgttcttttnnnnnnnnnnnnnnnnnnnnnnnnnnnnnnnnnnnnnnnnnnnnnnnnnnnnnnnnnnnnnnnnnnnnnnnnnnnnnnnnnnnnnnnnnnnnn

SEQ ID NO: 131189 - DNA, 684 bp, Arabidopsis thaliana
  unsure (1)..(684): unsure at all n locations
tgcaatgcttcttccatttctctcctcctctctcctcctccgtctctcttctccgatcatgtcccctgatcccaaatccaataccttcttcttctctttttccagttgattaccggagaatttcagatcgcgatctccgatttattaataattacagaaaaaaataattaaaccctagagagagagagagatatatatatacatggagagttcattaggtttcatggcggttttcgccgtctcaggaagcgttgtgttcttagcgagtcaatttcacaagcgtcttctctccgattacatggacaagttcgaattcgaaatccgagcgcagaaaaaaatggtgatgaagaagaaggtgagattcgcggcggatgtggtggagccgtcggggaataacaaagagtatcgccggagacattcttccaaggctaaatcgaattcgaagatggcggcaactatttgactttaaggtttttttttacaaaatttaatgtgtaatttattcatttggggtttttttatttgaaatccgggaaatttaaatttcgggnatctgaacctgggcgtaacttttcaaagcttcccccggggcaattatttncccccntccttttttccttgnggntatttttntggttggncccccaaaaaatgngtntttggaanncaaaaagggttccattt

SEQ ID NO: 131190 - DNA, 498 bp, Arabidopsis thaliana
tcttctctccgattacatggacaagttcgaattcgaaatccgagcgcagaaaaaaatggtgatgaagaagaaggtgagattcgcggcggatgtggtggacccgtccgggaataacaaagagtatcgccggagacattcttccaagggtaaatcgaattcgaagatggcggcaactatttgactttaaggttttttgtacaaaattttatgtggaatttattcatttggggttttgggatttgaaattcgtaaatttaatttcggaatctgaatctgggctaaacttttcaaagtcttccccaagggccaattatttcccttcttctttttttttcttgagggtttatttttgttggtgtgacccggaaattaatggggtggttgggtatacccaaaagggaatggtaaatccctttttaaaaaaaaaaaaacaaaaaggaggccggttcaaaggatccaagctaagaagcggcagcgagtcaagtctttaaggtcact

SEQ ID NO: 131191 - DNA, 677 bp, Arabidopsis thaliana
aaaaatcttgacgtctcttcttgtctgaagtcttaagtatataactggaaagtccgtattggagttcaacaaaagaagaaaacgaagacttttagttagatcctacattactgaactcattatatatatctggtgagacattctcctatatatgcagtttcaactttcaaagccagcaaataataaacagaggagaaatatggaaacacaaggcaaagtaatcacttgcaaagctgctgtggcatggggagctggagagcctctagtaatggaagatgtaaaagtggatcctcctcaaagattggaagtgagaattcgaatcctcttcacttccatctgtcacactgatctcagcgcatggaaaggcgagaacgaggctcagcgagcataccctcgaatccttggccatgaggcagcagggatagtggagagcgtaggggaaggtgtggaagagatgatggcaggagatcatgtgctccctattttcacaggagagtgtggagactgcagagtgtgcaagcgagacggagccaatctgtgcgagagattccgagtggatccgatgaagaaggtgatggtaaccgatggaaagaccagattcttcaccagcaaagacaacaaaccaatctaccattttctcaacatatccaccttctccgagtacacggtcatagact

SEQ ID NO: 131192 - DNA, 557 bp, Arabidopsis thaliana
  unsure (1)..(557): unsure at all n locations
gtgaagttgctcttccactaaagttgaaatcagaaaaaccatcaatggcttcttcatcatctctctttctcctccctctgggtcttcttgtctcccaagcttcagcttcaacggttatattttacaacaagtgcacgtacactgtctggcctgggatccaacctagctccggtcagtcattactcgccggcggcggatttaaactgtcgccgaacagtgcttacactctccaacttccaccgctctggtccggtcgcttctggggccgccacggttgctcctttgacagatctggccgtggtcgctgcgccaccggagactgtggtggttctttcctctgtaacggagctggcggtgtacctccggctactcttgccgagatcaccctcggtcatgacatggacttttatgacgtcagcctcgttgatggatataacttggcgatgtcgataatgncggtgaagggtacgggaaagtgtacctacgctggttgcgtaagnaccttgaaccggatgtntccggttggtctacaagnccgttcaagtgacgggacacag

SEQ ID NO: 131193 - DNA, 736 bp, Arabidopsis thaliana
  unsure (1)..(736): unsure at all n locations
atcggctctgaagaggaacaaagaagcgtttaatggaattgctcgaggattcaccacttggtctcatcgagttttcacttgtaacattacagctgcttctgtaacctctgcttcgtcttctcctttagctggaaactccttctatggcttgcgatctctgctcaagggtcaaaatgcttcaatgtttaggaggatgtcaactgtagcgtcgataagctcagagagtaaagagggtttgaagcttcttgtcactggaggacctcaagctcagaaatgggttggaatttggctttttggttcggctgcttgggttttcagcatggttgtacttggcggtgtaacccgattaactcgatctggtttatcgatgactgattggaaatttactggtgaattccctcctctgtcagatgaagcttgggctaaggagtttgagaaatataagcagtcacctgaatataagcgtgtgaaaagggatgaaccttgaagattttaagttcatatattggatggagtatgctcatcgaatgtggggaagaggattgggaatcatgtttgctttgccgttttcttatttcctccgtaaagggtatattactctacggcttggagttcagctctctgggttatttccccttggtgctggacaaggtttcattggtggggggggtaggtgaaaaaggggttttacggggnccncccctngggaattcncaacccgggggnaanccaaccg

SEQ ID NO: 131194 - DNA, 449 bp, Arabidopsis thaliana
atcattgacgagaaaccccatccagtgtttacccgtgagggcaacgacctgattgtcacacagaaagtctcactagctgatgccttaacaggatacaccgcaaacatagcgacccttgatggccgtacacttacaatccccgatcacaaatgtgatccatcccgagtatgaagaggtggttcctaaagagggaatgccactccagaaagctcagacaaagaaagggcacttaaggatcaagttcaatatcaagtttccagcgagattaactgcggaacagaaagctgggtttaagaagcttattgggtgatgattaaagcatctctgtcttgtgatgtgtggagattgggataaatttggtcatataccatttatagggaattatctccctcttcattaaatttcgtgttgttaaacaagtcttctttttaaagaatagttttttcaag

SEQ ID NO: 131195 - DNA, 456 bp, Arabidopsis thaliana
gtcaatgtgactttgatgattacacatttgctagcccccataacgtaagcacggcctgcaatgaagctattagtgaaactgaaaacattatcactgagtatgtcaacaactatgatgttctcctcgatgtatgttatccgtctatcgtccagcaagagctgaggctcaagaaaatggctactaaaatgagcatgggagtggatgtgtgtatgacctatgaaagacggttctactttaatcttccagaggtacaaaaggcgcttcatgcgaaccgtactcatctgccttattcatggtcaatgtgcagcggcgtgttaaactactctgatatcgatgggaacatcgacatgcttccgattctgaagagaattatactgaacaaaactcctatttggatcttcagtggagatcaagattctgtagttccattcgggggttcaagaactctcgtaagag

SEQ ID NO: 131196 - DNA, 664 bp, Arabidopsis thaliana
  unsure (1)..(664): unsure at all n locations
cactatcgtttttcctgctttttcatgcattgaatgatctgatccatgttctaaaaaagggtgcttgcatcagtaaccgaagcaatggctcggaggtctggaaattgcatgagatgtctagtgatattctcggtggtttcagcattatttgtgtgtggacctgctctttactggaaattgaataagggtttcgttggatctgctcgtagcaccaactccatttgtcctccttgtgtctgcgattgtcctcctcctttgtctctcctccagattgctcccgggcttgcaaacctctctattacaggttgtggcagcgatgatccagagctcaaagaggagatggagaagccgtttgtggatcttctcacagaagagctgaagcttcaagaagcagtggcagacgagcatagtcgtcatatgaattgttacactttgccgaagctaaaagggttgcttcacaagtaccaaaaggaggctgagaagtgtaaccgttgccactgaaantttgcgnatcaacttaggggggggnnctcaagcatttttggctcaaaagagggggagntcactttttttttgggggcccanacctnggcaattaggtttggaaagtnnggaannaaatcncnttttnagggcctttttanangttcttttncnggggttt

SEQ ID NO: 131197 - DNA, 714 bp, Arabidopsis thaliana
  unsure (1)..(714): unsure at all n locations
atgggcacgtgtgaccccaaccggaacacctaacatcatctacacatgtgtgtctcctcgaggctattctgcataaaggtcttctaaaagaacatcaggtgcagattctcccacaaaggcaacactctggtgcccgtcaagtcagcaatcatcggctgcgaattattcttctcgcaaccgcacactcccagcttgtacaccgcggatggatggtaaagaattcttccggcaagccaggagccgattatcctatgaccaatccagttccttcttagctaacatcaaagagctcaacgcccagaagcaaacccgagaggaaactctgaggaaagcagatgagatatttggggaagagaacaaagatctttatttatctttccaaggtctccttaacagaaacatgcgttaaactttcataagccggtatcttgaatctgggccaatgtgataggatggatattaaccattgtagtatgtgtattccctacgggatttagtttgcaaagtgttttttttgtttcttcccaaccaaagaagaagaagtatctcgttttgggaagtgttgagtttctctcttataattggctttgaataaagctttatatgnnnnnnnnnnnnnnnnnnnnnnnnnnnnnnnnnnnnnnnnnnnnnnnnnnnnnnnnnnnnnnnnnnnnnnnnnnnnnnnnnnnnnnnnnnnnnnnnnnnnnnnnnnnn

SEQ ID NO: 131198 - DNA, 566 bp, Arabidopsis thaliana
  unsure (1)..(566): unsure at all n locations
aaaacattacatttccactctcacattcagacgcaccaatcctctgttttggattttgaagagaaaatggcaagcagcgacgtgaagctgatcggtgcatgggcgagtccctttgtgatgaggccgaggattgctctaaacctcaagtctgtcccctacgagttcctccaagagacgtttgggtctaagagcgagttgcttcttaaatcaaacccggttcacaagaagatcccggttctgcttcatgctgataaaccggtgagtgagtccaacatcatcgttgagtatatcgatgacacttggagctcatctggaccgtccattctcccttccgatccttacgatcgggccatggctcggttctgggctgcttacatcgacgaaaagtggtttgtcgctctaagaggtttcctaaaagccggaggagaagaagagaagaaagctgtgatagctcaacttgaaggagggatcgtttttggggaagggggttntttntttaagcaaaggaaaccgttttaacggggcaanatnggtaccttgnatttnnttnggggtttttggttgtt

SEQ ID NO: 131199 - DNA, 546 bp, Arabidopsis thaliana
caaagccaatcaaattgagagagatatcaagaaagcaaaataatgatgttggccgtggtctcagtcgtcgccatactcggagttctcgtggcttggccggtatcggcttggccgaaaagacttacctggagcgggaggatacggaggcgatgacgatgatgatacaaagtcattgttccctttggacaacctattatcgttgaattattatgataggatttgtcctgattttgagaaaatcgttgttacgaaagtgagggaatggactaagagtgactcttcccttggtcccgccctcctccgccttatcttccacgattgtggcgtcacgggatgtgatgcgtctgttcttctagactacgaagggacagagagaagatctccggctagcaaaacactaaaaggcttcgagctaattgacgatatcaagtccgagatggagaaatcatgccccggcaaagtatcctgcgccgacatcctaacattagccagccgtgccgccaccgtccaacttggtggtccttactggcccaacgtctacggacg

SEQ ID NO: 131200 - DNA, 567 bp, Arabidopsis thaliana
  unsure (1)..(567): unsure at all n locations
cggacgcgtggggtgacagtgaggtgctaatgactatgcttgagcttctcaatcagcgggactgattcgaggcgtcgggcaaaatcaaggttttgatggctacaaatcgtattgatattctggatcaagctcttctccggcctggaaggattgataggaaaattgaatttcctaatcctaatgaagagtcacgttttgatatcttgaagatacactcaaggaaaatgaatttgatgcgtggaatcgatctgaaaaagattgcagagaagatgaatggtgcttcaggtgctgagctgaaggctgtatgcacggaggcgggcatgtttgcacttcgtgagaggagagtacatgtgactcaggaagactttgagatggctgtggcgaaggtattgaagaatgacacagtgaagaacatgtctctgcgtaagctctggaagtaggaatttcagagtcacagattaatttcgattatttcttctctnctgtctgtggttctttctgaaaccttttcggctagcgctttaagcttttctaaacaatgtttgtacactagtttctctcgtgccg

SEQ ID NO: 131201 - DNA, 492 bp, Arabidopsis thaliana
ctaagattaggatcctctttttcaaggaaaacaatttaaaaaatcttataatttacaatcaattcattcagtatttccctttttagaagacaaattaggacattttaattatgtgttagatgtactaataccttaccccatccatctagaaatcttggttcaaaccctacgttaccgggtaaaagatgcctcttctttgcatttttttcggttctgtttatacgagtattgtaattggaagaatttttatattaaaaaaaaatcaattttgaatccaagatttttcttgttcttatataattcttatgtatgtgaatacgaatccatcttttttttttctacgcaagcggtcttcgcatttacgatcgacatcttatgaagtcctttttgagcgaattgtattctatggaaaaatacaccattttttcaaagtttttgttaataattttccggcaatcctagggttgctcaaggatcctttcatacattatg

SEQ ID NO: 131202 - DNA, 661 bp, Arabidopsis thaliana
gttctttaactcctgtcaaccattcttaactatattgaccctcgctcacgcataggctgatggtcatgctacgttctggccatgaaaagctcattttttactgcatccctttgatttcttccgaggcctcaaccatcatcctctacagctctaagaccgcagaaacccgtctatatcacgatgatggttaagccggcgctccaatgtatccaagggacaggttgagatgacaatccctgatgttaagctgactcgatcaagagacggatgcaacggaatggcactgttctctttcgaccaaccatccgttttcgactcgagcggtgaagtcggagagattacaggattgtacatgattgatgaggaaggtgtgattcagtcgacggatgtgagcgcgagattcgtgaatgggaaaccggaagggattgtggcgaaccacatagtgcgatcgccgaaagaatgggacaggttcatgaggtttatggagcgatactcggaccagaatggcttgcagtttgttaagaagcaatgaggttggagagaattttcaatgagcaaaacaaaatgtgtatgttacattaaattttttcactcttttgatttataatcttgtactctcctagttttgatctttacttgagtttcaacttacaatggtaaa

SEQ ID NO: 131203 - DNA, 883 bp, Arabidopsis thaliana
  unsure (1)..(883): unsure at all n locations
cacagaaccaaatggactggagatgtattgtctccgtaataaacaatcattgctcgagttcgctccaagnatgttcggttcatgtctggttaataatgctggttgcttgagaacaaacgtactactacacctgaaggattcgagttaagttttgcggtgaatgtacttgggacatacacaatgacagagttgatgcttccattgttggagaaagcaacaccagacgccaaagtcatacagtttgcctctggtggaaagtacacttcgccgcttactacagatcttcagtttagtggtgaaaaatttgatggagtggaacaatacgcacggaacaaaagaatccaggtggctctgacagaaaaatgggctgataagtacaaaaataaaggcatagggttctactcaatgcaccctggctgggctgagacaccaggtgttgccaagagtttaccgagtttcagtgaatcgttcgcgggtaagcttagaacaagcgaacaaggagccgatacaatcgtttggttagcactgcagccaaaagagaagcttgtctctggtgcattctatttcgatagagctgaagcaccaaaacatctaaagcttgcaggtacaagcaagtctcatgaccttattgactcagtcattgattctgtgcattccatggcagctcttaatccttaaatgtccatcttcgacatagtttttttcttgaaaataaaatgtgattgcacgtaacagtattagtcttttctcattattgtggaaatattatagtatggaatatttatatcttttacttattaaaaaaaaaaaaaaaagnnnnnnnnnnnnnnnnnnnnnnnnnnnnnnnnnnnnnnnnnnnnnnnnnnnnnnnnnnnnnnnnnnc

SEQ ID NO: 131204 - DNA, 493 bp, Arabidopsis thaliana
  unsure (1)..(493): unsure at all n locations
gtagcnncagcggtgcancntangtggcaatacgatctgagttnnncccaaatatgagtntagttgtanaanntttgcagccactctcaaaaccaccagcaccagccccagcccccagtaccggaatcctgagtttgtgcaccttttaaataccagccatcttcttcgtgcaatagaggtgggttctttgttcatacaaagtgagaattatactctgatttgggaaaaacatagacatgatcttactattagttttcattttggtgttaaagaagagtgcttaatatttctcatttgttatgtgaggtattggaaacaggctttttttacttgattggcgtggagaacaaacatgttttgcatttggtgtcttttttttttgttctccttttctgaatatattgacaagctctgtttaagggtttctgaaaaaaattaattctatataattgtcattaatttatgttaatatggggcggccgctctagaggat

SEQ ID NO: 131205 - DNA, 473 bp, Arabidopsis thaliana
  unsure (1)..(473): unsure at all n locations
ggcgttgctctctcgtccccaagaaaatcttttcttttatttttttgtttactaaatgtggacattatctttttaaagggagaaagtcctaaatttcatatgattcgatgttcttttcagacatggagcgaaaaaccctagcgattacgcctccttccttcttcttccaccttggaggaggagcatttggttcatcaaaggcggttcattgtcttctccttctctcatggctatttgctttcatcagtcaattcattgcatatcttagcttgaatatgggtacaacactggttctgctgctttggagtttcagggctttattaatggtgaagattctgggagtgtagcaatccagaaatntgnccagaatgtttgncctagtcanaagctgntttggtttccttaaagcnttagggtcagagaatcgggcctnnnccnntttgggttggntttnnccccaaagaatcacgggg

SEQ ID NO: 131206 - DNA, 401 bp, Arabidopsis thaliana
ggggcgggcccacgcgtccgcgcactctccgccaccttcttccctaattctctctctctcgctacctctctacgtgataaacaagaatggcgactgtacgaatctcctccactagcatgaccaaggccgttcttagaagccagacaaccaacaagctcattactaacaagagctacaacttatctgttggatcaacgaaaagggtttcgagatcttttggtttgaaatgctcagcgaattctggtggtgctacgatgtcggcggtatacaaggtcaagctcttaggacctgatggtcaagaagatgagtttgaggttcaagatgatcagtacatcttggatgcagctgaagaggcaggagttgacttgccttactcttgcagagcccgtgcgtgttctact

SEQ ID NO: 131207 - DNA, 534 bp, Arabidopsis thaliana
ggatgtctttgagacagatatggatcatgaaattggttctgatagagataacacaagcgctgtgtttgaggaagctgagagtatctcagtgggtgaattgattaaaagtccggttttcagcgaagacgagtcatcagatagctccctctggattgatttgggtcagagtcctgctgattctgataatgcaggtcatctgaacaagcaaaagagccccttactggttcgaaaaaaccacaaacgaagaagctcgcctaaaccagcttcaaaggctaataatggcagcaacggtgggaggcatgttctctctttcgatgctgctgttttgtcagtatcacatgaagtgggtgaaaggaagtcatagaagaagaaaattctgaaatgaatcagatagacacaagtcgtcggttgcgagttactgagatcgaagaggaagaagaagaaggagggagcagtaagctaactgctcatgcaaatggttcgagctctggaatcaaagacagtgcgataagaagagaaactgaaggcgaattt

SEQ ID NO: 131208 - DNA, 467 bp, Arabidopsis thaliana
  unsure (1)..(467): unsure at all n locations
acgggncgggaattccggggtgggcccagccgtccggaaaggaaaggtggggtcctatctccctcttaaaccaacctttcaaaaggtggcgtcctggctccctttaatcttttttttgggctctatccaaggcctttgttaaggatttttgggtcgaaaacctgaaacgcgctgaaccccctgcgggttaccctggctttcgtccaattaatgtaaaagttccagacttggttttttttggcttaggccctctgggaaccactccaaacttattaaacgccgttgtaacacccgttttggcagttaagttccgggttttgaacggtttaggcctttttccagttggactggccttagttcttaagggggtgatccaaatgcacactaaccttggggcttttgaggtttttttggtcctaacgggttccataaccgttgggttggtttcttcggcaaacgttgtttac

SEQ ID NO: 131209 - DNA, 627 bp, Arabidopsis thaliana
  unsure (1)..(627): unsure at all n locations
aacgcatcatacgacctctctctncctctactacacacttccgtttccatttccctctccgccacactcacgcaccgtatctattaatgctcgctctccaccagcttacttcaccacccgtccccgccgtgtctgtcctcctcgacttctcgtgttacaaaccagacccttcactgatctgctctcgtgaaacattcatggacagatctcaacgtgtaggcatcttcacagaagacaacttagctttccaacaaaagatcctcgaaagatccggtctaggtcagaaaacttacttccctgaagctcttcttcgtgttcctcctaatccttgtatggaagaagcgagaaaagaggcagaaacagttatgttcggagctattgacgcggttcttgagaagaccggtgtgaaacctaaagatattggaatccttgtggtgaaattgtagcttggttaatccaacaccgtcactttctgctatgattgtgaataagtataagcttagaggcaacattttgagctataatcttggtggaatgggatgtagtgctggccttatctccattgatctcgctaaacagatgcttcaggtaaaatatcttattattcggtttggtttaatccggttt

SEQ ID NO: 131210 - DNA, 798 bp, Arabidopsis thaliana
  unsure (1)..(798): unsure at all n locations
tttcttcatcactgcgagagagacgaacaagagagagagagagagagagggagatgcaatcgctgcaagataaggcatcggtgttaagcggcgtcgatcaggctgaggcgttcgccatcgacgagtccaatctgttcgacaagcttggtcttcagacattcatcaacctatccaccaatttctataccagggtatatgatgacgaagaagaatggtttcaatcaatattttctaactctaacaaagaagatgccatccaaaaccagtatgagttctttgtccagcgtatgggaggccctcctttgtattctcagagaaaaggtcatcctgctttgatcggacgtcaccgtccatttccagtgacccatcaagctgctgagagatggctagagcacatgcaaaatgctctggacgattcggttgacattgaccaggactcaaaaatcaaaatgatgaagttctttagacaccccgcatttttccttgtggctggaaacgagctgaagaatcagaatgagaaaccgaagcataagcctcaatgtgcttgttaacacgcaccccattaaccagcagaagaattattttactccagattcttggtttaccttaaagttcccttcaaaggccccaaagatttttcggaaaaatggttttttctggaaaactaagtaaaaaaaaaaaactggttttanaaaaaaaaaaataaaaaacaccaaaaccnaaggggggcnnnnnnnnnnnnnnnnnnnnnnnnnnnnnnnnnnnnnnnnnnnnnnnnnnnnnnnnnnnnnnnnnnnn

SEQ ID NO: 131211 - DNA, 552 bp, Arabidopsis thaliana
  unsure (1)..(552): unsure at all n locations
agtaaatgtaaactttgttgtttaatatctgtttctgtgattgaatcaaattggaaagttacctgtaaatgctaattgttgttttttttctctatgcttttggtgagtgttaatggcggataagcaagtggttgtgagttaaggagaaactgtaaaggaattcgtctatgcacttcaatgaagtttatcatcaccggttggagacaaagatagacaaagacacgtaacttgcaactcatgttccacttgatgccaaaagagacatatgattcgtttgctttgttgtcttttttttagctttgtatgtttccaccacatgtatctttttagctttgtattttcttacacaccttgtcttttatttaactttgtatttggaccacaagttgtcttattttagctttgtatggtcatgtatattcgatccnnnnnnnnnnnnnnnnnnnnnnnnnnnnnnnnnnnnnnnnnnnnnnnnnnnnnnnnnnnnnnnnnnnnnnnnnnnnnnnnnnnnnnnnnnnnnnnnnnnnnnnnnnnnnnnnnnnnnnnnnnnnn

SEQ ID NO: 131212 - DNA, 508 bp, Arabidopsis thaliana
taggtacacactatagaagagtctatgacgtcgcatgcacgcgtacgtaagctcggaattcggctcgagcttttctctctctccttatctttctcttcgcgacattgacaaaagaaaaattgctcaatctttgaaaaaccagaacaattaacgccggtgattgtttgtatttcgctatgttatctgagactttcaacgatggattcatcaaggcaacaaacgatgttcacatcggcggaagtttgcttaaatcgaaaaatagcaaattggattcggagagttatcgccgacgccttccccaaattaggtatgaatcaattctaatctttattacgtgattagatgttgtatttggtggtttaatcaaaaaaattagggttttggaattgaagaaaatttagggttctgtttttaaaaattagggttcttcgtttgtagcaagattagggtattttttgatatatcttgaagcattttctatagttttgtatggtcatagatcgttttg

SEQ ID NO: 131213 - DNA, 553 bp, Arabidopsis thaliana
  unsure (1)..(553): unsure at all n locations
ttgtaataaccccattggtgatcatnatcttttnaaatctgtgaagaacaagattgattattgtaggcttcatggaattnagattgtntataacatggctcatttggataaggaactcgctggctattgggcaaaattaccaatgattaggaggttgatgttgtctcatccagaagttgagtggatctggtggatggatagtgatgctttgttcactgatatactgtttcagatccctttggctaggtatcagaagcataatctagtgattcatggttatccggacttgttgttcgatcagaagtcgtggattgctttgaacacaggtagttttctgctgaggaattgtcagtggtcgttggatttgttagatgcttgggcgcctatgggacctaaagggccaattcgtgatgaggccgggaaggtattgacggcttatctgaaaggtagaccagcttttgaggcagatgatcagtcatgcattgatctatctcctgctttctcagtaagatacatggatggagaaagtgtttgtggagaatccattctattt

SEQ ID NO: 131214 - DNA, 818 bp, Arabidopsis thaliana
  unsure (1)..(818): unsure at all n locations
aannnnnnnnnnnnnnnnnnnnnnnnnnnnnnnnnnnnnnnnnnnnnnnnnnnnnnnnnnnnnnnnnnnnnnnnnnnnnnnnnnnnnnnnncggccgcgcttctgcttcttctcttccatttccatatttacacttcataatatctcttcacccacttctcttcttccccatttataactcacaaatatatacatactcttacatttatatatcttgggctagctaagtagctatagtaattttctaatatctctttccatttcttgaaatggtcctcctctcaccttaactttataagaatctgaccacctctcaggtttccagtttcttcactttctcgttctctggacactgaatgtgatacatatatagaagaagaaagctataagagattgatcgatggaggtgaatgttcttgcatccaagagaagtcttctcctttttcttcttattgtaagtctctctttgagccagaaggtcagacatatctctgcctttaacgacaccaaaccatacagacaagtcagtagcttgagacttgcgaggatccaaaagcacttgaacaagatcaacaagtctcctgtcttcaccattcagagtccagatggtgatgtaatagattgtgtacccaaaagaaagcagccagcttttggatcatccactctttaagcatcacaagattcagaaagcaccgaagaaaatgccgttgatgaagggttttgatgatgatgttaaagaagcatataattgttttgtgaggttcatgtgtattgtggcacgtgtacatctcgtggtgctctattgttttctatttcta

SEQ ID NO: 131215 - DNA, 539 bp, Arabidopsis thaliana
  unsure (1)..(539): unsure at all n locations
taaagattttcaccattatgctattctttgtagccctagagaaatcatatttttggtggaggatattcccatatgaagatgcccaatgaagagtgcgtctacatttccgttaagaccaatgtggctttatggttccatatgggatgcttcttcttgggcaacggaagacggtaaatacaaagccgactataaatatcaacctttcactgctaaatacaccaattttaaagcgctcggctgcaccgcctactcgtcagctcggtgctatccgttgtcggcttcgccataccgttctggcggattaacccgacaacaacaccaagccatgagatgggttcaaacacatagtatggtatacaattattgcaaagattataagcgagaccattctttaacgccggaatgttggcgttaggaaatattcgatgaaagtcccaaagtttgagagttttaatcacatcaaagttaataccagaaagagcttggtacaattttgggatttttttcatcactattattatgtggttggttgtttcncg

SEQ ID NO: 131216 - DNA, 803 bp, Arabidopsis thaliana
  unsure (1)..(803): unsure at all n locations
cttatagaacagctatgacgtcgcatgcacgcgtacgtaagctgggatcctctaaagcggccgcccttttttttttttttttaattaaaaaaaggctggtttttatggttccaccgggattaacaccaccgaatgggatccttccaaaaaaaaaatgtaaaaattacaacagcccggaggacaacaactgcagcaaaaaggggaaggaaaaaaaaaaggagacccccaaaggtcccaaaaaactcaaagatttacaccaaagagtcttcttaaaactggttcagcatgtgcatcttccttaccaaagcatttaaatcccgaggtttctcaggagctgaccccatcttggagtatcctcatcaaaaatgtaggtcaaaggtgaaactaataccccactgcctccggccgctctaagttgcttcacagagtcgtatagggccttttttggtacacaaatcacgatggcatagtagtcaaccgatacttttccattttgtgtacagtacactgggcttattgtcggtccctgcaatcctgacaatgatggttggctcagcacacgctcagccacttcctgagcactatttcctctcatgtttgcaacaacagtgaattggccatccgcctttagatgggcctccaatctctcaagaatctcgtgtactgggtttagtgccccttttctctcgtttaatgctcttctacttgccacaagtgcncgctggctttccagcacaacaccttctttcattttctttcaagttgttctctttgagtggtataccactacctcacaagatcca

SEQ ID NO: 131217 - DNA, 536 bp, Arabidopsis thaliana
agaatctcgtgtactgtgtttagtgccccttttctctcgtttaatgctcttcttaaaacttgttcagcatatgcatcttccttaccaaagcatttaaatcccgaggtttctcaggagctgaccccatcttggagtatcctcatcaaaaatgtaggtcaaaggtgaaactaatacccccctgcctccggccgctctaagttgcttcacagagtcgtatagggccttttttggtacacaaatcacgatggcatagtagtcaaccgatacttttccattttgtgtacagtacactggccccattgtcggtccctgcaatcctgacaatgatggttggctcagcacacgctcagccacttcctgagcactatttcctctcatgtttgcaacaacagtgaattggccatccgcctttagatgggcctccaatctctcaagaatctcgtgtactgtgtttagccccccttttctcctagagccgaattccgagcttacgtacgcgtgcatgcgacgtcataaatcttcgtatagttgcacct

SEQ ID NO: 131218 - DNA, 428 bp, Arabidopsis thaliana
cgtttttcctctgcaacttctcgttgcctcacactatatgaatcatctgtaatttgtagcttctttaacaaccaaaaagtttcaagattcctatatcctaagcaaaaaatgaagttaccatcgattctttcacttgttgtttcttccatctttctctgcatgagcttttgctcctctctcaattccgacggtttatctctcctagctctcaaatccgccgtcgataacgacccgacccgagtaatgacccactggtctgaatccgacccgactccttgccattggtccggaatcgtcttgcacaaacggccgagtcacaacttcttgtactcttcggaaaaagtctctccggttacattccatcagaactccgtttactcaactcgctaaacccggcttgatctagctcacaacaatttctctaaaac

SEQ ID NO: 131219 - DNA, 519 bp, Arabidopsis thaliana
cgattctattaggtgcactatagaagatctatgacgtcgcatgcacgcgtacgtaagctcggaattcggctcgagaaaagaagcagctttgcttgtacatgagctcagaagcaacttcaactctggcagaacgaagagctacgagtggcgaatttctcagcttcaaaacattgcgacgatgattgatgagaaggagaaatgcatcaccgaagctttgtatcaagatctttctaagcctgagcttgaagcttttctagctgagatttcgaatacatgatcatcctgtatgcttgcaatcaaagagttaaagaactggatggctccagaaacggtcagaacttctgtgacaacatttccctcgtctgcacaaatagtctcagaaccgcttggagttgttttggttatttcagcctggaatttccctttcttattgtctgtcgagccagtcattggagctattgcagctggtaatgcggttgtgctaaaaccttctgaaattgctccagcagcatcttctct

SEQ ID NO: 131220 - DNA, 416 bp, Arabidopsis thaliana
aaatagttgcaacttcaccttttcggatatctcgtcgtggtggtggtggatattgcagcagggcttgtatcccttatcgggggaaatttacttgttatgcaacactatctgctgtggttaaggagcaagcatcagactgtgggggaaaagaagcagcttggcttggacatgagctcagaagcaacttcaactctggcagaacgaagagctacgagtggtgaatttctcagcttcaaaacattgctaggatgattgttgagaaggagaaatgcatcacccaagctttgtatcaagatctttctaagcctgagcttgaagcttttctagctgtgatttcgaattacaaaatcatcctgtttgcttgcaatcaaagagttaatgaactggatggctccagaaacgttcaaaacttctga

SEQ ID NO: 131221 - DNA, 764 bp, Arabidopsis thaliana
  unsure (1)..(764): unsure at all n locations
gatgaaacgaggagtgaagaagagtcgatgaattattctcggagatagaagtaacaaaatcattttcatatcccaacacatttgcttttaaactccaagataaaaagggacgaatgcatagatttatgtgtgaaacacagagtttgacaactctgataacagcaatcctacaaagaatgggggatgacattgagcctgataacttgcctcagataatgtacgaagatgaagacaatgacaaagttgttttagcatcagataatgatcttggagctgctgtagaacatgcaaaatcaataggctggaagggtttaaaattgcatttggactacacagaagaaagagggcacaggagaggtctaagttcagaggatatggactacgaccagtcaaactcatgggcagccgcttacaaaacggttgcagccggggctgctcttgctgctggacttggagttttggtgtaccttaagcgcaactcaaactaacagattcattttggggagatacaaaagtgaatgcttttgcaaaccaatttttaaacctaagcttgtgaagtgtatacctcttcattgattcgtgtttttttttttttttttatctgggggcttatttgtttctcaaccttacacatgaattgtatataaataagtaaacattttgcggccgnnnnnnnnnnnnnnnnnnnnnnnnnnnnnnnnnnnnnnnnnnnnnnnnnnnnnnnnnnnnnnnnnnnnnnnnnnnnnnnnnnnnnnnnnnnnnnn

SEQ ID NO: 131222 - DNA, 531 bp, Arabidopsis thaliana
  unsure (1)..(531): unsure at all n locations
aacaaaaaatgggagagagcaaacgcaccgagaaaacgcgcgttttggtggttggagcgactggatacatagggaagaggatagtaagggcgtgtttggctgaaggtcacgagacttacgttttgcagaggccagagattggtctcgaaatcgagaaagtccaactctttctttctttcaagaaactcggcgcacgtatcgttgaaggttctttctccgaccatcaaagcctcgtatccgccgtgaaacttgttgacgtcgttgtctccgccatgtccggtgttcacttccgtagccataacattctagtccagctcaagctcgtcgaagctatcaaagaggctggtaaccgtnaaaggtnttataaaactttaaatttaagtttattaatgnttgatccggttttgaaaaattntncgggaatcttnaaaaanttnttttaggaaaggaacccccccggggttnantttanaaagccngggggtttttttttttnttncntattnnaacccctttttnggnnaaaaccgg

SEQ ID NO: 131223 - DNA, 444 bp, Arabidopsis thaliana
acccacgcgtgcgagactatcgtcatcgatccttaatccaaattttcgcgctcgattcgtcttttctgtatctcccggagcgccgggacttgggcggatagaggagatgaggagcttgttgttgtggattgcggtggtcgtgtgcttgctatgttcagtcgcggcggtggttcaaagcggatctagcgacggatttgggaaacccagagatactgagactgcgatatcttttctggagtataaattgatggcgccttcggttccaatgatacctctcaccttgattcacggagctgactctaaaggagctgtgtgcttagatgggacgctacctggttatcatctagatcgtggttttggatcaggtgctaacagttggcttatccagcttgagggtggaggatggtgtaacaaccataggagctgtgtgtatcgcaaaacaag

SEQ ID NO: 131224 - DNA, 758 bp, Arabidopsis thaliana
  unsure (1)..(758): unsure at all n locations
nnnnnnnnnnnnnnnnnnnnnnnnnnnnnnnnnnnnnnnnnnnnnnnnnnnnnnnnnnnnnnnnnnnnnnnnnnnnnnnnnnnnnnnncggccgcggattcgtcagatatcttcgatttctcgtcgtttcatcggttccaggtcaaatccagtttgcagggatttgatcgttggtaagctatctttcagcaaacatgcatggttatgaagatgaccttgatgaggaagctgggtatgatgactattacagcggtgatgaggatgagtatgaagatgaggaagaggaggatgaagaacctcctaaggaagaattggaatttcttgagtcacgccaaaagttgaaggaatcaattcggaagaaaatgggaaatggaagtgctaatgctcaatcttcacaagagagaagaagaaaacttccttataacgactttggttctttctttggtccttcacggcctgttatttcctcaagggttatacaagaaagcaaatccttgcttgaaaacgagctacgtaaaatgtcgaattcgagccaaactaagaaaagaccagttccgacgaatggttcaggctctaagaatgtgtcacaagagaagcgacctaaagttgggaatgaggtgagaaggaaagttgagactcttaaggatacaagagactattcggttttgtttttcgatgacgcggagcttcctgttccgaagaaggaatctctttcacgaagtggctcttttcctaattctggttttttgctgatgttc

SEQ ID NO: 131225 - DNA, 1032 bp, Arabidopsis thaliana
  unsure (1)..(1032): unsure at all n locations
aattcttggtccaaggattggggggttgggggccccctcttaatggccgttccacactccatgttcgtcctggaactcatcaccctataaccctaaactctctcaaaccaatcaccaccaaatcacagccatgtaaaaccccagaaataccctccactcccaacgctcttcagctccttaaatcatcctctctccctctcgcagtcatcgcattgcctttcttcctcgacccacaggatgcagcagcagctggaggagaattcggaatattagaagggagatcatttgcgttgatacacccaattgtgatgggaggtttatttgcatacactctttggactggttacttaggttggcaatggagacgtgtccgtacgatacagagtgagattagtgatctcaagaaacagcttaaaccaactcctgtttcccctgatggttccacagccgttgattcttcgtcgcctccttctacgactgagcttcagatccaacggctaactgaagagaggaaagagttggtcaaagggtcttacagagacaaacactttgacgctggctctgttttgttaggtttcggtgttttggaagctgtctttggtggtgttaacacttatcttcgtactggtaaactcttccccggtcctcatctttacgccggtgcaggaataacggtgttgtgggcggcggcggcagcattggtgccggcaatgcagaaaggggacgatacggcgaggagtctacatatagcgttgaatgcagtaaatgttcttcttttcatttggcaaatcccaacaggtcttgatatcgttcttaaggtctttgagttcactaaatggccatagatattaatatttggatgtgttatttatgagtttgtgactctatatatgcaaatattcttcaactttttttgaaaaaaaaggatgatgaattnnnnnnnnnnnnnnnnnnnnnnnnnnnnnnnnnnnnnnnnnnnnnnnnnnnnnnnnnnnnnnnnnnnnnnnnnnnnnnnnnnnnnnnnnaaatcat

SEQ ID NO: 131226 - DNA, 523 bp, Arabidopsis thaliana
  unsure (1)..(523): unsure at all n locations
cccccaacactgatggttctgaancacccacggttgcacaagaggagggaagacgatgaagatgttgatgagactgttgttgaacccaaggacattgatcttgtgatgactcaagccggnttgctcgaggcccaaggctgttaaggctcttaaagagagtagcggagatattgtttccgccattatggaactcactacataggtgttagtgagttccaaaagacttgtgatggttcgtctttgttgcttcatttctgattcggttagcaattttctcgaacatctctgtttctccacttttttgaggctatttctttttacctttctctgagccataaacaatgttgcttcacatctataatttgagacgtttatgtctagtgttgtttttattaaattaaaaaaaaaagaaaaaagagggcccctaaggttataaggttataaaacgctaggagaggaactaaaaccccttcaaaaaagggaccgaaaaaaaaataggggggcccccaaaggatcaaagctt

SEQ ID NO: 131227 - DNA, 373 bp, Arabidopsis thaliana
cccacactaatatatttgactttcttctctgtcttatatattcagctaaaagcagacctagggtttttgtatccgttccagccacggacgacttctccgttctctgaactctcctaaagcctctatattcatcggattgttcatctccagttaaccaatctccagtttggtgaatttgtaagaatgagttaacgaaaacgtccggatccgaaatcatcgggaggtgatctaaactagccacacgagaagaagcttctggatctgattcgaattaaccaatgaagaggcgcaactatgttcgaattgaaacgcgagaaaacgatcccagcaactatagttactcgattgaacgcttctttaccgtagatgattt

SEQ ID NO: 131228 - DNA, 552 bp, Arabidopsis thaliana
aacattttacacaacatcattcaccaaaatgggaaattgcttgggaaccaagaaaacagcgacaatcatgaacatcaatggcgagagtttcaaactgaaaacgcctgtggaagctggtacagtggttaaagattttcctggccacgttctcttggaatccgaagcgggggagcgtttaggaatcagagcggagcccttggagcctcaccaaaacttggaatccaaaaggatttacttcatggttgaacttccaagaacatggaaagagagaactccaagaagggttcggtcgggaatccagatgagtgcgaaggagagattagagaatctgaagctgtctcgtagatcatcatctgatctcttggtaatgaagaagaagacagatgttaatgattaataaagagaagtgagttgcgtgaagtttaatttaccaaagtggtaaattgagaaactgaggtaagagagtgagagtggctttgatttctcaacaagatcacacaacttttgcttcttcacatcccagtggtttgattaataaagaaacatttgctt

SEQ ID NO: 131229 - DNA, 541 bp, Arabidopsis thaliana
gtaattgtcagcttcgacccgaaaccagtcccgggtgactggaatggagctggagctcactgcaacttcagcactaagacaatgagaaacgatggaggattagaagtgatcaagaaagcgatagggaagcttcagctgaaacacaaagaacacattgctgcttacggtgaaggaaacgagcgtcgtctcactggaaagcacgaaaccgcagacatcaacacattctcttggggagtcgcgaaccgtggagcgtcagtgagagtgggacgtgacacagagaaggaaggtaaagggtacttcgaagacagaaggccagcttctaacatggatccttacgttgtcacctccatgatcgctgagacgaccatactcggttgatgacacatttcatgatttgatttctctccaatttgggtttctttttttcccttttgattgcccctttcgaaaataaaaaaataaattttaataaaaaaaaaaaaaaaaaaaaaaaagggcggccggtttaaaggaatccaggctaaggaaggggggaagggaa

SEQ ID NO: 131230 - DNA, 469 bp, Arabidopsis thaliana
gctttcggtgaaggaaacaagcgtcgtctccttggaaagcgcggacccgcagacatcaacacattctcttggggagtcgcgaaccgtggagcgtcagtgagagtgggacgtgacacagagaaggaaggtaaagggtacttcgaagacagaaggccagcttctaacatggatccttacgttgtcacctccatgatcgctgagacgaccatactcggttgatgacacatttcatgatttgatttctctccaatttggttttttttttttcccttttgattgcacttttcgataataaaaaaataattcttattatgggcgtattgttgtgacattttgtgttttgtttcgaataattaaataagcgcttcttaaggtgaaaataaaaaataattagtgatataaaaaaagaaaaaacacaaagggcgaccgctctagaggatccaagcttacgtacgcgtgcgtgcgacgt

SEQ ID NO: 131231 - DNA, 688 bp, Arabidopsis thaliana
  unsure (1)..(688): unsure at all n locations
cgaccacgcgtccgctgtagctaccccaatggctctccatctcttctagataaactcccggtcgaaaccagcagagaaaacgaggacctgtcgtccaaagctatggcaaggttcaacatattgctaagaagtttgtcacagccgatgtcgctcaaagacatagccaagacatgggacgcctgtgctcgggcagtgatctgtgagtacgcacagcaatttggcggtggaactttcagctcaaaatacggcacttgggagaaatatgtagcagcttcctgaatctgacggatctctctcgtcttcaatagcagctctgtgattcacttgcaggttcatgtcaaaactaaagaaaaaaagccaaaaagttttttcctcactttttgttgtatagtataagttgttttcccacacacgtgattgggattttttgttatctgtttgcaaaagcttatgctatattattgaatatatttaaataatattattttaactttattgtatgtattttgtgaatcttgttagtatattcgtcattttcttctaattctgaagcgcaattaccccttttttggggtcttgctgaatgttgtaaaaaacaaaacaaaagggcggccgctctagaggatccaagcttacgtacgcgtgcgtgcgacgtcaagatcttgtagagtgcacctannnnacaatc

SEQ ID NO: 131232 - DNA, 687 bp, Arabidopsis thaliana
gaaaccggggccgacccacgcgtccggatttcttggtcctccgcaggtacttgtggtttccggggtacaagaagaggaacacccttggctgcccaaaccgcagcaggaaatgctattcgagcagtagtggatcaaggtatgcaacgagctgaagtaaggataaaaggccctggactcggaagagatgcggcattacgagctattcgtagaagcggtatacttttaagtttcgtacgagatgtaacccctatgccacataatggttgtagaccccctaaaaaaagacgtgtatagaactaaaaaaaggctaaaagggtttcaagagaaataaacgattcaacgatctgatcaaataaaattactatggttcgagagaaagtcaaagtatctactcggacactacagtggaagtgtgttgaatcaaaaagagacagtaagcgtctttattatggacgctttattctgtctccacttatgaaaggccaagccgacacaataggcattgcgatgcgaagagctttacttggcgaaatagaaggaacatgtattacacgtgcaaaatttgaggacataccacatgactattctaacatagcaggtattcaagattcagtacatgaaattttaatgtggtttttgaacgggatttgtattaaggaggaatctttttgggaccgggaacggttt

SEQ ID NO: 131233 - DNA, 1056 bp, Arabidopsis thaliana
cacgcatcatcagtccaaagataccgcaatttttactaagcgaaacaaaaggaaaggtttgggatggttttaaattccgtttggaatgacccgcttactataagtaaagcagataatcttgcagctcaaatagcaagagacttccatatcggatggtttattcacccaccagtatatggagagtttccaaagacattgcaaaacattgtgaaagagaggcttccaatgttcacggagaaagaagtgaaaatggtgaaaggttccatagattttgtgggaataaaccaatacacgacttattacatgtccgaaccacatcccaccaccaaacctaaggatttgggttatcaacaagattggaatgtggaatttggctttgctaagttggggaagccaataggtccaagggcttactcgtcttggttatacaacgtaccatggggaatgtacaaggccttgatgtatatgaaggaacgttacggcaaccctactatgatcctctctgaaaacggtatggatgacccgggaaacgttactctagctcaaggactacatgacaccacgagaatcaagtattacaaagattacttaaccaaccttaagaaagctagggatgatggagccaatgtggttggatattttgcgtggtcattgctagataatttcgaatggttatcaggatatacttcaaggtttgggatcgtttatgttgattacaaaacattgaagaggtaccccaagatgtctgctcagtggtttaagcaacttctgaaacgaaacaacaaatgatctcaatgtatcaatgccgggtggatttagtttttaaaaaggttggaaatgatgattgaagaaataatggggccggtttagtcactttgtttattataaggggggtgaattgtaacttgaactctctccttcttcagttctttgacttttcaacacaaataaaataaaagtttaagaataaaaaaaaaaaaaaaaaaaaaagggcggccgctctagaggatccaagcttacgtacgcgtgcagtgacgctcatagatcttctatagt

SEQ ID NO: 131234 - DNA, 759 bp, Arabidopsis thaliana
  unsure (1)..(759): unsure at all n locations
ggtggaaaattaaantcgtnaacccggttccccattttcgaaaantccccgnggttccttnaaaggtccccttncgnnnanccaaaagggtggccgatgtgttccccgatgttgagacatatgtcccgtcattggtgaagcaagcttctagccaagcgctcacggtggccacggaggtgcagcgcacccgcgttgtggacactaccaagagcattgcaagaagcgtccgggacaagtacgagccaccggcagagtattacgcagcgacgctgtggcgtttactgaatcaactgccgttgttcccctgaagttgcgcatttagtgatccccacggcgttttactggtcagagaagtacaacgatgcggttcgttacgttggcgacagagactactttggggcagagtatctacccatgattcctattgagaagatctctgatattttggaacaagatcagtgtcgagctgattgactatttactcttctgaagccaaagattccttcttctatagagtatatatactgtatgtactctgtttttctttcctttctgcaatttgctatcccaagagatgttatctttcttcaatatttcattaaaacaactgtgtcttctaaaaaaaaacaagaaaaagggcggcccgtctagaggatccaatcttacatacgcgtgcatgccaaaacaatagctcttctatagtgtcacctaaaatttaaccactggcccgccgttaaacaaacgacgtgatttgggaaa

SEQ ID NO: 131235 - DNA, 537 bp, Arabidopsis thaliana
caaatctgagccgtccggtgtgatataagtttttttaaagagagagagagcggttcgtttggctgcaacggcaccaagtctttgacaatggctgaagatgaaatagtagtcgaagaagagcaatcacagccacaggagattactccagttccaccatcttcttcgtcttcgccttcgttagtggtggaagacgacgatgagatgaagctcaagcacttggaattcattcaagtcgcggcggtttacttcgccgcctgtttctcgaccctctacgagttggctaaagacaacgctggtccactcaaactcggcgtcgagaacattgaagattgcgttcgaaccgtgcttgctccattatacgaaaaattccacgacgttcctttcaagcttctccttttcgtcgatcgtaaggtggacgatgtgttcttcgatgttgagacatatgttccgtcattggtgaagcaagcttttagccaagcgctcacggtggcccacgaggtgcagcgcaaccgcgttgtggacactaccaagagcatt

SEQ ID NO: 131236 - DNA, 516 bp, Arabidopsis thaliana
  unsure (1)..(516): unsure at all n locations
gagagtatctaaaattaagctttgtgtttgatatcgaaatcgaatcgagaagaagagaatcgcaatggaagctgatgacgatttctacagcggcaccgaaaactactccgattacgccgactccgacgaagatgacgccgacggcgagtacgagttcgttgacgacgctgctgatgattccgatgaccttatcttccgtcgccgccagcaaaattatagtgtgttaagcgaagcagatatttgtaagcttcaagaagatgatatttcaaggatttctactgttttgtccatttcgaggaattcatctgcgatcctgcttcgtcactacaattggtgtgtgaccagagttcatgatgaatggtttcctgatgagggaaaggttcgagatgctgttggtttattagagaaccctgttgttgattcccaactgattggggaccttntttggggaatttttttananttcctttttngcaaatgannctcccctttgggcacccttntnggcccnttttg

SEQ ID NO: 131237 - DNA, 678 bp, Arabidopsis thaliana
  unsure (1)..(678): unsure at all n locations
atttaggcgcactatagaagtagcttgacgtcgcatgcacgcgtacgtaagcttggatcctctagagcggccgccctttttttttttttttcggaatgatgtatcatgtatatactcatgcttccattattgacttcttcttcaaaacgatgtatctcttagattttgtgttcttgaggaacaaaagaaaagaagataaagaacaacaacaaaaaaaaggtcatatcttttgtttagtatcataggacttcttgactaagagctaactgatgataattcatgtaatcaatcccatttaaccggatgcaacacaaaatctgctccggtaactcctccggtttattcccctgaattgtgagtccaacatcaagaacacagttctttagcctgtctaaaaatgcttcaaatcctttccgcgatatataactgaatctatgcatatcaatatcaatctcaaagtatttttcacccgagtagaactcgggctggggacgtgaaagcacaggtttttcggtataagcattcatgagtttttctctgcaccattcaactgaggtcggctacattnggaacaaggcccannnntttaaccgtctttaangggtcattcgngcagnagngtngccctactttntaacctcatnactggantcccggatnttcttgaatggggggggg

SEQ ID NO: 131238 - DNA, 786 bp, Arabidopsis thaliana
actctcttgtcaaaagagaaaaatagttcttgtaatggatgattcaagctttatggatttgatgatcgacactgacgagtatctgatcgatgactgggaatccgatttcccgatatgcggggaaactaacaccaaccccggttccgagtctggatctggaaccgggtttgagttgctagcagaatgaccaacgaagcaaatgaaaaccaacaacaacatgaattcaacatcttcttctccgtcgtcttcttcttcttctggttctcgcacgtcacaagtgatctcatttgggtctccagacacgaaaaccaacccggtcgagacatctttgaacttctccaaccaagtaagcatggatcagaaagtggggtcgaaaagaaaagattgtgttaacaatggaggaagaagagatccacatctattgaacgaacatgttttggctgaacgaaaacgtcgacaaaagctcaacgagcgtttgattgctctctctgctcttcttcctggcctcaaaaagacggacaaggcaacagttcttgaagatgccatcaaacatttgaaacaacttcaagagcgggtaaagaagctggaggaggagcgagtggtgaccaagaaaatggatcaatcaattatattggtgaagagatctcaagtgtatttagatgatgattcttcatcttattcttctacttgctctgctgcgtctcctcttggcttcttcttccggacggaggtttcgatcttcaaacaaacaatgcctatgatcgaaacccgagtttcaaacagaga

SEQ ID NO: 131239 - DNA, 530 bp, Arabidopsis thaliana
aaaaaccggggccgccccacgcgtccgcacaataaggatctcacatttctgttattttcccctgaaattttcgcaaaccctaaaaagagagagaaacataaaaatctccattgaaacagattggattgagcaagagaaagagatcatgtatttctaaaaagagagagaaatcctctgatctcctctctgattcgatcgagatcgcatcatttccctaatgatttcaaaaacctaaaacgatctcttcttttttttcgcttcgatctccattgaaaaggatgatttcaaatccaagtttattatcgtacacttgcattgcgaaaggaaccgtagttctcgcggagttcgtttcaaggcaagagccaggaatcgaagctatagctttacgatgcatcgagaacacgcctcctcatcattcaatgttttctcatacagttcacaagatgacgttttcattcgcaatcgacgttgattcctttggttatttctcgatttctgatgaatccatggagaaacctgaatcattctgg

SEQ ID NO: 131240 - DNA, 505 bp, Arabidopsis thaliana
  unsure (1)..(505): unsure at all n locations
gattcagagatcatcgtcgtcgtcgttcagaaaccttcaaaaatggctggaaaactcatgcacgctcttcagtacaactcttacggtggtggcgccgccggattagagcatgttcaagttccggttccaacaccaaagagtaatgaggtttgcctgaaattagaagctactagtctaaaccctgttgattggaaaattcagaaaggaatgatccgcccatttctgccccgcaagttcccctgcattccagctactgatgttgctggagaggtcgttgaggttggatcaggagtaaaaaattttaaggctggtgacaaagttgtagcggttcttagccatctaggtggaggtggacttgcttgagttcgcttgtttgcaaccgagaagctgactgtcaaaagacctcaagaagttgggggccactttaagaagcaatttttacctttngggggggtntaacccngttttcccaaggntttnaaattaacccncggggggnttnaaa

SEQ ID NO: 131241 - DNA, 768 bp, Arabidopsis thaliana
  unsure (1)..(768): unsure at all n locations
cccaccctatcgcccctnnggaaactggtcccnncaggtccggncgggatcccggcgcttagatctttctttaaaaacaaatcagaaattttcttaagagtcaagaaaatttcaagaaccaattctataatgatctcagtggtgattcttactgagctactagtagagtacacggcagctctagctaaactcaccgccgggattcttccacggcgtaccggagatagaaacgccgtaaggatcggtggttttctccttccttcaccttcttcaacgacgtcgatgattcctgatttctcttctcatctagttgatttctgatttgccaacttttttattttggctgatttattcagtttttgacttcagatcctagctcccttctatgatctagtcgatgagaagcgactgagatttttactgagtgtctcgtcgtcttgaatcacgttttcttgaatcgtatagagctttgtagaatctgtatctaatttttatatatagagatgggtgatagttttgaagagctaataaggttactagatctttttttgtttccatgtgatgtgtgtttttatagcactttcacatttgttagaggctatgatcttgatctgtaatttcataactagacctctattttgctttatggtcaatgaaaacttgcgagcatttgttcacaaaaaaaaaagaataaaaaaaacaagggaggccgctctagaggatccaagcttacgtacgcgtgcgatgcgacgtcntagctcttctata

SEQ ID NO: 131242 - DNA, 634 bp, Arabidopsis thaliana
tcttaatcttctctatgttgattatactcaaagaggtcttctcttccccaaacccgacccggaaacccatttcatctctcgattaagaacctctctttcttctgctctagatatttacttccccttcgctggtcgtcttaacaaagttgaaaatcatgaagacgaaacggtgtcgttttacatcaattgtgacggctctggtgctaaattcatccatgccgtagtccgattctgtttcggtaagcgatcttcttcgacctgatggctctgttcctgactgggtcaggattttctatcccatgaacggtgtcaaaagcatcgacggcctctcggagcccttgcttgctttacaagttaccgagatgagagatggagttttcatcggttttggttacaatcacatggtcgcagacggtgcttccatctggaatttcttcaggacttggtcaaagatttgctctaatggtcaacgggagaatcttcaacctcttgctctcaaaggattgttcgtggacgggatggatttcccgatacatattccggtttcagacacagagacgtcaccaccaagccgtgagctttctccgacattcaaagagagagtttttcacttcacaaagaggaatatctcaga

SEQ ID NO: 131243 - DNA, 664 bp, Arabidopsis thaliana
  unsure (1)..(664): unsure at all n locations
gcgaaaatgctgactctactcttcttctctctcggagcgcttcttcttatcgctctgctctgcaaatttgcattcgccgatggagattttcccttgatttcgaagaagcatgtgaagcgtgaggccatacaaggcaaggtcgtctggatcacaggggctagccgtggaattggtgaaattcttgctaaacagtttgcaagtttagatgccaagcttattctctctgctaggaataaagctgaactggatcgggttaagagtgagcttaaaggtaaatttgcaccagaagatgtcaaggttttccctttagatttagctagcggcgaagagtcactcaaacatgttgtagagcaagcagtgtcgcttttccctggagctggtgttgattatttggttcacaatgctgcctttaagcgtccgaaatccaaggcatcggatgcaagtaaggaaactntcaagactacattcgatgttaatgtctttgggacgntatctctgacaaagttggtagctcctcatatgctaaaacaaaggngggggtcattttnttgtgataagcagttctncagggaaggtaccatcacctgggncaggntttatnttctgctttaaaancatgctcttnatgggntcnttccccaggttggttcctgggtntttnnag

SEQ ID NO: 131244 - DNA, 497 bp, Arabidopsis thaliana
tgattctctccggcgagattccgaccgaaaacaaggtaaagtgttgttcacgattgcgaagcgagttacgggggtggtgactcgtccgagtctaaaccagcagttgcagcaagagcgagggataagagtgaaggtgttctccaatgatttagacaaggctactgacgatttctgcagaagaagatgcaatcgagtggaatggagaggctgatcaaagggactcagactcatcacattaagaattcggagaagaaggttctcgtctaggaagaatcttgtacgcagaatcaaatccattgactttgctcgaaaactccaatcaatcctcatcaagaaagtcagaggtttatgagagctgaggtgaagcaagagtgctgctatgttgatcagtactagtatctgtgtgtgatataacacagttttacattttgaacttttgttgagttgatcctatgtggaattggaattttggttttgaaaaaaaatacttattatcc

SEQ ID NO: 131245 - DNA, 602 bp, Arabidopsis thaliana
  unsure (1)..(602): unsure at all n locations
aggaccaatagttaccgatgatgagnctcttatcactatcactttaacccctcagaaatgggctggagaagatatactctctaagtctccattgctcgaagagcattgtgatgctaatctgacatcagacactactcttggtgatgaaaaaccaataattacggatgatgagtcttggatcagtaacagtttaacctctcagaaatcttctgctggaaactcttgggttttttcaggcgaggatagtgtagaagaagttaaagttaaatcgtgcagagatgttgtttccacagaatctcaatctactcaaagttctatggaaagttttgggactgtagtaaaatgtaatgatggccccgttctagctgcacttgggtgttttagggataatgattcaagtcttaatccactcgtcaccaaggttccagatgaaaacatgagatcctctaatgcggataatccagatgatgtgattaataattgcaaatctgacgttactccattggataccaaggacattgcatttcaaaaagaaccctcgtatgttaatgacacagtgcgtgttaggatcatggctgaactgtgcggcatggaatctcgag

SEQ ID NO: 131246 - DNA, 849 bp, Arabidopsis thaliana
cctgttttggggggggacaataaaaacggcccttctatgggcgtttcggttgcctggtaaaagggggagcttagccacggcaaggttcggttttcccagccaaaaaaacaaggaccagttttttaggctgcaagcggtcaagaaaaatactggtgtccaattttttgatattgaaaaataattaacaaaacgggtcaacattttttaagggacattcctcaaatgtacattctgtttgttggagcccaaacggagagttggtggcgtctgttagtgaagacgctgtaaaattatggtcactggagttcaggagattgcatccacgagcttagcaacagtggaaacaagttccactctgttgtttttcaccctagctatcccgatctcttggtcatcggtggctatcaggctatagagctgtggaacacaatggagaacaaatgtatgacggtagcaggccacgagtgtgtgatctctgccttggctcagtcgccttcgacgggagtggttgcgtctgcaagtcatgacaaatccgtaaagatttggaagtagaaatatttctatgttcgtctgaaaagaaaaggaaaaaagaagaaatagcagagagctcaggaactttttttgggtctaattttttttttttttttaatgttacattaataagttggttttttttttaaattgggtttgtttatgtcaaaagcaaagagacttgtgatatttccaatctttgtctaatgatcctacttctttacttcgttgttttgatctctagtgtttagagtgaaagagagatgtaagtaatttctctagaccaactacattgttgaataataatttcttataatc

SEQ ID NO: 131247 - DNA, 761 bp, Arabidopsis thaliana
aaaacccagtattaaaaaaaaggaattgaagtaatgcccaccgaaataaaaaaaaagcctgaagggaaaaagtttatcccaatggccagggcggctggtgttttttgcgttccttgccatggtccaggtccctcgggtgatcaatatttggagccatttgtaatcccagatcccgaagtacgttttatgccacaagctagagaagacgagtgtctaatattggccagtgatggactttgggacgtaatgagtaaccaagaagcttgcgattttgcgaggagccggatcttggcttggcacaagaagaatggagcattgcctttagctgagagaggtgtagtacaagaccaagcgtgtcaagctgcggctgaatatctctccaaactcgctattcaaatgggaagcaaagacaatatctcaatcatagtgatcgacttgaaagctcaaagaaagttcaagaccagatcttgaaacagtgtatgctcgagctcttacactattataattttattatttctcatttattgaaaaaatttccgcaagtttacataaaaataagaagtgaaatgttggggggaagaagaattaagaccttgatgcatagctgaagtccattcctttttctcatggacttgaatgtgtatgtttgttatgtataagaagaatagagaagaaatgtttttactttggagtcttgtaggtggatatgttgttgtaatattggagatgtggcttcaggacttgttaagtgagggttgttt

SEQ ID NO: 131248 - DNA, 533 bp, Arabidopsis thaliana
gtccggaagtcttcaaatagcacagaagcagagacatatagcgggaacgcgtttagtcacagcttgctggctcctttagcttttctctctacacttgcttctctctctctctcctttgggttatccttcttgagatctgtgcttgcgtttcttcttcattcgacgacactttatctcgggagatttcagatttgtcgatttgttcagcaatggcgccaccgattgaggtttctaccaaaagctacgttgagaaacatgtttcacttcctactcttaatgagaggatactttcgtccatgagtcacagatcagtagctgcacacccatggcatgatctcgagataggacctgaagccccaattatcttcaattgtgtggttgagataggaaaagggagcaaggtgaaatatgaactcgacaaaactacgggtctcattaaggtcgaccgtattctttactcatctgtcgtatacccacacaactatggggttcattccgcgtacccttttgtgagggcagtgacccctaattgg

SEQ ID NO: 131249 - DNA, 725 bp, Arabidopsis thaliana
aaggcggtggtgagtactggtgagagtgtgtgtgaaaaaacaaaaaaaacaattcagctgggaaaatgagttccggaatcggaagcttagtgaaggtcatctttaagatcttcgatgtcatcgctggacctgtgattagcttggtttatcctctatatgcatcagtgagggcaatagagtcgaggagtcatggagacgaacaagcaattggttgacgtattgggctctctattcacttatcaaacctctttgagcctcacttttttcagactcctcgaatggatcccattatatccatacgcaaagctagccctaactagttggttggtcttaccgggcatgaacggtgctgcttatctctacgagcactatgtgcgttcattccttttaagcccacatactgttaacgtatggtacgtgccagccaagaaggatgacgacttgggagcaaccgctggcaaatttactccagtaaatgattccggtgcgcctcaggaaaagattgtgagctcggtggatacatcagcaaaatatgttggtcattcggcttttgatgacgcctatatctactaggctagtagctagtaaactacttccggctagttgtagctgagcatcctgatcttagtgtatcgaaatacttgttttctcctctttttctttgttttcgggttttatgaagtttgttgttactgctaaggaattttaatatcaaaataaatgtt

SEQ ID NO: 131250 - DNA, 831 bp, Arabidopsis thaliana
tatcgaaaaggggatcactagaaataaatcagtcgatgtggtttacattaaaatacagaggccgatagtaattctccagggaattatgcttaaaacaaatgttcaatagaaaagaaaaaaagaagtgatttttagcctctcattgtgtgaaggaagaaacaaaaactgttaaaaagaaaccacatcgaggtttagagtcagagtcgttctaagacttacgtggccttcctcttcttccaccggtcttcacgggtggagcctttccgttactggtgcggccgccgcgtccacgtgctccacgaccacgtcctctaccacgagcactctgtttcttgccattggcctcttctccatcttcactgtagtcactgtctgcgtcactaccttgaacttccttctccttgtcgctgttatcttcatcactgtcttgttcagaatcagaggaagcttttgatgctttcctctttttagaagcacctcttttggtaactgcttgttgctttggtgccaaagtttcttccttgacttcttctacactctcttctaatgatcctttcccgtcatagacctcgagctgctcaagcctatcagcgatatctgttctgtcaacaatgaccattgaatggcaaaaaccgcatgccacacccattacatgcattccctcgagcatatccaccttcttaggtgctgcagaggatttttgaccgttggggccataaccaagttctccatactgagcatgaccccaacttatgcaagaactgtcggcaccaacaaaatgatgcatgcttcctgaatccatccaacgcaagttccaaccacttaaatcca

SEQ ID NO: 131251 - DNA, 455 bp, Arabidopsis thaliana
tgcgccaaaagtgagactgatgctttccgaccgggcacttatcgcatagaagaggttatgggagctgtcagtggtgttaaagttacctttattgatacccctggttttcacccactgtcatcttctagcacaagaaaaaaccgaaagattctcctatctattaagagatatgttaagaagcgtccacctgatgtagttctttacttggaccgccttgatatgatcgacatgcgatacagtgatttctccctcctgcagcttataactgaaatctttggtgcagctatatggttaaacacgatacttgtaatgacgcattccgcagctactacagaaggacgtaatggacaatctgtgaactatgagtcatatgtgggccagcgcaatggatgtggttcaacattatatacatcaggctgtgtctgatacaaaactagaaaacccttgtctgtagt

SEQ ID NO: 131252 - DNA, 382 bp, Arabidopsis thaliana
gcggttctctactagatcccatccgaaaaatcctacttgcttcccaaagttgcaatctttgaggatcgttgacatagccataaatatcctctggtggatgtgagtaaggttgcattgattccaaggacatggcgatggggaagtattcccgtgtagacgggaagaaatcatcgagctatggtttaaccattaccattgttctgttactttccctctgtttagttgggacatggatgttcatgtcttcttggtcagcccctgctgattctgctggctactcctcaactgatactgctaaagatgtttctaagaatgacttgagaaaagaagaaggcgatcgagatccgaagaacttttctgatgaaaagaatgaagaaaatga

SEQ ID NO: 131253 - DNA, 551 bp, Arabidopsis thaliana
  unsure (1)..(551): unsure at all n locations
gaccnttttgggaanattaaggngccggaccccngtttttnncaccgttgtgngngntntttcttcatcgggaaggccccgaccctctgttccnctaccaatggcccttggacctaggatgggaccngtggtttgaaggcccaaatgggggagaaggctgcagatgcttaatactttgattcgctagacagaatcttgttgaaagaagctgaaatgtgcatagtgatatttgggggctaatagagtaatagctaatgaggaagtgggtacaatcttgaagaccgttaagtgtgtctctcttttttctttttagataacttttggccacatccgccctccatgatacacacacgctagtttcgaggatcagaatacatacatacctatgtttattatatagatagaacgataatggaacacagagcacatgcctcatctgttgtctttttattattacttattactcttctcctccacttctgtattattacagtctgttaaagtagatatccccttttgtttttttcaaaaaaaaaaaaaaagggcggccg

SEQ ID NO: 131254 - DNA, 789 bp, Arabidopsis thaliana
  unsure (1)..(789): unsure at all n locations
gggaaggttgtacccctggcaggtcccggcccgaatttcccggttcaaccaagccttccggaaaagaccaacagaagggggacgacaattcaaacttgtacggactaagaccagactctctctgacgttgtcagatctgcgacctgctagcgagaggatgcgagaggaaactgtggtttacgagcaggaggagtctgtttctcacggcgggggcaagcacaggatccttgcagagcttgcccgcgttgaacaggaagtcgctttcctggagaaagagttgaaggaggtcgagaacacagatattgtatcaaccgtgtgtgaggagctgctatctgtcatcgagaaaggacccgatcctctgttgccactaaccaatggacctttgaacttaggatgggaccggtggtttgaaggaccaaatggaggagaaggctgcagatgcttaatactttgattcgctagacagagtaatgtgttacatatactagtttcttgctaggatatcattttacatgggatccaaaatgggggctgtagcagagaaaaagcgtacagattaatgagcattggaattgcatagaacggcttagtcgcacctacgtaaacagtattatatgtatatgtaatgtatgggatccggatctgacatacgagtaatggagtttcaggcttcccgctcnnnnnnnnnnnnnnnnnnnnnnnnnnnnnnnnnnnnnnnnnnnnnnnnnnnnnnnnnnnnnnnnnnnnnnnnnnnnnnnnnnnnnnnnnnnnnnnnnnnnnnnnnnnnnn

SEQ ID NO: 131255 - DNA, 414 bp, Arabidopsis thaliana
  unsure (1)..(414): unsure at all n locations
gcgtccgactgtggtttacgagcaggaggagtctgtttctcacggcgggggcaagcacaggatccttgcagagcttgcccgcgttgaacaggaagtcgctttcttggagaaagagttgaaggaggtcgagaacacagatattgtatcaaccgtgtgtgaggagctgctatctgtcatcgagaaaggacccgatcctctgttgccactaaccaatggacctttgaacttaggatgggaccgggggtttgaaggaccaaatggaggagaaggctgcagatgcttaatactttgattcgctagacagaatcttgttgaaagaagctgaaatgtgcatagtgatatttgggggctaatagngtaatagcctaatnaggaagtngggacaatctttaaggccgtaagggtgcccttttt

SEQ ID NO: 131256 - DNA, 549 bp, Arabidopsis thaliana
ctgtaattataataatctccgttatcactgccgggtaaatatgtcggagattcgcacagattctcagtgtgaagagtagaaaaacatcgaagatgcggattatgcggtggaggatggttattaaaatagataagccggtgcaaaaattttgggctacgtaaaggctcacagtgggatttcaggttggtggtaaaaggatcagactggagtaagagtgagctggagggtatggtttcaatagcacccgtcggtgcgtgacgtgatcgagtgggcggtttgtggccgttggataattttaacgtctagtggttgggattgtacaggtggcgtgaaaatgttgataatgcatatgtgaatataaataatagtggtggtggacaatattcatcccatgtggacaccagaatgtgaatacgcaatcagataatattatgtatgatgattatgatttcaagggaaaacacaaaagggcgaccgctctagaggatccaagcttacgtacgcggcgttcgacgtcatagtcttctaagtgtcacctaatagaaatcg

SEQ ID NO: 131257 - DNA, 506 bp, Arabidopsis thaliana
  unsure (1)..(506): unsure at all n locations
ccgttnccaccctcttcccccaggatttccatcgttncccacgttancccccccgacatttttggntganaattcccccatnttcccncggtaatctgtccggcttcccacaatcctggtgggaagagcagaaaagacgaaagatccggattatccggtggagacggtgactgagatagctaccggcggtgcccagagatttgggctacggcgacggccacaggcggatttgaccgttggtggtgagaggatcagacggagcaagagtgagctggagggtatggcttcaatagcagccgtcggtgcgtgacgtgatcgagtgggcggatcgtggccgttggataattttaacgtctagtggttgggattgtacaggtggcgttaaaatgttgataatgcatatgtgaatataaataatagtggtggtggacaatattcatcccatgtggacaccaaatgtgaatacgcaatcagatcatattatgtatgatgattatgatttcaat

SEQ ID NO: 131258 - DNA, 643 bp, Arabidopsis thaliana
ctgatctgactccaaagagcgccctggatgcatctttgtcccctgttccttacatgtttgggcgagtgagaaaaacaggtgcagttctggagaaagtgattgagagaaggcaaaaaaggatgataaagaatagggaatcagctgcaagatcccgcgctcgcctaagcaaccttatacgatggaactggaaccaaaattccgcaactcaaaagaatttgaatgaagagttgcagaagacaaccaagttgaaatcatggaaaagcagaaaaatcagcttctggagcctctgcgccagccatggggaatgggatgcaaaaggcaatgcttgcgaaggacattgacgggtccctggtagagcttataatggcgtctaaggaacccaacaaagcgccgaagttatagaacaactcagaagatagaaagctagctttgtacgtagtttaggcaggttctgtgggtgattgtaaatcttgaagtgtggcggatttgacagagatagataaacacatatctgttctattttcctaaatcttttggttttatcttcctgatgtaatggatctttatcatttgtcttgaacatctttgtgacttaaccagagtgaatttatcttgtatcttgtctgcaattttttctttagcc

SEQ ID NO: 131259 - DNA, 827 bp, Arabidopsis thaliana
  unsure (1)..(827): unsure at all n locations
gcgtacgcttgctcaacgttaccagcctcatgagacaagtttcatagacacatgcaacggaagtctctaggcggcgaagcacgtgtaagagaggctccgattccagaaaacgtagcaaagcttcaactagcggaagcaaaaatgcaagagctaaaagcaaatatggcagtccttggtaaagaagcaactgctgcattagccgctgttgaatcacagcaacatagactcactttccagaggcttgtggctatggttgaaggggagaagaattatcacttaagaatagcagccatcctcagtgacattgaagccgagatggtaaccgagaaacaacacaaagaatctgctcctcctgcgattccaacagagaacggctcagagaaaacgtcatactttcttgctgaagtgattcatccattttccgctgcttcagagaaagagttagacttggacaaaggagattacatcgttgtccgaaaggtgagccaaaccggttgggctgaaggagaatgcaaaggcaaagctggttggtttcctatggcttacattgagaagcgacagagacttcccactaccaactttgctgctgaagtttactgagtctcttcttcaaagatttcattttttcttacatttgtgtctgaaaactttgtttcagttatgtcctgtccccaacaaactactactcttgttcatatttgttgatccaaaatagagtttccctccaaaaaaaaaaaaaaaaaaaaaaaccaaagnnnnnnnnnnnnnnnnnnnnnnnnnnnnnnnnnnnnnnnnnnnnnnnnnnnnnnnnnnnnnnnnnnnnacct

SEQ ID NO: 131260 - DNA, 608 bp, Arabidopsis thaliana
aagaaacttgactgctaattgctaaaggtaatgcttctgagaattggaagctaatgaagctggtcgtcaatagcaatctgctgagaaactctattttcttcaagatctccgcctttgttttgatctccgttgcttgtttcttcctcggtaagcattggtctgaggatggcttccgccgtctcatcttcttctccgccgagccttcccgatctcccattgtcgcactctcacctgatttcggtataacccttctcatctctggtttgatctatgacagtcacccgggttgtgcctccgtctttgtgtccgccgccgccgccagattctgttgagttgaaggtgtttggaatcgttaatgagaacggaacaatgtctgatgagtttcagattggtgattacgacgttgagtcggcggggacgttggggaatcagacggaattcgagagtagcgacgacgatgatattaaatccaccacagctagagttagtgtgaggaaatttgagatttgttcggagaatatgactgagtacattccttgtttggataatgtagaagccatcaaaaggcttaattcaacggcgcgtggtgagcgattcgaacggaattg

SEQ ID NO: 131261 - DNA, 535 bp, Arabidopsis thaliana
aggtattgatgtagaggaaatacgtggtgaaatcgaagaaagctgcaggaggatcaatggagagtttgggaaacctggatatcaacctatcatatatattgatactccggtttcgattaatgaaataaatgcttattaccatattgctgagtgcgtggtcgttacagctgttagagatggtatgaaccttactccctacgaatatatcgtttgtagacaaggtttacttgggtctgaatcagactttagtggcccaaagaagagcatgttggttgcatcagagtttattggatgttccccttcgcttagtggggctatacgcgtaaacccatggaacgttgaagctactggagaagcactaaatgaggccctctcaatgagtgatgctgagaaacagctacggcatgagaaacatttccggtatgttagtactcacgatgtagcttattggtcaagaagtttcttgcaagacctagagaggatatgtgtggaccatttcaagaaaaggtgttgggggatggggattagttatggt

SEQ ID NO: 131262 - DNA, 474 bp, Arabidopsis thaliana
aaaaccgggccgagcacgcgtccggaaatgtcaacggcaacggccccccttttcctcccccccttccttcttccttcttctcggttcttcatcttcaggttccgatggcgatctctgagctattcgacgactggtgccagaaacatggcaaaacgtacggttcagaagaagagaggcaacagaggattcaaatctttaaagataatcacgacttcgttacgcaacacaatctcatcactaacgctacttactctctctctctcaatgctttcgcggatctgactcaccacgagttcaaggcttctcgtcttggtctctctgtttccgctccgtcggtgataatggctagtaagggacagagtctcggtggtagcgtaaaggttccagattctggtgattggagaaagaagggagctgttactaatgtcaaagatcaaggaagctgcggggcatgttggtcgttctcggcgactg

SEQ ID NO: 131263 - DNA, 477 bp, Arabidopsis thaliana
cttttgtggcggctttttttcacgaactgctttaaaccctaaaaactccaacctttgttctctgtgtaacaacaacaacaacagtgcgggaagaatctcacatcgagggggttgaaatccaaaacaaactcgaagttgctcctgcatggatttccgttcatccatctcagaaatctgtcgctgtcgctgtcggctcggatcttcgtattttcgatcttatagagaattgcccagttagtttggtggatgaatctgatgggcctatccgtaaggaatccattagagctattcggttcagtacaagtggcaagctctttgtgtccgcaggcgatgacaagcttgtcaagatttggtccgcagattctttggcgctgtcttaacacagtatgttctgagaaaagagttatgcgcagttgctataagtagtgatgactcacatgtttgctatgcggacaagtttggtgtttgatgggtgat

SEQ ID NO: 131264 - DNA, 567 bp, Arabidopsis thaliana
  unsure (1)..(567): unsure at all n locations
aaaagcaaaaaataaaccctaagaagcttgatctcatcgattatggcggattttgggtatttttcaggtgcagacgattcagcagtggaggagctaatttcgcaagccaaggagctttctgatttggagcaagtagctgctatcaattgttctggattcaccgattctactcttccagatgatctcgaatctcgcttccgtcgcctcaaatctcttccagctgctccacgacacgtaccggtatcttcatcttcttcgatgaataggcagaagcctctctcacattccaaaagcgtgaatgtgaatttgtcagggaatcgaagaaatccaggtaaaaaaactggctctgtgagtttatcctgatgaagattcgcagtaatctctcgaggaaaaaaacgggatcctggattttgaaatcgaggttctcaaagctgagcttgtccttaatgggagtggggcatttctcagattcttgggaacatcagtnggggtaaaatcctctngccagtnaacaacaaacgggggaggagcttcctaaagggnaccggggattgnttnccctnttta

SEQ ID NO: 131265 - DNA, 497 bp, Arabidopsis thaliana
  unsure (1)..(497): unsure at all n locations
cgtccgctccaccaccaccatactactctccttctttttattagtctacaagtctcccccaccaccgtgcgtntacagttctggacgagcaccatattattctccttctcctaaggtagtctacaagtcttctccaccaccgtatgtctacagttctccaccaccaccatactactctccttctcctaaggtagtctacaagtctcccccaccaccgtacgtctacagctcaccaccaccaccatactactctccttctcctaaagtagtttacaagtctcccccaccaccgtacgtctacagctcaccaccaccaccatactactcaccttcccctaaggtagactacaaatctcccccaccaccgtacgtctacagctcaccaccaccaccatactactcaccttcccctaaagtagactacaaatctcctccaccaccgtacgtctatagctcaacaccatcaccatactactcacctttcccgaaggtagact

SEQ ID NO: 131266 - DNA, 922 bp, Arabidopsis thaliana
ttaggtaacctatagagaatcttgacgtcgcatgcacgcgtccgtaagctgggatcctctagagcggccgccctttttttttttttttggaatacaatcttagggtgggttcgctttattaaattccattgcgtctttgaccatcattattactcacaagtgtattttgcaagtaatcaacatttattagattgatcacactcacacatgtggcattacccattattagattgatcacactcaacacaattctgaattctgttccgatttccatagaaatccttgatttagcgaaaaaactaaacccagatatctgaggtgcagtcgccacccggatatctcatctcgtgagcgagcgaaggaccatccggttcggtcccaaagtcgacgaagaagttagggtttatggagagaccacctttatctgtatcaacatctatctgcaacatgtgtgaccctttctccacaagttccgggtaaaactgtctgtcccaaacactaaacagcgagttcgtcacgtacaatcgcttcccatctaggctcagctgaaacatctgaggacctcctcttagacgctgacccttgatcttagggacatcaaactgaaatgcttttccttcttctcctaaggccaagacaagacttcccttttggactagcccgcctacatgtatttgaccagttaaaacaggggttttcgggtcctcgatgttgtactgacgaatatctccatgaagccagttggaacaatagaggaatcggtcgtcaagtgagattagaaagtcggtgataagccctggcatttctgggagaatccagttttcaactttcagaggttcaactgatatagccacctcgtggctccatgtttcatcatcgttcttgaaaaatcttactaaagtactcgacaacgcacaccctg

SEQ ID NO: 131267 - DNA, 767 bp, Arabidopsis thaliana
  unsure (1)..(767): unsure at all n locations
cgccaatacaggatcagactgacttctcaatagacaaagctcctgatggggtgacggaggggaaatcaactcggagggggccaagttctcggtttagccgctttggtattggcatattgaagaacactgtagggaaggtcttcccatctcgaccatctaatgaggcaaaactgggtaatgagaatcaattctactatgacgataacctaaagagatgggtggaaagaggtgtggaacccccagctgaggaagctgcactacctcctcctccaacgtcagtcccattccgaagcaactcattggggcatgaaaacaagtctgagataaagaacgagatgtctccatctagtgggagctggagtagtggcagcccaactccgtcagagaattctccgggaatcccaccagtctcacagggctcaaaccaattctcagctcgtggacgtatgggtgtgcgtgcaaggtacgttgacacctataatcaaggctcctcgagcatgtatcagtcacctcccgtgcaatcttctaaaccaccgattcctgcgaaagaaaattctttgtcccagcagcaccggcatcgtttgcaaacgaccaggtaatggaatcggttagtgctgaaaccagacaagagaactcaggagatgaagcagtagtaggctctncaggngntncaggnccaagncagggttcattccagtccccgacaccatcttcaattgcaatgcagngnttttcaagtgtnggcaacatcagaagnagttggtcag

SEQ ID NO: 131268 - DNA, 704 bp, Arabidopsis thaliana
  unsure (1)..(704): unsure at all n locations
cggattatcgtgtttgggagtggcatggtcatatcatgttgtttgatgaanagagggggtgcacgcctgagtatatctacgggaattacttcgagaggttgcctgtgaagcttcctaataaccgcccgtgtggagaaggagaagaagaaggagatgaaagaagaggaggtggagaatttggggcttagagagttgatcgatggtggtgacgctgctcctggtaggattcttcataggaacaacatcaacatcggttcctcaagggtctaagttcctaagagcgtcttggtagggagaggtcacattgttcgggaagatttcagatgtgtgaacaactcgcgacaacaaaacataaggtgctggtgggtctacgggttctattccgttttatttaaaccgggaaatccatgggtgaatctgttttctttaagaaattcatctgaagttgtttctgaaccaaatttcaatactatgttaatgaagagagaaaagattcaagtgcatggtcatcgaactcggaagctttcaagtttccccatgtttgtttattttgtgtcttaaatcagaatcatatgtttgctcaaaaannnnnnnnnnnnnnnnnnnnnnnnnnnnnnnnnnnnnnnnnaaanaaagnnnnnnnnnnnnnnnnnnnnnnnnnnnnnnnnnnnnnnnnnnnnnnnnnnnnnnnnnnnnnnnnntca

SEQ ID NO: 131269 - DNA, 1082 bp, Arabidopsis thaliana
  unsure (1)..(1082): unsure at all n locations
gctggtacgcctgcaggtaccggtccggaattcccgggtcgacccacgcgtccgcttcaagcttcaaagaggtcttaagctattggcggccgagaattcttcaaacgctattaacgtcgatacgagtctcgattccgattcaaaacctaaccgtgacgctaatgatatgactgatcatgactcttcttctaaagcattggtaatccctgctcccgccgtttgtcttgtacgtttcgccggagatgctgctagtggcgcattcatgggctctgtatttggctatggctctggattgtttaagaagaaagggtttaaaggatcatttgtggatgcgggtcagtctgcaaagacttttgcggttttatctggagtacacagtttagttgtttgccttctaaaacaaatacgaggcaaagatgacgccattaatgttggagttgctgggtgttgtactggccttgctcttagtttccccggtgcaccgcaagcaatgctacagagttgtctcacttttggtgccttctccttcatccttgaaggactcaacaaaagacaaacggctttggctcactctgtctcgtttagacaacaaaccagaagtccccaacatgatttaccgctgctctcgttggctatcccaatccatgatgaaatcaaaggagctttctcttctttctgcaactccttaacgaaacccaagaagctcaaatttcctcatgctcgttgatttttttcctactttattcttttgcctttttgtagattttgaaaacagattgaaaaatggtttttgatgcatgagccaatgagaaaaaggtgttttacctttatttgttttcataatatagtttctaggactaattaagtccagaactaattatggaaatgtcaaattgaaatttcgaaatctttatatggtcgtctctaaatagtaattgatcattgtcattttaaaaaaaaaaaaaaaaaaaaggnnnnnnnnnnnnnnnnnnnnnnnnnnnnnnnnnnnnnnnnnnnnnnnnnnnnnnnnnnnnnnnnnnnnnnnnnnnnnnnnnnnnnnnnnnnnnnnnnnnnnnnntcat

SEQ ID NO: 131270 - DNA, 792 bp, Arabidopsis thaliana
ggtcttcagctgtgtacagaatcaagtttccaagagagaaagagagtaaaagcaaattaacaaaggaagactctgattcaccgagaaggttttggcttaaagatgacgaacactcgcgcgatctacgccgtcatcgcgatcctggcgatagtaatctcagccgtggaatcaaccggagacttcggagattcgctagatttcgtgagagccggatcttcatcgctcttctctggatgcacaggatcgatcgcagagtgtatagcggaagaagaagagatggagttcgattcagacataagccggcgtatattagcacagaagaagtacattagctacggtgctatgaggaggaacagtgtgccttgttcacggcgtggtgcgtcgtactacaactgccagcgtggagctcaggcgaatccttacagccgtggatgcagcaccatcactaggtgcaggcgttgaagaagatgagtcacttgaatttcctattttgcccctttctttttgtgtctctgtctctcttctcgattttcatttttttaattatttttattttccgggatatatgggtttgattttacacattgaaaaaaaaacttctactatagtctttgatttgaaaggaaaaaaaacgaaattgcttctttgtttttttttctggttgttgtctatatacataaataaaaaattcaaagttgcgtagattaaaaataaaaaaaaaaaaaaaaagggcggccgctctagaggatccaagcttacgtacgcgtgcatgcgacgtcatagctcgtctat

SEQ ID NO: 131271 - DNA, 724 bp, Arabidopsis thaliana
  unsure (1)..(724): unsure at all n locations
tagagagttaaagaagaggagataaaaatcattcgtgttcctgtagtgagattgaggtttggagaagtagcgggagcgagttccgtcgttgttttaccggtttgtaaagcagaggaaggagaagagaagcttcttgaagcaccgatggagtttgaaagtggaggagagtttggtgtagtggaagcagagaaagattggagtagatgggtggttttaccgggttgggatcccgtggtggcgattaggaaaggaggagtggcgatttcgtttagcgatgatagggaagttttaccgtggaacgggaaaggagaggcgataatggttgtgatcgatagggaaaagaagacggtggaagctgataatggatactactatcttgttgtggctgatggtgggatgaagttggatagaggattggtgttgaaggagaaaggagtgaatgagagcttaggaatggttgttttggtcgttaggccgccgagagatgatgatgatgagtggcagataaatgatgaagattgggattagaattcaattagaagaatagttaaacaaatacttatatgcttttggttttggcaaatatgtaattttttgtttgattgctttttatctcataaatgtttctttcaaaaaaaaaaaaaaaaaaagnnnnnnnnnnnnnnnnnnnnnnnnnnnnnnnnnnnnnnnnnnnnnnnnnnnnnnnnnnnnnnnnnnnaacgga

SEQ ID NO: 131272 - DNA, 552 bp, Arabidopsis thaliana
  unsure (1)..(552): unsure at all n locations
taacccttactanaggggacaaaagctggagcttcaccgggggggggggcggtttagaattaggggatcccccgggcttgaagaatttgggggccggaatcttccgctggttcttagttgggctaataattggccaaaaaccattttatggacggttcaggaattccgttcaagccttccaaaggaagaagagtggaaggtaaggacctttacctttctgtttagaagccttaaggaagactctgaggtaaaggaccagcctgaatggcagccaccaggggttaaggaggtcagtgataaggatctgttggtggaaacaaagatggcgaaaatgggaccggtgagtcctgtggagaagattgttagcatggagaataccagcaggtttattgaaaaggatgttgaaggggtttcatgggaaacagaagaggctaccaaagctgctcctacaagcaactttactgtcggatctgatggtcctccttcattccgcagcttaaagtgggggaggggggaaagtggttctggaagcctttcactggttgcatggtt

SEQ ID NO: 131273 - DNA, 529 bp, Arabidopsis thaliana
gtgcttcaacaacacatgcgtctctcagaaatctttccgccccagatccatctctctctcaagcaaacactcttaaacccttttgatttctcctcataattattctcgaaagctccattgtttattagttattcctgcaaattattcaattttaccattttgcttctggtttttttagtcgtctctctctctcttcaatctcttgaaaggtacttgctttatgcacaaaagttataatcctgggtttttttgtactacactgtagttattaatgcctgaacaatcttcttgatctgggtacattttgcagattgagtaaaaatcattccttttttttctgggttatatacactgttcttcgagttctagggttccttaatttcgtttctcctttttggaaagtctctgactttatgtgttttaatgggtctagttttttcatgtggtccatttaattagctagtggaagaagatggatgaattgtgtaaagattatttttggttctaagtatcaaaaaaatttgggggt

SEQ ID NO: 131274 - DNA, 416 bp, Arabidopsis thaliana
  unsure (1)..(416): unsure at all n locations
gcgtncgcatcgtcatagaaatcctgctctttcttcgattctcgactaagctttgaaatctgctgggtggttgaaaatggaactacaagatgctatgaatgatgagaatgagaaagcccctgaggcttcggtggttcagaatgatgaagtttccgggaacaatggggatgtagtggttgaagctgaggaaaaggatgggaatgaggttgtagaacccgttgattcaggaaaaagtaaggctgatgacgagtttgttgaaagtctgttggataccaatcaggatttggctaccttcaaaataccggtagaggaaaatgattcggaaaatgtgactgttgtagatccttctcttcctgcctctgttgatgcatcttcttctggaatgaaaaagccttatggtttactattcgtattct

SEQ ID NO: 131275 - DNA, 545 bp, Arabidopsis thaliana
cgaaattcgaccgaataaagagctggtccggttgcgaaggcgttcatgccttacccactagggagagatccttcctcactcccaaagcttgatccggtatctcatcagctatatcgatagccgcccaattgctcggcgctacagagtcagggcagtgatcgagatgtctaatctcgacgaagcctcgaagctctcgcggctagctgtcttgaacggatttctagtcgacagagacaccgtcttcatctgcaattccgtaatcggcgccatgtgtagcgccaaacggtacgacgatgccatctctctgttcaattactttttcaacgagtctcagactcttccaaacacgctctcctgcgatctcatcatcaaagcacactgcgaccaaggtcacgtcgacgatgctcttgagctctaccgtcacattttgctcgacggacgtgtagctccagggatcgagacatacatgatactcgcgaaagccttggttgatgctaaaagattcgatgaagcttgtgttttggcgagatccatgagctgttgta

SEQ ID NO: 131276 - DNA, 748 bp, Arabidopsis thaliana
gcgtttcctgttgaggaagtgcacaaaatctgtgtctttgacataagaatggcaaatgcggatcgacatgctggaaacatattgaccgggaaaagcgaagaaggaaaaactcttcttattcccatcgatcatggttattctttgccccagaattttgaagattgcacatttgagtggctctactggccgcaagcgaaactcccgttttctgcagacacccttgtactacataaactctctagactccgaacaagacattgcgcttctgcaactccatggctggaatgttcctgaagctgtctcacgcactctacgtatctccacgatgctgctgaagaaaggcgttgagagaaacctgacgccatatcaaataggaagcgtaatgtgcagagaaacggtgaacaaagactcagcgattgaagagatagtgagaaaagctcataactcggtgttgcctgcgtccagcgaggctacggttcttgaagcagtatctgtggccctggattgttgtctggaccagctaactaagttaccagttttaaggacaatataaagtttgggtttaagggaaggaaaaggaaaagaagtaaaggatctattaaggttggtttcggtgaaaaaaacggtgataggcttcttctggaagcggcccgcgaattcttgcaagcccgggggaattccactagttctagaacggccccccccccggtgagctccagctttgtcccttaggaggttattgtagctg

SEQ ID NO: 131277 - DNA, 425 bp, Arabidopsis thaliana
  unsure (1)..(425): unsure at all n locations
tgtgcagagaaccggtgaacaangactcagcgattgagaagatagtgagagaagctcataactcggtgttgcctgcgtcaagcgaggctacgtttcttgaagcagtatctgtggccatggatcgtcgtctggacgagctaactaagtaaccagtcttaagtacataataaagtttggttttatggtatgtatatgtatatgatgtaatgtatctattatgtttgttttcgttgagaaaaacgttgataggctcttcttggataattttttccttccatgaaagaagcctttaagcttttgtgttttgcggccgaaactgataaataaancgttgttgctaaaaaaaaaannnnnnnnnnnnnnnnnnnnnnnnnnnnnnnnnnnnnnnnnnnnnnnnnnnnnnnnnnnnatggaagtgcaattca

SEQ ID NO: 131278 - DNA, 1073 bp, Arabidopsis thaliana
  unsure (1)..(1073): unsure at all n locations
tatcataactcaccaaccaatcaactaaccatggattccgagatcgccgtcgactgctctccattgctcaaaatctacaagagtggccgcatcgagcgactcatgggtgaagccaccgtcccaccttcttccgaaccacaaaacggagtcgtttccaaggacgttgtttattctgccgacaacaacctatccgtccgtatttacctcccggagaaagccgccgccgagaccgactcgaaactccctctcctcgtttacttccacggtggaggattcatcattgagacagctttctctccaacttaccacactttcctcacgacgtctgtctctgcgtcgaactgtgtagcggtctctgttgattaccgtcgtgcaccggagcatccgattctccgtcccgttcgatgattcttggacagctctcaaatgggtattcacccatatcactggatctggtcaagaagattggttaaacaaacatgctgacttcagcagagtgttcctctccggagacagtgcaggagcaaacatcgtgcatcacatggcgatgagagctgcgaaagagaaactcagtcctggtttgaacgatacaggaatctctggaatcatcttgcttcatccttacttctggtcgaaaacaccaatcgacgagaaggatacgaaagatgaaacgttgaggatgaagatagaggcgttttggatgatggcaagtcctaatagcaaagatggaacagatgatccggttgctcatcgtggtgcaatcagagtcggtggatttgtctgggttgggttgtggtaaggttttggtaatggtggctgagaaagatgcgttggtgaggcagggttggggttacgcggctaagcttgagaagtctggttggaaaggagaggttgaagtggtggagagtgaaggagaagatcatgtttttcatttgttgaaacctgaatgtgataatgctattgaagtcatgcataaattctcagggtttattaagggagggaactagctttgtgctctctagagatattggaataatttggtactacatnnnnnnnnnnnnnnnnnnnnnnnn

SEQ ID NO: 131279 - DNA, 623 bp, Arabidopsis thaliana
gcacgcgtacgtaagctgggatcctctagagcgggcggcgaaggggtttttattgttgttttatgatggctcaacaacaaactttccattcacccatttatagatacacagtctagctcaacagagcttttaacccaaattggtacaatagaatacaactttagatcataattctcaaaagaaagagattccttagctattctatctgccactccatttccttctcggcttgtatgcacaagcataaaatcctcaaacttgctaagtagatactttatgtcttggataattgaattgagacttgacaagcataactttcatgtaaccaaagacacaagttgctgagaatccacctcaaaaatgatcttcctataattgaatcgggataatgacagcacagcccatctaagagcctccacttctacttccagcacgcttcttacttttaccacagctcttgcacctaaccataacaccttccctgtatgatcgcgaagcacccaccctaagccacattttaatccttctgtcgtcttctcgcagccgtacccttctgtcgtcttctcgcagccgtacggacgcgtgggtccccccgggaaaaccggaccggtacctgcaggcgt

SEQ ID NO: 131280 - DNA, 517 bp, Arabidopsis thaliana
  unsure (1)..(517): unsure at all n locations
gcgcaaaaaacctagccagaacaagccctcgtgtgagcgtggacatgtctaacatacaggttgagacaaaggcgagtgcctcggcgtggtctatggtnattgtgactggcagtctacgaggcgaaatcagaatatttcagaattttggatttccagttcgtctatgatgcaaggagaaggttttacaatatcaaaatcctaaggcaaagtgaaattttcccttagtaaaaccatctcctgtcaaaagtgtatagattgagagaaggtttggttcatccactgacttctctcgttttttttttttaccacgctgcttttatttatctgatttgttatctctaaaattcaaatctctagcaaatatatataatgttatttttaagaaagattcaaataggcagaaaaagaaacttcatataccaatatagtttgcttcgatgaaagtctgtgctattcaacttgaagtttgtagaatttgtctctgatattataactcttcaaggagagaatatatggt

SEQ ID NO: 131281 - DNA, 698 bp, Arabidopsis thaliana
cgaatacggtaacgtatagccatttgattcacgggttttgtaatgaagatgattgggaggaagcgaagaagttgttaagattatggtgaacagaggatgtaagcctgatagtgagtgttacttcactcttatatattacttatgcaaaggaggagactttgagacggctttgagtctttgtaaagagagtatggagaagaattgggttccgagttttagtatcatgaagtcgcttgttaacggactagctaaggattcgaaagtcgaagaagcaaaggagcttattgggcaagtgaaagagaagttcactagaaacgttgagttgtggaacgaagtcgaagccgcattaccgcaatgaatcaaaagatagttcccgagatcggtattttcaaaattttacgaattttctctcttcatttgtcagcaatgaaataagtttatatcttcttagaagatagtaatcttttgctcatcatggtagctatagattaatggtttatcttgttagtttttggatttggaatcagagagatgttgagcagtttatctgtaagatttggtcaaagcattgtagcaatgttaagtgtcttcctatgtttatattatatagtatgacgcctatatagggcggccgctctagaggatccaagcttacgtacgcgtgcaggcgacgtcataatcttgtatagtgtacctaa

SEQ ID NO: 131282 - DNA, 392 bp, Arabidopsis thaliana
aataaagagatcgatgtactctttcgaatctccattagaggcgttggcgtttgaatacgctagcttaggtgttttcgccggcgtcaacaacgtctggacgtggatcgccgtcgtgactgccgctgtcagcttctggaggatcagagtcacatccataggagtcggagacggccatgcatgtgtctttgatagtagaattaaccggttctaaatctgaaaacgaatccggtcgtctcgaaccgaaatcaataaccggtccggtcaaagaaacggttgcacgagtgaaggaaacggttacgaaaacggagccgttaatatgcgatgacggagtgacaaaggggaagcttgcgatgtgctacgaggtagacgttgacgttgacggtgggaggtgt

SEQ ID NO: 131283 - DNA, 761 bp, Arabidopsis thaliana
  unsure (1)..(761): unsure at all n locations
nnnnnnnnnnnnnnnnnnnnnnnnnnnnnnnnnnnnnnnnnnnnnnnnnnnnnnnnnnnnnnnnnnnnnnnnnnnnnccacgcgtccgtacggctgcgagaagacgacagaaggggggggtcaaaattttaacaaaaaggaggggaaatttgtgtctgaaaaatgtggtgtgcttgctatcatcagccattacctgccagttccgtcgtgttgaatcagcaggcgaagcaagaagagagtctgagaagaaaacaagtgttcttcttcttatcctcatcatctccttcaagcttaagcaccaaacatcaatggcaaatcagtaattatcctaaaaatgggttcagactaaaaccaaaagcgagtgtgttgcctccttctgagtctggtgatatcactacattcctctttgttagtggagcaatgatctccatgtatttggtaaccaattttctggttccatcgttgcttttcaagtctctccaaggtgaagaagaggaagaagaggaagactccgattaaactatgaactattaaacgagttcttattaaatcatgggttaatatccggatactaaagttttacgatccaaaaaaaataggaaccaaccacctgtnnnnnnnnnnnnnnnnnnnnnnnnnnnnnnnnnnnnnnnnnnnnnnnnnnnnnnnnnnnnnnnnnnnnnnnnnnnnnnnnnnnnnnnnnnnnnnnnnnnnnnnnnnnnnnnnnnnnnnnnnnnnnnnnnnnnnnnnnnnnnnnnnng

SEQ ID NO: 131284 - DNA, 542 bp, Arabidopsis thaliana
cggacgcgtgggccggttcactactcaccttctccagtcgtataccactctccaccaccagcggttcactactgacctgctgcagttgtataccactccccaccaccacccaagaagcactacgaatacaaatctcctcctcctccggtccattactctccccctacggtataccattctcctcctcctccagtacaccactactcacctccacaccaaccctacctttacaaatcaccacctcctcctcactactagattacttaatcgtctctaatggagtcgacgacggtcacacaagaaaacaaagaatcgtttggtgatataataaaagacacaagatcgttgacgggagaattgaaacggatacatatgtcaaaagagaaagtttcccattttaatgtctcttctttatttattaatacgttactgtaataaacttcaaacatgttaatgagtgtgatcccttcatgcatgcaaatcagttatatggtttgtaagtagaagtcctgttttttgcttcaaatccttcaatattcaaa

SEQ ID NO: 131285 - DNA, 570 bp, Arabidopsis thaliana
  unsure (1)..(570): unsure at all n locations
gtcctaagtatacatgtcttttttgtctttggtctgaatctttctcgtcggaaacacagatctcagttccttacagaagaatctccgactcgtttctttgccggcattctcagatttccggatactagccatgagcagtgatggttccgccggaaaggcggttgttgaagccaaaggattgaaccctggattgatagtgctgcttgttattggaggtctgcttgtgacatttctcatagccaattacgttatgtacatgtatgctcagaagaatctacctccaaggaagaagaagcctctttccaaaaagaagctcaagcgtgagaagctgaagcagggagtccctgtgcccggcgaatagattccagcttcttcaacagtctgtgtttttaacctgtaatcacaatgtcattgagacttttgtatgggagagtagcaaacgtcccttgttctgttttggttagactacaaaaattgaatctcatcaacttctgttttcccttcacatatttgattgcagttgtagagctaaattacacacacttgcnggcctcncggtngntctncagc

SEQ ID NO: 131286 - DNA, 438 bp, Arabidopsis thaliana
cgacgataggaggattgttaatggggattggaagatcattcagaagaaagagagcttcttctcttgacatcctctctcccaaaacgagctcctagagacttctacaagggcaaaaactgcaaacctactggtttccacacgagaaaaggaggatatgttgtgcagccagataagttgccgaattacgtagtccctgatctcaccggctttaagctgaagccatatgtatctcagtgcccgctacaagtcaacacaaaacgagtcaactgaagcttccaagtgaaaaatagtcagtcaggagatatatgtttttaagtcttcttcataaagctttaagttaggactctgttcttctattgtccgtaatccttttgtgctattcttaaaatgggagatttgatttgatattttcacgaaacgacatgcaaagtaattggt

SEQ ID NO: 131287 - DNA, 811 bp, Arabidopsis thaliana
  unsure (1)..(811): unsure at all n locations
ggcgagcatcacaacacccacttaccaggggggagtggtcaatccttcaagcacaggggtggttcacagaatggaggatggagatttatgtgtatctttctgtttcctagacaggctatggctatgtaaagccggggaactggaacgcataagaccatttagaattggagaccgggttaagataaaggatggactggttacacctcggtggggttggggaatggagacccatgcaagtaaaggacatgttgtgggagtggatgcaaatgggaaattgagaataaaattcctgtggagggaagggcggccctggattggtgatcctgcggatatagttctagatgaaacttctggctgaatctcccaatgtatgattatgttttgaatctggaagattggtcattaggctatgcatgaggctgctctgtccattgtaagacataaagctcacagagcccttgtgccaacagctcaggtaatctatatctatctctcatgatgatttattaatatttttgttaataaagttaaaactatagagtggtaggagatatttaggatgtatcatctattatgtctagacaccactttcatatctcagatctctttttgtttatatgtttttcttcttctttgtataaaataatgaatcgcatgtacggacagatttccttagtattaacaaatctttttgaaaaaaaaaaaaaaaggnnnnnnnnnnnnnnnnnnnnnnnnnnnnnnnnnnnnnnnnnnnnnnnnnnnnnnnnnnnnnnnnnnnnnnnnnnnnnnnnnnnnnnnnnnnnnnnnnnnn

SEQ ID NO: 131288 - DNA, 805 bp, Arabidopsis thaliana
  unsure (1)..(805): unsure at all n locations
cgtttgaccgtctgcagtaccggtccggaattcccgggtcgacccacgcgtccgcaactctctcttctatctctctccgccgagaatggttggagttttccgacgatcactctcattccctaacaaaccttgcggccgatcatctccatcgtcaaagccacgtgtctctcatcacacaagatccatcagtctaccctgccggtctcatcccttaatctcccacgttaaccacgagatctctcagctcaaatcctggttctcattcgccggagaaactcacagccgcaccacctcttggatcaccgacggtctcagtctcctcaaggacgttcaagaaacgctcgctgatatacttcagctcccacaatctcaagaatctctacgaaaccgtcctgttttcttcgagaatcttctagaagatcttctccgattcgttgacgcttacggaatcttccgtacgtcgatcctctgcctccgtgagcaccagtccgccgctcaagtcgctctccgtaaaaaagacgacgagaaaatcgcatcttacctaaaatctcgccgatctctcgcaagagatatcgcgaaactgacgtcatcgatccgtgagccgaagacaaaacaccaacactgccacgtagacaacgttaacggaacgtacggtgacgcatagcttgcgtcagttatagagccaccaaaaacacggcgtttatagggtnttttgaaacgatcccgcaaaaaagagaaactataccaaagaatcgtggagttgaaagcaagtgaagaaaaagcttgattgtttaagcaagaagaa

SEQ ID NO: 131289 - DNA, 337 bp, Arabidopsis thaliana
ctctctgtctttactcattgtcgttatggtcgcgccgcctatagccgccgcgtcgttagagctccctcctccgttccccgccgtcttcgaacaaccggatggggaatctcaccttcccgaacgggttcccttcacgagtttgcctcctcaaccttttcaacttctccggaagactcaacggagacagaagatgaaacaaccgacgacgaagtatgacttcttagccgggttaactcgcagactcgctctctcgactcaccgcctctcttctccttccttcgtcaccgacaagtctcacatgaaacccaaagtcacagagtcaactcatagttgactc

SEQ ID NO: 131290 - DNA, 432 bp, Arabidopsis thaliana
aaacctctcaccgaagctacaatgagtatcatcgcaggctcctacgagagattcatttggggtttcaagcttaaacccacgaagcacgacgccgaatctcaaaccctaactctctcccctctcttctcctacccttcccacatctccccaatcaccaccgtcgcttgttccggtcccgccgcagcttccggcggctccgacgatacaatccacctctacgaccttccctccgcttcttccctcggctctctccttgaccacaatcacgcagcttcaatcaccgctctctccttctacacaccttcttcactctccttccctcgtaatctaatctccgccgccgcagatggctccggtgctatattcgatactgatccttttgttttgcttaaggtcgtttcgtcctcataagaaagcggttaatgatttagc

SEQ ID NO: 131291 - DNA, 806 bp, Arabidopsis thaliana
aaacaaagcaagcaaaaaaaaaaaatggctttctcacgcctctcatttgcagcttctctcatcgtcttctcatctctaatcatatcttcagttgcttattacggcaatgaagctgacccggagaccggaaaattgattcccatcgccgttgaagggatcatcaagtgcaagtccggtggcaaaacttacccaattcaaggtgcaacggcaagaattgcgtgtgtgaaggtcgatgcatatgggaatgagttagttccaatatcgatattgagcagcaaaactgatgctaaaggttacttcatcgccacgatattcccttcgcagcttcgtgcaggaaggacagtgaccaaatgcaaaacttacctttacaaatctccactcgctgattgcgattttccgaccgatgtgaacaaaggtgttagaggacagccattgagcacgtaccgtattcttcaagacaagagcttcaagctttactgggctggtcctttcttctacacgtctgaacctacttactactaattatgatcttctgatgaacatgaaatttaacatgttcttggagaatcatttttcgtttgtttgattattcgtcgtataacgttgtctgcaaaatgatctaagagtttgttttctttatcttatatttcatgttgcatatatgactttgtcatgtatcttatgttttaatattttcttggtaaatgtatgggtttagtggatttgttctaaaaaaaaaaaaaaaaaaagaaagggcggccgctctagaggatccaagcttacgtacgcgtgcatgcgacgtcatg

SEQ ID NO: 131292 - DNA, 696 bp, Arabidopsis thaliana
cgcctgcaggtaccggtccggaattcccgggttgacccacgcgtccgtaccgctgcgagaagacgacagaaggggattgagaggaaaatcaatccaaatgtagtcactttcagcgcattgattgatgcatttgtgaaggaggggaagcttgtagaggctgagaaattgtacgacgagatgatcaaaaggtcccctcctcctgatgttttcacttatagttcactgatcaatgggttttgtatgcacgatcgtttagacgaggccaagcacatgtttgagttgatgattagcaaggactgtttcccaaacgtagtgacttacaatactcttataaagggattttgtaaggctaagagagtagacgaaggtatggaactcttccgcgagatgtctcaaagaggattggttggcaacacagtcacttacaccactcttatccatggatttttttcaagctagagagtgtgataatgcccaaatggttttcaaacagatggtttctgttggtgtgcatcccaatattttgacatacaacattctgttagatggactttgtaaaaatgggaagctagcgaaagcaatggttgtattcgagtatctgcaaaggagtacaatggaacctgatatttacacatataatattatgattgaagggatgtgcaaggcaaggaaggtggaagatgggtgggaattgtt

SEQ ID NO: 131293 - DNA, 574 bp, Arabidopsis thaliana
  unsure (1)..(574): unsure at all n locations
ttttcgataggcattagctgatccttacttcaagggtctttctaagattgaaagagaaccttcaagtcagcaaatctcgaaaatggagtttgaatttgagaggcgaaggttgacaaaggacgacattagagaactaatatacagagaaatactggagtaccatcctcagttgctcaaggactatatgagcggatctgaggggtctaattttgtatatcctagcgccattggacatcttagacagcagttcacttacttagaggaaaatagcagtagaaatgggccggtcatacctctcgagaggaaacacgcatcactaccgcggtctacggttcactcaactgtagtccattccacctcgcaacccaacttgggtgcaacagatagtagacgtgtttctttcgagccttcaaaaaatggagcttcttctgcaggacatccatcaacttccgcgtatcctactaaatccatcggacctccaccaagagttccaccaatcaggtagaccagggtcgtgttgtgggatcatctgtatcttatggagaatggcaggacctnaaaggaaggcttattt

SEQ ID NO: 131294 - DNA, 542 bp, Arabidopsis thaliana
  unsure (1)..(542): unsure at all n locations
aaagttggaactatgatttctatagagttggtgaaaatcttcttcaatggtgtgattaagagtcccattgctaacaacattacaagcttgtagatttctatatttaatggactattttactgaaattctcactttatggatataattaaggttccaagagcattttcctgagttcttgaggccttttcttcaagcatccggagttcacaagagagtttaaccaaacttcatcagaccttgttggttcgtcatcatcgttcctatgccaggtccatagcgcatgtgttgaattcaccatctgaagctccccatgtccaaagcttgcttccctgaagactgaccactctggtgacggatctttgtacttgcgagccaatccttctctgtttcctccatcacctatgggaatgtgtacgggaccacatggatctgattaccatgttgaacggtccgtgcgtcaaagctggcatgacnggaancattcaacgggggggnaagnagggcatnagcacatcacccncagtgagggntgaacggaacag

SEQ ID NO: 131295 - DNA, 374 bp, Arabidopsis thaliana
ggcaagttacatgtatcagttttctgcccgtttgtgaagcgagggagcatgcagggattacggacacatgtccctagttttgcaagagaggcttaatggactttctgctgctatgaatgcattaccccttgttcatcctgggtatgcttggattgatccagtaccagaagaaaccacacgttatccggttaaaaaggctagaagagcagaagaagaacaattaaggagttattgaccagcccaaaggggagaagagttgcattgatatcgagaaactccaaaacgagttttgtttttactactgctgaatatatgctttctctggaaaatttcgggtggacatattcaagacttgaaaagccaccatcagattt

SEQ ID NO: 131296 - DNA, 521 bp, Arabidopsis thaliana
atattccaggaggcggcttacaccaaaactctctatctcagccatggcgaattattacgaaccgccagcttctggaaaccgtcgagacgcagtgaaaggtttcaacagcgggagcttcgacgattcagccggcgatcagagtcaaacgaacgattaccagttaaagataaagaaaagcaaaagcgttccaaacgcggatcgtgcggcgtcaagaagctggagtttcagcgatccagaatcgcggaggaagagaagagtcgctggctacaaagtttattccgttgaacagaagatgaagggatccattcgaaagagcttcaaatggttcaaagacattatcggtatttcttgatataccttctctcaactttcttaaaatctcttctttgtgctgtgagagttaaatatatctgtaacgaacaaaaaattgatagtattttctttctcttgcaactatatgtagaagaagagtctttgaacttgaatgagacagataatgaatgaaatcagttttcatatct

SEQ ID NO: 131297 - DNA, 1241 bp, Arabidopsis thaliana
  unsure (1)..(1241): unsure at all n locations
tccnnatgaaggacccaaaccccgaaaccncntgaccnccagcaatgacatnaatgggctgnaacttaatactttaggactgcatgcacnctgctcagctttaaatgggtccctncccctcagccacgaattctgatggcaatggctagggatggtctgctcccttctattttttcagacattaataaacgcacacaggttccggttaaagcaacagtggcaactgggttgtgtgctgcaaccttagcgttctttatggatgtttcacagcttgcagggatggtgagtgttgggacacttctggcatttacaatggtggcaatatcagtgttgatactaagatatgttcctccagatgagcaacctcttccgtcatctcttcaagagagaattgattctgtttcctttatatgtggtgaaacaacgtcatccggtcatgttggtacttccgatagcagtcaccagcctttaatagttaataatgatgctttggtcgatgtcccacttatcaagaatcaagaagctctagggtgtttggttctcagcgaggaaaccagaaggattgtcgctggatggagcattatgttccacatgtgttggggccttccttttaagttatgcggcatcaagcctgagcttcccagggcttattagatatccgttgtgtggtgttggtggatgtctcctccttgctggtttgattgctctgagttccatagatcaggatgatgcgagacacacttttggacattctggaggttacatgtgcccgtttgttcccctcctacctatcatctgcattctcatcaacatgtaccttttggttaaccttggatctgcgacatgggctcgtgtatcggtgtggctgcttataggagtgattgtgtatgttttctatggtcggaaaaacagttcgcttgccaatgcagtttacgtaactacagctcatgcggaggagatatatcgcgaacatgaaggttctttggcatagtctgagaaagcagcatctcttttgttatatatgtaacacaaatctgtattatctttatctggatgtaacagcaagagtggcactatctatttgtttgcaaaaagatctgtccacggcctttgtaaataatatatatcatcatcaattcataatcaggaaagactcacttttccggtttcaaaaaaaaaaaaaaagggcgaacgcttttaagggttccagctttcgttcggggcgttccccctnacattcg

SEQ ID NO: 131298 - DNA, 926 bp, Arabidopsis thaliana
  unsure (1)..(926): unsure at all n locations
aagaaagacatacccttttgaattttcgagcgttgtgatgccatatgagacatacaatggcgtgagcgtgcgcctaaggtatgtcctcaaagtaacagtcacacgtggttatgctggaagcatcgtggaataccaggactttgtggtccgtaactatgttccgcttcctccaatcaataatagcattaagatggaagttggaatcgaggactgtctgcatatcgagtttgagtacaataaaagcaagtatcacctaaaagatgttatccttgggaaaatatactttcttctggtgagaatcaagataaagaatatggatcttgagataagacggcgagaatcaactggagcaggagctaatactcacgtcgaaacagaaacactagccaaatttgagttaatggatggtgctccagttagaggcgaatcgatacctgtaagagtgttcttgacaccatacgatctgacaccaacgcataagaacataaacaacaaattcagcgtaaagtattatctaaatcttgtgctggtggatgaagaggatcgccgttacttcaagcagcaagaaatcacgttgtacaggctcaaggaagagacatcttgatgtgtacaaaacaaaagagaagagaaaaattatttttcagaactttgtaaagccttttcaagactttctgtatgcaaattggttgggacttgtagtgatattcgtagtttgttcaacgacccaaaatgttgtttggctttgtttggattcttgtgacttccattgtcttcttctccttctataaatgtactttttgttgtcttatgttactgaataagcagctttatttatagaaaaaaaaaaaaaaaagnnnnnnnnnnnnnnnnnnnnnnnnnnnnnnnnnnnnnnnnnnnnnnnnnnnnnnnnnnnnnnnnnnnnnnnn

SEQ ID NO: 131299 - DNA, 725 bp, Arabidopsis thaliana
  unsure (1)..(725): unsure at all n locations
cagtaccggtctcggattcccggctcgacccacgcgtccgagcatacatatatatagatggtggaagaaggcggcgtagttgtgaatcaaggaggagatcaggaggtggtggatttgcctccggggtttcggtttcaccctactgatgaagagataataactcactacctcaaagagaaggtcttcaacatccgatttaccgcggcagcgtttggtcaagccgacctcaacaagaacgagccatgggatctaccaaagattgcaaagatgggggagaaggagttttactttttctgccagagggatcggaagtatccgaccgggatgaggacgaaccgtgcgaccgtgtctggttattggaaggcgaccgggaaggacaaggagatctttagaggcaaaggttgtcttgttgggatgaagaaaacacttgttttctatacaggaagagctcctaaaggtgaaaagaccaattgggttatgcatgaatatcgtcttgatggaaaatattcttatcataacctccccaaaaccgcaaggatgaatggntggtttntngggtttttcacaagaacgntcctagtactaaatcanttnttcaaaacactntcaagggttnnttccctnntaacattgtcaccttttaggcttttaattttcctccnntaatgancggggtttttgggacccggccaattttcgnncgaaaaaggttaaacttttcctgc

SEQ ID NO: 131300 - DNA, 550 bp, Arabidopsis thaliana
gcttcttcacaggatcagcaatgaatatagcttcgaggattcgacgaagttttttaagagagaagaaggaatcttcagatgggaatagcttgaataatggatcgagtgttaaggaagaaggtaaagatgagattttgggagtttctgatgagttaatcgatcatgtcagatccggcaccattgatacgtttaagaacttctctctggaagatgaagaagaagaagtatctgtgaatcctttgggagatgaagataatggaatgagttcatctgcaaatgggaagaaggatttgtctgattggcaggagaaacacgcggttctcgtgttatcgaaatcgaaggaactctcacagttgagattcaagttatgcccgcgagttttaaaggaacatcagttttggaggatatatttccagcttgtgaggaagattgtggcaaaatatgaggtgctagcaatccaacaggctcaaatcaggaggatggccatggaagacagtaaaacttctgaaaggaagggtgtttatgaagttggaatggtagaaacaaaaca

SEQ ID NO: 131301 - DNA, 794 bp, Arabidopsis thaliana
  unsure (1)..(794): unsure at all n locations
gtccgcagaagcttttgcatgttctatggatcccacttttgcaagttatatgcaaactgagttgctggccgtctcatcaggaaagaaagaggagggacatgacattgtattacaaaggaacctcaccccgggttgtatgatctctgtaaagctatggaaggtgtcgaagtagtaaatggcttggaatgctagatgtcttgctcttcttacaagatctgcgttcgtattggacacagaggattacttccacaggtagaagaagaaaatgtagactgaacagttatggctacgtaacatggtgagaagtagtaaggttccataggtcttctctcagcttaatagatgaccacaactaaagtttcctcttgggttgtcttctttccttcaaaccaacaacacacaagaaaaaggtaaaactgacaaagtcgcacaagtaaagttctttgcaaccattcccaactttggttttcaagtttcttactatgctgattattagattagatatagagagatgccccaaggaaccaaaccattagaagaaccatggtggtttaaaggtaccgtgtggaatcttagggttccagggcccagtttggtaatggtaccaggaggggggggctgggcctcttaagaagaaggtggtggtaaaaatggaagcgccctggaaaagccctgggttaataaatagataggcccaaaagaaaaattatattaaaaaaaaacaaaaannnnnnnnnnnnnnnnnnnnnnnnnnnnnnnnnnnnnnnnnnnnnnnnnnnnnnnnnnnnnnnnnn

SEQ ID NO: 131302 - DNA, 607 bp, Arabidopsis thaliana
ccatctgtcttctaactcctttttattaagtttcttaaagaaggttaaagaaaaaccctataaaataaatatcccaacgaaggcgataaaacccagattttccagatcttaaattctctcctcccccaattccatcttcgcaaattctccagattcttccgtcaatctttgagtttggtagagaaatggatcaacaaggacaatcatcagctatgaactatggttcaaacccatatcaaaccaacgccatgaccactacaccaaccggttcagaccatccagcttaccatcagatccaccagcaacaacaacaacagctcactcaacagcttcaatctttctgggagactcaattcaaagagattgagaaaaccactgatttcaagaaccatagccttccattggcaagaatcaagaaaatcatgaaagctgatgaagatgtgcgtatgatctcggccgaggcgcctgttgtgttcgccagggcctgcgagatgtttattctggagcttacgttaaggtcttggaaccatactgaggagaacaagagaaggacgtttcaaaagaatgatatcgcggctgcggtgactagaactgatatttttgattt

SEQ ID NO: 131303 - DNA, 541 bp, Arabidopsis thaliana
  unsure (1)..(541): unsure at all n locations
acggaagccangggttccaggtttcccgggcaantccaaacntccctgccctatccngttaagggaatgcncttcccgncggancggctatcaggccggaaatccccntcaagcnttgtccaccaaaccccagatgctgtcactcctgatcctctggctcgaagtttctccagttggatctcctcttccagcttcttcctctgtctgtttggtctcatcacaactctcatctctgcttcttgtcctactcatgttgctactagctttctgcagtttcttctagtaatcatatagaaacagcgagtaagcagcactctacacaatatcatcagcagaaaccaaatattcacaaatgtattctttcttactctctgcttcttctgaatttttttcatgtaatattaatatagcttcttctagtgttcgttcgtgtgagatttgctcataaagcactctgcagtttgggctngtgcgcagttgttgtacttggtagcngtgatagtgtgtgttttttgtgcctcaaagtcaaaattgattgatc

SEQ ID NO: 131304 - DNA, 813 bp, Arabidopsis thaliana
  unsure (1)..(813): unsure at all n locations
taggtgcactatagaagagtcttgacgtcgcatgcacgcgtacgtaagctcggaattcggctcgagctcagagaagcaggagagacattcacagtaaccatgtccgtctctctgttcactgccttcaccgttctctcactctgtttacacacttcaacatctgagtttcagctgtccaccatatcagctgcaccttcgttcttgcctgaagctccatcgagtttctcagcttctaccccggccatgtctccagatacctctcccctgttccctactccaggttcaagcgaaatgtctccttccccgtcggaatcgtctatcatgccgacaatcccctcaagccttagtccaccaaacccagatgctgtcactcctgatcctctgctcgaagtttctccagttggatctcctcttccagcttcttcctctgtttggttggtctcatcacaactctcatctttgcttcttgtcctactcatgttgctactagctttctgcagtttcttctagtaatcatatagaaacagcgagtaagcagcactctacacaatatcatcagcagaaaccaaatattcacaaatgtattctttcttactctctgcttcttctgaatttttttcatgtaatattaatatagcttcttctagtgttcgttcgtgtgagatttgctcataaagcactctgcagtttgggctaaaaaaaaaaaaaaaaaggnnnnnnnnnnnnnnnnnnnnnnnnnnnnnnnnnnnnnnnnnnnnnnnnnnnnnnnnnnnnnnnnnnnnnnnnnnnnnnnnnnnnnnnnnnnnnnnnngg

SEQ ID NO: 131305 - DNA, 867 bp, Arabidopsis thaliana
cttcttcttctctcctttccgaaatgtcaaaatcctccgatccaggcatgtcttattcttttttgttttgtcttaacgacaaaaaaaaacttgaaaaatctcactttcgttatccattcccaatttcgaccaagagtgttctcaatgacagtctagcatgcaaataagattcatttaacaaacaattgtatgcatttagtataattttatccaaaaaatttattttcaaaattgtgtctttgagctctgtttgtgtagcagagttcaaaaatggtgggtagtattgttggcagtaacatggctgcgactgatgcgaggtttctaagctcgaattttggcaacagtttcagcatcaacaccagaattcacagattccatgatcgctcccaaatcgtaatccctagggctcaatcttcttcttctccgtctccatctccaccctccgacaagaagaagaccaaaacccgacccggaaccataaccactaaggagagcgaagagacggttgcgaagaagctcgacgttgctccgccttcgcctcaatcaccaccgtctccgcctacactgaagttggacgatgtgaatcctgtgggattaggacgacgatcgcggcagatcttcgacgaggtgtggcggaaattctctggattaggtcagatgtcgaggacaacccgacccgatgagcaagagactcttgatagtctactcattagagaaggacctatgtgtgagtttgctgttcccggcgctcaaaacgttaccgttttagtcgtcggagctactaatataatcggtcgtattgttgtccgtaaactcatgctccggggctacaccggcaaggcactggtgaggaaacaagattaggaa

SEQ ID NO: 131306 - DNA, 606 bp, Arabidopsis thaliana
  unsure (1)..(606): unsure at all n locations
ggcgctttcgcattgtcaccgatacggcgtcgttcacagggatattaaaccggagaacattctggtagatctacgaaacgatacggttaagatctgcgatttcggttcagggatttggttaggtgagggagagaccaccgaaggggtcgtcggaacgccgtattacgtggcgccggaggttttaatgggatattcttacggagagaaggtcgatctatggagcgccggcgtcgttttgtacacgatgctcgctggaactccaccgttttacggcgagacagctgaagagatattcgaagcggtactcagaggaaatctccgttttccgacggagatattccggggggtttcatctatggctaaagatttcctaaggaaattgatatgcaaaagatgcttctagaaagattctcagccgaacaagcatttaaggcacccatggntccaaagagcaggggaacaanagggggnttcatctngaaggttcnttcgggaaataaaaaggttcaagtgtnnnttataaccntcccggtggttttttntacaagtttgggggttcggcattaaatttggtatgnattnagtcccnccncccctttgggnttc

SEQ ID NO: 131307 - DNA, 639 bp, Arabidopsis thaliana
atccataattacgacaaacgaaacgacgcatattaaggttactcgcgtctcaaactcgcgtctcctaaatgggtcttaccccaactgcaaccctactcgtcgctgttttcgcgttttgcctcgtcgctgtaacggcgcagttcgcctacgttttgtggtggaaacgtcggttccgtcgtcggagtatcgccggatcagaacgcgacgctttttcctctcgcggtggtgacctaacggctacaccaccgccatcgaaagagcttctttacttcttcttgttctgtctcgaaaacaaacagttcagaataggatctgccaccgctccgccgctccctgcagccgcaccgccggttaatgacgtggcatcaaagtggtcaataaacggggaaaatttactttgcggaccttcggagactttgtttaccatcgctgaaggctatacttagcgagtccgatcatcggacggggtgagatttatcccacggtgggagcaatctttacaagaggttcactgtaaaaggattgatgaagtggaagaggaggtagtcccgacggatataagcgacggcgggggtgactttagccactataatcaaactacgccgttttctactccatgtgccttccccaccggtttta

SEQ ID NO: 131308 - DNA, 357 bp, Arabidopsis thaliana
caacaacatcaatcgagagaaagcgaataaataaaacaaataatttaaattaaaaatccactcgccggagacgccgtcgtttcgacgccggtgctccaaaaaaaatatgaaacggaaaggagtcggattctctctccccgtcacggtggtgatgttggtgatcggtttcatctactttgcctcggttttcactttcatcgatcggtggttcagcctcacttcgtctcccggaatcgctaacgccgccgctttcaccgctttggctctgatgtgtatatacaattactccatcgcggttttcagggatccgggtcgggttccactcaattacatgccggatgttgaatatccggtgag

SEQ ID NO: 131309 - DNA, 644 bp, Arabidopsis thaliana
taggtgcactatagaagagctatgacgtcgcatgcacgcgtacgtaagctcggaattcggctcgagctcttccacaacgaagtttggttcatcaccggcgaatcctttctccgacgtcataatgccgtttaagacggtgatagaagtggagcctccgagtctgttacggtacttgatcggatcggcggtgatgatgatcggtgttgtattaccggttggttacatgatgtttcgcaacaaacgcgtccccttctcatcttcgtactctaaacagacgaacaaagttttgatatagggggccagaggctgtggttgatttcaacactaaattgagaaggatgatgacatattgatgatttggacgactgtaaaattatgggggaattcttgtttttacatggcttgtaagagatctttcgatatcaaattcataaaccataaaatgtgagttatttttctcttatcttcttatttaggttaattcaaaggtcttttatgtacacaacctcttctctttggtggaaagatatcattcgatggccagagttttcattatctacagatctgtataatactgagctttgctctttcatcttcttcttgcttttctttggtaattgaaatgctaatgacgtgtttatatt

SEQ ID NO: 131310 - DNA, 543 bp, Arabidopsis thaliana
  unsure (1)..(543): unsure at all n locations
gaattatcgaaagcacaccaacaggttcatatatctgaagcaagggtttcgactgctttagacaagttagcccacatggaagaattggttaatgataggttgttacctggcagagttgtaacggaattagataaaccctcctcttcaaccactgcttctgctgtcgagttagatagggaaaagacaaacacgggtgcgaaaagcttgaatgtttctggtccggttccgccttatagtccacacttgaagaatttttggtatcccgttgctttcactgcagatctcaagcatgatacaatggtaccaattgaatgctttgaacaaccatgggttatctttaggggtgaagacgggaaaccaggatgtgtacggagtacatgtgcgcatagagcatgtcctcttgatcttggcacagtgaacgagggacgtattcaatgtccgtaccatggatgggaatactcaanccgatggngaatttaaagaagantgcccgtnttcaaagtttcttgnanggtgnaggnccaaancantnccnttntnttt

SEQ ID NO: 131311 - DNA, 799 bp, Arabidopsis thaliana
gagacaaagttaaaagtagagaagaaaatgagtgaggaggagaggaagcaacacgtcgttctagtacatggtgcttgccatggcgcctggtgctggtacaaggttaagccgcagctcgaggcttctggccaccgcgtaaccgccgtagatctagctgcctccggtatagacatgaccaggtcaatcacagatatatccacatgcgaacaatactcagagccattgatgcagctaatgacctcactaccagatgatgagaaggttgtgcttgttggtcatagcttaggaggtttgagtttagctatggccatgggtatgtttccgaccaaaatctctgtttctgtctttgtgactgctatgatgccagacaccaaacactcaccatccttcgtatgggataagctaagaaaagaaacttcacgagaggaatggttagacaccgtgtttacgagcgagaaacctgattttcctagcgagttttggatttttggaccagaattcatggccaagaacttgtatcagttgtctccagtccaagatcttgaattggcgaaaatgttggtgagggcaaacccattgattaagaaagatatggcagagagaagaagcttcagtgaggaaggatacggatccgttacacgtatatttattgtatgcggaaaggatcttgtgtcacccgaagattaccagcgatcgatgatcagcaactttcccccaaaagaagtaatggagatcaaagacgcagatcatatgccaatgttctccaagcctcaacaactatgtgctcttctcttggaga

SEQ ID NO: 131312 - DNA, 838 bp, Arabidopsis thaliana
  unsure (1)..(838): unsure at all n locations
attggctataattatgacaaaaactaccaaaaccatgaatcctaagttttacttggttcttgccttaaccgcggttctggcctcaaacgcatatggtgcggttgtagacatcgatggaaacgccatgttccacgaaagttactacgttctccctgtcatccgtggccgaggcggaggcctgactctagcaggccgcggtgggcagccatgtccttacgatatcgtgcaggaatcttcagaagttgatgagggcattcccgtaaaattctcaaactggaggcttaaggttgcgttcgttcccgaatcacagaacctcaacatcgaaacagacgtcggagccacgatctgcatccagtcaacctactggcgggtcggtgagtttgaccacgagaggaagcagtacttcgtggttgctggtccaaagccagaagggttcggacaagattcgttgaagagtttcttcaagatcgagaaatctggagaggatgcttacaagtttgtgttctgtcctcggacttgcgactctggcaatccaaaatgcagcgatgtcgggatattcatagatgaacttggcgttcgtcgtttggctttaagcgataagccgtttttggttatgttcaaaaaagctaatgtgaccgaagtttcgtccaagactatgtgagaggaccactctcgatcttttactttgacgactcataataaaacccctaggttttttttttgataaaacacccgctctctggcggccgcgaattaaannnnnnnnnnnnnnnnnnnnnnnnnnnnnnnnnnnnnnnnnnnnnnnnnnnnnnnnnnnnnnnnnnnnnnnnnnnnnnnn

SEQ ID NO: 131313 - DNA, 511 bp, Arabidopsis thaliana
  unsure (1)..(511): unsure at all n locations
acaacttcaaagctttctaagcaagagattgagagaaatcggattttctttctaagactcaaaatatctaaaaacaataatggctttttggtctgctgagaatgctactaaagcctatcttagtacattgaaaacggatcaaaggacaaaagaaccaaacgtcgccgaattcatatcagccctagccgccggaaatagcgctagaaagatagccgtggcttgcgccggagcagcaaacgccgacatactcgttgcactaatcgcagcggctaaccaaacgcgtggtcaagttgtatgcgttttacgtggtatcgaagaactaatcatatcccaaaaaatgttggaccatcagaggttcatcaggtacaattcgttagtcggggnatctaacggcggcactctaatcaataatcattttcgggngcagcagattttcgtccccgggggtttttaacctcgnaaaccncccagnggtcgttngnnaatccntttttnttncgggggnaaccga

SEQ ID NO: 131314 - DNA, 549 bp, Arabidopsis thaliana
  unsure (1)..(549): unsure at all n locations
ccaacttaggtcgccaagcagtgagagcttatcgagctccaatgccgtcaactacagagccatcagaggaagccatagctactttggtatctatgggatttgaccagaatgcagcgagacaggcgcttgtacacgccagaaatgatgtcaacgctgccaccaacatccttcttgaagcacactctcactaaaccttctttactaggaagtttcagaaacattgttgattcgagatgaagacattgtacaacagaggtattcttctgctgcgttctaacaacggaaatggccttgcattgacgataatatgtccagtaaatgatctgatttacatcctctttatctttcttttagggtttcttttggcctcttttgtttgccgttgtagttttagaacaaagtgcctaggttatgttatgtaagtacagatttgaaaaaaatatgaagaggcttatctgattaaatcaacacaaaaaaagtacctttnnnnnnnnnnnnnnnnnnnnnnnnnnnnnnnnnnnnnnnnnnnnnnnnnnnnnnnnnntcccc

SEQ ID NO: 131315 - DNA, 750 bp, Arabidopsis thaliana
gcgtccgctccctcaattcttcatgatctaactactaagagatctgattcactttcttcacactctccgaggctcatcttcgcttcttccctagctcttatctggacacaatgatggacctaacgaaactgaagcctccacagatcactttttattgctcggcgttttccgtcttgctcacacttcatttcacgatacagcttgtatcgcagcatctcttccactggaagaaccctaaggaacaaaaggctatactcatcattgtgcttatggctcctatctacgccgttgtttcctttattggtttgttagaagtcaaaggaagtgaaaccttcttcctctttcttgaatccatcaaagaatgctacgaagctcttgtcattgccaaattcttggcattgatgtatagttatctaaacatatctatgagcaaaaacattttgcctgatggaatcaaaggaagagagattcaccattctttcccaatgactctttttcagcctcatgtagtccgtttggatcgtcacactcttaaacttttgaaatactggacatggcaatttgtggtcattcgacccgtgtgctccactttgatgatagctttacagctcatcgggttttatccttcatggttgagctggacattcactatcattgtcaatttctcggtttctctggccttgtattctcttgtgatattctaccatgtgtttgctaaggagcttgctcctcataatccactcgcaaagt

SEQ ID NO: 131316 - DNA, 333 bp, Arabidopsis thaliana
cgaagctctctcttttttttttgggggggctaaatctctcacgcacgacgttgagagagctctttcctttgcgatcttgttgtcttcctctgctcccgaccgaattcacaacccgctttaatatgcattggagttcaacttgaatttattggccgttgttgaagctgtgtaactattaacaattggggctatgcattcaacgattttctgctcgtgaagaaggaatataacttatttataaggtttcagtcttagacatgtcgtgttttgaatgcagtggttatgatgtctcaagttggcttattcatttttgctgaattgcattctttggaa

SEQ ID NO: 131317 - DNA, 809 bp, Arabidopsis thaliana
cttcctgattccgtcgatagggtgagagaggaagagatccaaggaggattcgataaaatggctccaagatccgattcgcaaaccggctccagtgtatcagacggttcagatcaatcctcaatggatccaatattccaccttctccgaatcgtcccattctcatttctccgaccaccgcgcctccgtctgaagattccatcgttcacgcttccttctccgatgactgtatacgctctaattctccttacctactttttagtagtctccggtttcgtctacgacgtaattgtcgagcctccgggtatcggatcaactcaggatccgactactggaactattcgacccgttgtgtttatgtcgggtcgggttaacgggcaatatatcattgaaggtctctcttctggattcatgttcgttctcggtggaattgggattgttatgcttgatttagcgcttgataagaacaaagccaagagtgttaaagcttcttatgctgttccgggggccccctccattgtgatcgcttatgtcatgagtatgctctttatccgtattaagattcctggttatctttattagcttttagattatgtgtaatgggaacttgacttataagagtagtgatcacttgaaaagttgtgtcttttttagtgttcgaactcagttccgtagtcaccaatttgaagcatgtctctttggatttgaattaaagtcctagtaattattgttccaaaaaaaaaaaaaaaaaaaaaaaagggcggccgctctagaggatccaagcttacgtacgcgtgcatgcgacgtcatgt

SEQ ID NO: 131318 - DNA, 546 bp, Arabidopsis thaliana
  unsure (1)..(546): unsure at all n locations
agatcatttgtcggttgattccatacgatctccaagtcttgtcgttgcagaatctctaagaagctaacgaaaatggtccttcaaaacgatattgatctgcttaaccctcctgctgagctcgagaagaggaagcacaagctcaagcgtcttgttcaatcacccaattcgtttttcatggatgtcaagtgtcaaggctgctttaacattacgactgtgttcagccactctcagaccgttgtgatgtgtggaaactgccagactttgctctgcacacccacaggagggaaggcaaagctcactgaaggatgctctttcagggaaaagtgagactggagaagaagatatgactccattccattcacttcacccacaaatttttcttttcgggttattatggaattttttgttggtaatttgagctagtaggtacccctcctttggcggattatccctttgttttaatcagcgaagcggttccccttttattnaatggaatggaatttcnttgnaaattcatgcaaaccctangcggcttncgggggttcc

SEQ ID NO: 131319 - DNA, 469 bp, Arabidopsis thaliana
tcgctttaacattttatatctaaaaccatttcatcttatgaatatcaacaacaatggcagaacaagaaactacgtcaaacataaacaccattaatgatcaagcagaagaagaaacaagaacaaaatctcagccattgatttcaggtctaccaaatgatatagctgagctttgtcttcttcgtcttccttacccataccatgctctatatcgctctgtgtcatcttcatggaacaaaaccatcacaaaccctagattcctcttctccaagcaatctctttctatctcttctccttacctatttgtcttcgctttcaacaaatcaacggctaggattcaatggcaatcccttgaccttgcatctggccccgtggtttgttttacctcccatgccaaactctttcaccaaaatctcgtctcctcacgcactctcatgcgcgtcgatgccacgtcaggggaagctttttgtac

SEQ ID NO: 131320 - DNA, 469 bp, Arabidopsis thaliana
atacaaatctcctccaccaccatactacgcacctactcctaaggtacattacaagtctcctccacgaccatatttctacagggctccaccacctccatattactcaccttctcctgtggttcactacaagtctcctccaccaccatacgtctacagctccccaccaccaccttactattctccctctcctaaggttgaatacaagtctcccccaccaccgtatgtttacagttcccctcctccaccttcctactcaccttcccctaaagttgactacaaatctcctccaccaccatatgtctacagttcaccaccaccaccatattattcaccttcccctaaagtagactacaagtctcctccaccaccgtatgtctacagttctccaccacctccatattactcaccttctcctgtggtagactacaagtctcctccaccaccatatgtctacagttccccaccacca

SEQ ID NO: 131321 - DNA, 438 bp, Arabidopsis thaliana
ttctccaccacctccatattactcaccttctcctgtggtagactacaagtctcctccaccaccatatgtctacagttccccaccaccaccttattattctccttctccaaaggttgaatacaaatctcccccaccaccatatgtttacaaatccccacctccaccttcgtattcaccttctccaaaaactgagtactaaacttcagctccaccatcatatttctattcttgaaaagagtaaaagggatttttaattaaataaattaccaaattttatttgatttcttctttccttttgttcttgtatcttttaattttcatttggtttgcatcaataatttgggtaaaaaacttttgtatgggttcatgttttcttcttctatatgtgtaaagggtgcttgcaatcaatctatatgaagtcctttggaaatttgaatt

SEQ ID NO: 131322 - DNA, 527 bp, Arabidopsis thaliana
ttcttaatcagaaattgaagccgaatcattttataaaacacgaagtgaagcacaaatggttggtggcacatcttcacgtatgggagggtccaccaccacttccatcttattctgcatcccctaaggttgtgtacaagtctcctccaccaccatatgtctacaattccccaccaccaccatactactcaccttcttccaaaagtttactactactcgtctcctccaccaccatcttattattctccctctccaaaggttgaatacaaatctccacctccaccatcgtattcaccttctccaaaaactgagtactaaatttctcggctgcctctatatgagtgaaacttaaaaatgtaattctttaaataagttaatcgaatattatttcgatttttatctttcctttttgttctcggtttttaaatttctctttatctaatcccaatttttaattttctcgggatttggctacaaaattttcttttatttgtgtaacgattgcttgcgatctatataaactcctttgc

SEQ ID NO: 131323 - DNA, 616 bp, Arabidopsis thaliana
  unsure (1)..(616): unsure at all n locations
gcacgcacgcgtacgtaagcttggatcctctagagcggttcgcctttttttttttttttttttaaacaaacagtctacacatagacaactcaaagccaacaaatgaaacaaaatataaaacatatgcaaagataaaatatttaaaaaaaggtaacacgttgattatacatgagtatacgtatatctatatatatacgtatttaatgtttctcaagggtgtggaggcaacggaggccatttcccgaacttggggtggtgaatgtatttaggaggaagaggtggaaactttggaagtggtggaagctgtggaagtggcggacatggcttctttggaatcaccactaccggtggtttgtatacctggtaccggcggagggcatggcttcttggggatcacaaccggtgggtttgtatattggtaccggcggaagacacggcttcttccacaattggtggtatgtaaattggtggatgcnccatccttcggcggcggcttgnaaccggtacctggaagtgggngccctatcttccgnggnggaatgactanctttgggggggcttttgactgacccgcggnggacacttcttagngggnaagntctccgtgggggtttgg

SEQ ID NO: 131324 - DNA, 397 bp, Arabidopsis thaliana
  unsure (1)..(397): unsure at all n locations
aaagagaaacgtatcattaccatattattgttggaagattgacgggaatataaacaaccagtctacacatagacaactcaaagccaacaaatgaaacaagatataaaacatatgcaaagataaaatatttaaaaaaaggcaaacacgttgattatacatgagtatacgtatatctatatatatacgtatttaatgtttctcaagggtgtggaggcaacggaggccatttcccgaacttggggtggtgaatgtatttaagaggaagaggtggaaactttggaagtggtggaagctgtggaantggcggacatggcntcttggaatcaccactaccggtggtttgtataccggtancggcgggggcaggcttcttggggatcanaaccggnggtttgta

SEQ ID NO: 131325 - DNA, 444 bp, Arabidopsis thaliana
gccgtcgcttcgtttttcccggtgggtaaaccccggccgaccgaatcaccgatcaatagactcgtgaatccttctcctattcctccactaccacagttgatctgcctaatccagtcgtgttcatgttctttgaccagactcacatcggaggaggttgacgaagatacggccaattcaatcatccccgaggactcattgttgctattgtttctatttctgctgctatccgtagggattcctaaaggcatcagaagattctcagagaatgtcaccgtcgatgtcggagattcaagctgttggtctccgtttcctgtcacaattttccattgatacgttaccaaaaccaatcaaagttgagagttttttttaagacgatgtgtcccttaccttggtttggttaggtccaagttggtgatgttttttgagtgaagcaatgttgttgag

SEQ ID NO: 131326 - DNA, 561 bp, Arabidopsis thaliana
  unsure (1)..(561): unsure at all n locations
cgcaactgcagccaagaagaaagagatgaatttgagagatatgataaggttcaaaacatccgaccaaagatggtagctgaacttcgtgagcggtttgcacatcttaaccttactttctcaattgggggacagataagcttcgatgtcttccctaaagggtgggataagacttactgcttgcaatacctcgaggacttcagtgaaatccatttcttcggtgacaagacctatgagggtggaaatgactttgaaatctttggatcaccccaaaccattggcccttcagttacgggtccccggtgcccccgtggccaaaatgcaagggctctggtcatgtcttgaaacactactcatctcaagaacacagtgtcaagagtttgattcttctttggcgaaatctcacaactcctgattacaagaaatggagagaagtgtgtttgaatgctatctataccgtatgttttgaatttcnattcatcaaataaaatatcttgttataaccttttgtntcagaacatggtcctcaaagttttaaaactaaaggttaaaaatatcctcttc

SEQ ID NO: 131327 - DNA, 448 bp, Arabidopsis thaliana
caaagaacacaacaaacgaactagcttaaggcaatattcttgcctagcgctcagcaatggcgatcacacgctcctccttggccatttgcctcatcctctctttggttaccataaccaccgccgattactactctccctcatctcctccggtttacaaatcaccggaacacaaacccacgctcccgtctccggtttacactccacccgtttacaagcctaccctctcccctccagtctacactaagccaactatcccacctccggtttacaccccaccggtttacaagcatacaccctcacctccggtttacactaagccaactatcccacccccagtgtacaccccacccgtttacaagccaactctctcacctccggtttacactaaacccactattccaccttccggttacaccccaaccggttacaagcccacttcggtttacac

SEQ ID NO: 131328 - DNA, 611 bp, Arabidopsis thaliana
gatatgagtagccaaatcgctttgtcaccggccatcgccgccgccattcgccgtccgtcctctcacgactgtctatccgcttccgccactactgctaccgccacccccatggctctcaaatcttgcatcgtcgcacctctctcgctattcacctctcaatctcaaatcaaacactcaagctcaagaaaaacttctcgaaccacgattcgatgcgatgtagcgataaaatccgcagattcgataaacgcagacgccaatccttcgtcctcaccgtcatcagaggaagaaatcgaagcggaagcgaaggcgaagataggatctagggttagagtaactgcaccgttgaaggtttatcatgtaaatcgagttccagaggttgatttagaaggtatggaaggtaaactcaaagattacgttgctgtttggaaaaggggaaccgaattctcaggctaatcttccttataaggtttgacgttcttcaaaggaaattgtaaaggccgggggcttgttaaatttgtttcaccatcttaagggaggtgggttcgagttcattgatcagtgatgaaacaagaaagacaatttttgttttctttctcagtgtttgttttggt

SEQ ID NO: 131329 - DNA, 403 bp, Arabidopsis thaliana
  unsure (1)..(403): unsure at all n locations
caaatnttgagcagcagtcatcatctttaagcttctcaaacgatcacttgctcaccgcaaattcaaggtcgttatctgggatacccggatgtgaagctgaaatatccgagcagggtgcgcctgctacttctgctcctacaaacctccttgatgattatcctgcagcatctgggcgcaagtcttcttcaggaggctccccactatcctcctcaccccgttttagcgaccagcctgtgatgttagatgtttactcacctgatagattggccggagaactcttcttcttagacggttcactaaaactcacagcagaagagttatcccgngctnctgcagnaagttctagggtagaagcagccatgggnacanttnttccaaaaggaaccactnggntaantggggc

SEQ ID NO: 131330 - DNA, 448 bp, Arabidopsis thaliana
ctctcactctcacttcccatcggcgaaaatggcgtcggtggcggcatcatcgtcgatatcattcgctgcatcattcctcaaaatcaaagcattccctctctcccctcgcttcttccccatccgtacactccgttgctctgtctcctcctcctcctctgagcccattgaattcgacatctccttcgctcctcccaaacccaaaccctcctccactcacggcggcgtcacccctcaacaactcttcatcccttggatcgtccgtagtgatgacggcactctcaaactccaatctcaacctcctgctcgtttaatccacaacctcgccatcgatgccactactcaaaaccctaagaagggaaggtaaatcttaaggagggaccaaccctcaaagctaccttcctctttcttccggcaccaccaccgtcttatattcagctttacactcaga

SEQ ID NO: 131331 - DNA, 451 bp, Arabidopsis thaliana
tcctgtgatccaccaaggcaagatcgtcgagaaaggttctcacacggatctactaaaggacccggaaggagcttattctcagctgattcgtctacaagaagagaagaaatctgatgagaatgcagcggaggagcaaaagatgtcatcaattgaatcattcaaacaatctagtctgagaaaatcgtctctaggccggtctctaagcaaaggaggatcatccagaggaaacagcagccgccattctttcaatatgtttggttttccagcaggaattgacggaaacgtcgttcaagatcaagaagaggatgatactacacaaccaaaaaccgaaccaaaaaaagtctccattttcagaattgctgctctaaacaaaccaaagattccggtgctaatacttggatcaatatccgcagcagcaaatggcgttatcctttcaatctttggcatacta

SEQ ID NO: 131332 - DNA, 712 bp, Arabidopsis thaliana
atatcgtttgtggggaagggggtcaatgtctgcgctcccaaaaggaaaaaaaggtagggccttggtgaaaaaaaaaccttaccctcctggggaaaaatgtttttttcaagcttgttttttgacatgggggcacttattactgggaccaaaaaagcccaacgttagcattccatttggggccatcaacgcatacggatgggttatctgttttaatctctcggggttacaggaaagacttccccttatcagtcccccgacagtgacagggctgagacaatccagtggtcatactcttgtgataaggctaagctggaacttggttataaccctcggagcctaaaggaaggattggaggagatgctcccttggttgaaagagtctgggcgtccttcactactgaaattcaaatttcccatctttcaggtatttccaagaataatattccctggaattcagtccctatgatgagtgatggctacttttttacttctcccggtacacttttaaccccatcggtttttatcttgttacaaaactgcttcgttttggtcgggtatgtcaaataaatgtgaaacattgggggcaaatgcctatgatcatatttttaggtgaagaataataaaaaaaaaaaaaaaaaaaaaaaaagggcggccgctctagaggatccaagcttacgtacgcgtgcatgcgacgtcaagctgttgtaagtgta

SEQ ID NO: 131333 - DNA, 1108 bp, Arabidopsis thaliana
  unsure (1)..(1108): unsure at all n locations
gaaaatatgaaaatattagtcaccggctctactggttacttaggcgcacgactctgccacgttctcctccgtcgtggccactccgtacgtgcattggtccgccgcaccagcgatctctctgacttacctccagaagttgagctcgcctatggagacgtaacggattaccgttctctaacggatgcttgctccggttgcgatatcgttttccacgccgcagctttagttgagccttggcttcctgacccatctcgattcatctcagtcaacgttggtggactgaagaatgtcttggaagctgtaaaggagacgaagaccgtgcagaaggttatctacacttcttccttcttcgctcttggatcttaccggatgggatcctgtttgctaatgaggattcaaagttcataattgagagggtcttcctgcaactgagtatgtagaggtccaaggctgttgctgataagatggctttgaatgctgcttctgaaggggtgccgataattttcctgtatcctggtgttatttttggtccaggcaagctcacttcagccaatatggttgctagaatgttgatcgagcgctttaacgggaggttgcctggatatattggctctgggacggatagatactccttcagccatgttgatgatgttgtggagggtcatgttgctgcaatggaaaaaggtaggcttggtgaaagatacttactcactggggaaaatgcttctttnaagcttgtctttgacatggctgcactgattactggaaccaaaaagccaaactttagcattccattatgggccatcaacgcatacggatgggttatctgttttaatcctctcggggttacagggaaaggcttccactttatcagtcctccgtatttggtaatgaacagacagtgacagtnctgagacatcagtgggtcatactcttgtaataaggctaagctggancttgggtataaaccctcggagncttaaaggaaagggtttggnggngatntncccttgggttaaaagnnttggggggcattcccttcttaaatttnaaattcccccttttaagggtttcccagnaaaaaatncccngaatttaggcccccttg

SEQ ID NO: 131334 - DNA, 422 bp, Arabidopsis thaliana
ttctgcgtttcctctttggcttctcgaagaggaagaaaactttggcagagagcgaagcatcacacatattttggcctctccttcacgatattcgaagaagtctcctcctccttctccaacgaatcccagatcaggcggcaagtaggcgaatccttacgaagaattctaacttcatcatcaacgatagatactctagtttgattttcaaagtagtagtgtaaaggaatcagaaatggcggtgggagagaaggagcacgaaggaactgtggttgaaagcggcggcgagaagaatgattccgccgttgtactctctgcttccggcgagaagaagacgacgaagcgtaaaggtttgttctcgcgtctttggaatgcgatatttagggttagaggtgatgatttcgagaagagacttaaaaatatct

SEQ ID NO: 131335 - DNA, 411 bp, Arabidopsis thaliana
  unsure (1)..(411): unsure at all n locations
agaacaatctaacgctttctcgaacatcttcttcttcttctttctcgaaattatttttccagtaatcaatttcttctctnctagattttnacaggaactaattttctgctctgaggtatcagatgagtagccgatggaatcgtacgatctacgttgggaatttgcctggagatattcgcaagtgtgaggttgaagatctcttctacaagtatggaccaattgtggacattgatttgaagattccaccgagacctcctggttatgcctttgtcgagtttgaagatcctcgtgatgcacacgatgcaatttatggacgttatggttattattttaaagggtgtcgacttcggggttnagattgcacatggtggtcgtaggattttaaccatcagttgataggtcagcagnagc

SEQ ID NO: 131336 - DNA, 497 bp, Arabidopsis thaliana
  unsure (1)..(497): unsure at all n locations
cggtttgctgttctggagaaaagcaccagccaggtgttagtgaagaatgtaaagaatgaggtggttaaaaagagttctttacctattcccacagatgctatcttttatgctgggactggaaatttgctttgtagatctgaggataaagtggttatatttgaccttcaacaaangcttgttcttggtgagcttcaaacaccgtttgttaggtacgttgtttggtctaacgatatggagagtgttgctttgctcagcaaacatactatcattattgcgagcaaaaaacttgtcctacagtgcacgcttcatgagacaatgcgtgtgaaaagtggagcatgggacgacaatggtgtcttcatttacactactctgaaccacatcaagtactgtctgcctaatggagatagtggaatcatcagaaccctggatgtcccaatctacatcaccaaggtgtttggaaatacaattcttttgtttggaccgtgattgggaaaaac

SEQ ID NO: 131337 - DNA, 630 bp, Arabidopsis thaliana
  unsure (1)..(630): unsure at all n locations
atttttaagaaaataggtgacaaacaaacttccatatanggtctttacgacctctaccacatcacaaagtcatatccaaaggttgatatattttcccaacttcaaaatgctagtgaagcgtttcgtacttacatcagagatggtctggcacaggttgagaagaatgcagctgcgggaagaacaccttcaagcctaccgttgtcaactcctcccccttcgtccttagctcttccatctcctgatattccttccttgtcctctttagatgtgaagcctttgatgaaccctagatctgatttatacacagacgacatccgagccagtaacatgaatcctggagtgatgacagggacgctagatgcaatcagagaaaggatgaagaacatgcaactggcttcatcagagccagtaagcaaaccgctgatgccaacaaacgataacttatcaatgaaccaacagagcgttcccccgagccaaatgggacaagagacagtccacacacacccagtggttcttccaatggatgagaaagcattgtccggtcttcaagcccgtatggagaggctcaaaggtggatcactggaacatatgtagaactagagaccccaagctttggagtctgaagttaca

SEQ ID NO: 131338 - DNA, 522 bp, Arabidopsis thaliana
ggtgccacggccccccctcgagttcgacggtatcgcataagcttgatatcgaattcgcggccgctttagtctctgttgtaaactgtcgtgttttaagttctgtgtctgaagataacaactcctccatcttggtctccgatggagtccaagacagatccagcaacgactttctcagtcttaatccgccaaatctttccgagagtgcttgtgttcatgtctacgggtttcttccatgtgcagacaatattgaaggatatgtcttccaagttttctcctttggttgtctattgataatcggtgaatactttttgtctaaaggaaggtctaagctctttgtcatcttcgaggtcggtttctttggcggaattatcttccctctacttacaatgttcccaagaattgcccttattctatccactggactgataggaagcccgtgaaatagcaaactcgatgacgggtaataatgttgcagttactgttggatactctgtctttgctttgacaatgcaatggggagct

SEQ ID NO: 131339 - DNA, 525 bp, Arabidopsis thaliana
cccacgcgtccggtcatcggatctatggctgtggctcaagtattttcatcggtttatttcagcgcatggtccaacaaatcttacttcaaacctcttgtgtttagcagcatcgcactctttatcggaaatttgatgtatgcgttggcatatgatgccaattccatagcgcttcttttactcggccgtgtctgttgtgggttgggatcagcaagagctgttaaccggagatatatcagcgattgtgtgcctttgagaatccgaatgcaggcatcggcggggttttgtgagtgcaagtgctcttggaatggcttgtggccctgcgctttgccggtttactccaaatcaaattcaagcttttacaagtttacattttaaccaatctactttgccggggttgggttatggctgtggcttggctggtccatttggtatggctatgcatttcattcagagagccgttgcgtgacacagaggatggagaaaaaaacaatcgaaatgaaacaacatcagcgacagatagagtag

SEQ ID NO: 131340 - DNA, 782 bp, Arabidopsis thaliana
  unsure (1)..(782): unsure at all n locations
cacggttacgcaaactctctctgagaaaatccccaaatctcatgaaattagggtttcaatcattctttgaacgcaaaattagaaacctcctctccatccgccacgaatctctagggttcttctgaaggattagatttctgggttttagaaatctgtctctcgtcatcaacaattcacgtgatgccgtcgttaacactgagcattcgtttccttttcttagttctctgcttgatcggtttacaagctgcggatgatttcccagataaatcccgcggtgacgtatgccctcgggttaaggatcggggtggatgcacaatcaactgtttccgggcggatccggtttgtggaaccgatggagtcacgtactggtgcggttgtcccgacgcagtttgccatggcgctcgcgtagtcaaaaaaggagctttgtgacacaggtaatgcaggaagtgcttctgttcctggacaagctttgttgttgattcatattgttggggctcttcttgctcggactctctcttctcgttggtggtttctgatctctagagagttagtggtggaattagacaaggaattagatagatcacacgtcctgagtttgttgtatgtgtatagttgagtattgttttgctttgtgtgctatatatatgtaatagattctgttgcagttcattctaataatgaagatttgatcgaaaaaaaaaaaaaaaaagnnnnnnnnnnnnnnnnnnnnnnnnnnnnnnnnnnnnnnnnnnnnnnnnnnnnnnnnnnnnnnnnnnnnnnnn

SEQ ID NO: 131341 - DNA, 954 bp, Arabidopsis thaliana
ttgccaccttctattctcagccgcggtattggctggcagggagttgcgattctgatatcaggattgtttggtactggtcatggttcctctgtctctgtagaaaatgccactattggccttgacacgagttggtagtcgaagggttgtccagatagctgcaggcttcatgagattcttctctattctcggaaaatttggagctgtgtttgcttcaattcctgcgcccatcattgctgctttatactgtctcttcttcgcatacgtgggagctggaggtttgagtttccttcaattctgcaacttaaacagcttcaggaccaagttcatcttaggtttctctgtcttcctgggcttgtccatccctcaatacttcaatgagtacaccgcaatcaaaggatatggtccggtccacactggggctcgttggttcaacgatatggtaaatgtcccgttctcctcagagccttttgttgctggaagcgtcgccttcttcttggacaacacactgcacaagaaagactcttcggtaaggaaagacagagggaagcattggtgggacaagtttagatctttcaaaggtgacacaagaagtgaagaattctactctctacctttcaatctcaacaagtacttcccatctgtctaaaagggaagagaagagcaaaaaagataactggaaaacaaagaaaatggtgaaaactcgagtttcgccattgttgacttggcctctgtgtcgtggttcgtttgttcagttcctttcacaactttggaaactttaaatatctcatcacattctatagtcttatttacaagaatgatgaatcttcttaaagagcattgttgtttgcgcccccgaattcgaaaaaaaaaaaaaaaaaaaaaaccaaagggcggccgctctagaggatccaagcttacgtacgcgtgcaggcgacgtcatagactcttctatag

SEQ ID NO: 131342 - DNA, 585 bp, Arabidopsis thaliana
  unsure (1)..(585): unsure at all n locations
atgncgccccnggccgtgtcacgttgtatcccgtccctcnncctttgtgctgaccgcncttctctggncacncctgcccagaagccctcgatagggaaggacagaggcaagcattggtgggacaagtttagtctttcaaaggtgacacaagaagtgaagaattctactctctacctttcaatctcaacaagtacttcccatctgtctaaaagggaagagaagagcaaaaaagataactggaaaacaaagaaaatggtgaaaactcgagtttcgccattgttgacttggcctctgtgtcgtggttcgtttgttcagttcctttcacaactttggaaactttaaatatctcatcacattctatagtcttatttacaagaatgatgaatcttcttaaagagcattgttgtttactctctctctaatgcttttgtctttgtaaatccgagggaacagaaacactactttgtgattttgattagtttctaaacaaatctttagcttaattaaaaaaaaaaacaagggcggcacgctctagaggatccaagcttacgtacgcgtgcaggcgacgtcataactctctantag

SEQ ID NO: 131343 - DNA, 432 bp, Arabidopsis thaliana
caattcagatccaatttcaatccttctccgtcagattatctcctcggccacgatgtctctccgccgcactatcctcgatctccaccgtcaaacccagagagccactctctcaaagtctctacctttctcgatgagtcacatctcctccgcatccgccaccgccgccgtgagaaacccactgggaagagacctctcttcaatccccttcgcacaagcccagaaactgaaaccagattcaaccaatctcgtcaccgatcgctcgatttcgtcttcaattgggcaatctgaactcaacaaggcagccaaattctcgcgtcaatcgtcttctcgaggttacactaatggctctttcttacgcaaaacccctgtagtctttcacatacattaaggaatggaagatattttggcggattttgtttcacctagaaatga

SEQ ID NO: 131344 - DNA, 537 bp, Arabidopsis thaliana
cggacgcgtgggatctccaccaccaccatacgtttacagctccccacccccaccatactactcttcttcgcctaaggttaactacaagtctcccccaccaccatacgtttacagttctccgcccccaccatactactctccttctcctatggttgactacaagtctacccccccaccatacgtctatagcttcccacccctaccatattattctccttctccaaaggttgactacaagtctccaccactaccatacgtttacagctccccacccccactatattactctccttctccaaaggttcattacaaatctccaccaccaccatacgtgtataactctccaccttcaccatactattctccttctccaaaggtcacttacaagtctccaccacccccatatgtctacaaggcgccttactattgattttgaattgtttcattaaaaggaaacgttgattgcaataatttggttttatgatttttttctcttgaatcttctgattttgttcctttaattagttccttatcttg

SEQ ID NO: 131345 - DNA, 158 bp, Arabidopsis thaliana
tgaaattgggtgaaagatgggtaacgctcttacgttcctctacggaaaatgctgcaaacccacaacaaccgatgactctcttggtcctcacgggcgtcttcgcccccaccgtctgtgttttatttcttgctcacgatctcttttatctatttagatta

SEQ ID NO: 131346 - DNA, 658 bp, Arabidopsis thaliana
  unsure (1)..(658): unsure at all n locations
agaatatcatctctcctgacttctcgacacctattacacaggcgggtcaggctgccggcaagaaagtaccgtcctggcgagaatggtccaaaggttccatttttcactgatgacgaagagagctcaagtacaccaaaggcggatgctcttttcattccaagggagaaccctagagctctagttatacgcccagttcaacagtggtcttcaagggataaatcaatacttccaaaggaacaacgcccgactgctccattacatgacaatgggaagagtcccgacatggccactgatgcagcaaaccatgacagaaatggtaacggagaacttggtgctactggggaaagaattcatacatcagtcaatgcaaatcagaaaccgaatggcacaacaccgctcagatcaggctagcgagaaagagcgtccctacaaaactctaagtggacacagagcaggagaagccgcaattgtttatgagcacggtgcagatatcgaggctcttatgccgaagctacgacaatctgattatttcacagagccacgtatccaagaactagcagctaaggaaagagcggatccgggttacttgcaggcgggtaagagactttttagtgggacgacacggttatngtagcataaagttcatgggagatacaga

SEQ ID NO: 131347 - DNA, 766 bp, Arabidopsis thaliana
  unsure (1)..(766): unsure at all n locations
ctgcccgtgcttggaagatgtcaaaccagatacgcccatccaactatacactgatgcttgtgaaattcttgaagaggatgggagggaccaaatggcctttgatctgtaccgtgcttgtgctaatgtctacattaagcttgagaagttcacagatgctgcaacctttttcttaagattgggtgtagctgctgataagtgtgatgcgacaaatagccagtgtaaggcctatctcagtgcaatcatcttatatctgtatgctcacgacctgcagcaggcagaaaaatgctacaatgactgttctcagattgatgcctttctgaagagtgatcagagccgaagtgctagtagacttctctccgcctataatgaaggtgacattgaagaaatcaagaaggtggcgagtgcaagcactgtctcgaatttggatcatatgattatcaagttggctaggaagctacccactggagatgttactgcaattcagatgaacactaatgacgatctagacgaggatgatctcacttaaagtttctcctctttgtacatattcatatttacacttggcttcttttcagtccaaagattcaaaaaaaacatattatcgtttgtcccaagtactgtgggaaagattgattatataggctctaaattcgaatttatgcatgtatttttcttaaaaaaaaaaaaaaagnnnnnnnnnnnnnnnnnnnnnnnnnnnnnnnnnnnnnnnnnnnnnnnnnnnnnnnnnnnnnnnnnnnnnnnnnnn

SEQ ID NO: 131348 - DNA, 429 bp, Arabidopsis thaliana
  unsure (1)..(429): unsure at all n locations
atctctatggatgccaaaaagttggatactggcccgagagatgcaatcaactggctccctgacgagattctgggcaaaatcttgtcattacttgcgacaaaacaggctgtttcaacatcggttctttctaaaaagtggaggactctctttaaattagtggataccctcgagtttgacgattctntctctggaatgggtgaacaagaagcgagctatgtgtttccggagagctttaaggatttggtggatccgaacagtagctttgcagtgtgaattatcccgatcaggaagtttgtcactaaaaatgtcattgtttggcagggncgattgaacaaccggaaaggctttattntggggccccctgggntaatcgaaatttcngtagggccncgntgtntnaaaaagtnggnactaaagggtncaantatc

SEQ ID NO: 131349 - DNA, 651 bp, Arabidopsis thaliana
  unsure (1)..(651): unsure at all n locations
tctctacgactcactatatggaaagctggcacgcctgcaggtaccggtccggaattcccgggtcgacccacgcgtgcggaagactcagaaaacagaaaatggcgaattcactatgcttcttctcttctcctcctaccttttgcttccaatctccaagcaaaaaccctaaaccttctcacttcttctcaactaatgataacacctcttccttggtacagaagagagaactgcttcagacttcaagatcccaaagttttgaagttaaggccgcaaacaataatcctcagggcactaaaccaaacagtttagtttgtgcaaattgtgaaggggaaggttgtgtggcatgttctcaatgcaaaggaggtggtgtgaatttgattgatcatttcaatggtcagtttaaagctggtgcactctgttggctttgcagaggtaaaaaggaggtgttgtgtggggcctgcaatggggctggtttcattgggggggttctttagcaccttcggtgagtaggtaggaataagcttttttccaggaacgccttgggttttgattccattgggctctaaaaaacaccnctttttaaacccctggggggggggtcattttttcnnccatgnncttnttnccaaaacatgattnctatttgnattg

SEQ ID NO: 131350 - DNA, 579 bp, Arabidopsis thaliana
  unsure (1)..(579): unsure at all n locations
ttaggacacactatagaagagttatgacgtcgcatgcacgcgtacgtaagctcggaattcggctcgagaaaaaggaggtgttgtgtggggactgcaatggagctggtttcattggtgggttcttgagcaccttcgatgagtagtagaaataagcttcttccaagaagactggatttgattacatggactcaaaaaacactcttttataaaccttagaagaagtaaatctttctctctatcaatgctcttctttaccaaaaacatgtattactatttgttattgcacaccaaacttttgttgtatttttgtttttcagattcttctctctctctctctcgttttttgtcttctacaaattgctaaaagtctatagcacctctatggtagtcttgttgatggcttgaaatgttgaatggtttagagaagaattaatcaaagttttgttctattctaaaaaaaaaaaaaaaaaaaaaaaaagggcggccgccgactagtgagctcgtcgacccgggaattnnnnnnnnnnnnnnnnnnnnnnnnnnnnnnnnnnnnnnnnnnnnnnnnnnnnnnnnnnnngg

SEQ ID NO: 131351 - DNA, 699 bp, Arabidopsis thaliana
  unsure (1)..(699): unsure at all n locations
aacccacgcgtccgggattttgcttacattacatactattgccctcactgtaatgctctgaacaaaccgaagcattcagaggagaatgtacttcttcctgctatttccgcttcaccaatcacagactctctgccactgattgagaccagcgaagtggttaatagcagcagctcgagtagtgaacgtggaagtagccccactccagaaataaaagaggaagctgcaattactgagaccgggacaccgagctgaggaagatccagtgagctaagaagaaggcttagtcgtgttggtgctacagagaagagattttgtgtgtgcatgtgtgtttgtggatgcgagtactcattcaggtaatcttatgctatggattgctaatatatgaaggtgcttacagttttgattctggtttgtttctatacaacaagacaatagggttttggtgggtaaatatgcgattctactgtcgtaaacgacgattgttatacgttttgggggtttgaattctaattatcttttaccattacagattgtctctgtttctgttaaatgtattcactcttggatgatggatcattcccttttcgattttagcactacgagcctacacctttcttattaaaaaaaaaaaaaaaaaagnnnnnnnnnnnnnnnnnnnnnnnnnnnnnnnnnnnnnnnnnnnnnnnnnnnnnnnnnnnn

SEQ ID NO: 131352 - DNA, 806 bp, Arabidopsis thaliana
  unsure (1)..(806): unsure at all n locations
ctcaggagtatttgggaaagaatctcaatgttaaagagcttgtcgagacgaaagaatcactctttatgggctcgattcgagtcaaccttaactactaccccatctgccctaatccggacctaacagttggtgttggtcgccactcagacgtctcttctctcaccattctcttacaagaccagatcggtggtctacacgtgcgttctctggcttcagggaactgggttcacgtgcctccggttgctggatcttttgtgatcaacatcggagatgcgatgcagatcatgagcaatggtctgtacaagagcgtggagcatcgtgtcttagccaatggttacaataatagaatctctgttcctatctttgtgaacccaaaaccagagtcagttattggtcctctacctgaggtgattgcaaacggagaggaaccgatttacagagacgtcctgtactctgattacgtcaagtatttcttcaggaaggcacacgatggaaagaaacccgtcgattacgccaagatctgatcataaataacctcaaggagttcgatgtctttttttttcgctggttttgtttcccgtttgtgttgtgttagtgaataaaagaacagagaagagagacataggtcatgtcttctggaaccagtttctctggtcaggattgcgttgtataaattgctgtcatccatcaatacagtttctcttttatcaaaaaaaaaaaaaaaaaaaagnnnnnnnnnnnnnnnnnnnnnnnnnnnnnnnnnnnnnnnnnnnnnnnnnnnnnnnnnnnnnnnnnnnngtacctaa

SEQ ID NO: 131353 - DNA, 552 bp, Arabidopsis thaliana
  unsure (1)..(552): unsure at all n locations
cattttcagacgaaagcaatcagaaactcaggtgaatcagaagcatgattcgagttacgaaaccaaaagcgatcatcgaatcactgagttaccatcttatccaaagatgctccgcaagtggaactcctaaaggaaaagcaaagctgaagacaggtcagccattgaagcgtaacaaactctccatcaagaaaggtggtggcggcggcggagcacctgttgaaggagaggaagcagttaaaggaaaaggtagaatttccgatgagaagcagaaactctacgagcaatgcttaaacgctccttgtcctgttcgctacttgaccccccaagagatcgagcgtgaggcgcaacgtgagaagctaggtttgattagtaaagagaacaacgagatatggagatccagaagaaaggaggagtatgcttgcccgttctgttcagactattttgatatcgtctctctatgctgtccctaaattccattcacccatggtacccggacctcnaattcacttggacttaaccaggctgacttgctccaaaggtggggatccccac

SEQ ID NO: 131354 - DNA, 888 bp, Arabidopsis thaliana
  unsure (1)..(888): unsure at all n locations
gatgtctttcactctctctctctctctatatccaaagaattaaaaaccataataaaaaaagaagataaaaggacgaattccagaaaaaaaagacgcaaaatcgtcgtcgtcgtcttcgtctttgcatttcgtcggaatcttttgattcttgaatcggaatatctctgtttttgttttatccggactcaagatcaattcggattcttggaatttatttgattttttgttgttgttgttgaaaaagtggattctttggtttcgatttgtaataatcttcgtagaaaaaatggattctgattcttggagtgatcgtctcgcatcggcttcaagaagatatcagctcgatttcttgtctcgatctgacaatttcttggggtttgaggagatagaaggagaagatgacttcagggaggagtatgcttgcccgttctgttcagactattttgatatcggctctctatgctgtcacattggtgaagatcatcctatggatgcaaaaaatggggtatgtcccgtttgtgcggtgaaagtgagctctgatatgattgctcatataaccctacaacatgcaaatatgttcaaggtgacgcggaaaaggaaatcaagaagatgcggggctcaatccatgctatcgatcttgaagagagagtttcctgatggaaattttcagagcctatttgaaggaacatcacgtgctgtatcctcttcttctgccagtatagctgctgatcctttactgtcttcattcatttcaccaatggctgatgactttttcatttctgaatcaagtctatgttgcanaacaccaatttctgccccagaaaaacattggaatcccaaattttgccctgaaaagggaaatgtttgaaaaaaaccatttctcctttt

SEQ ID NO: 131355 - DNA, 348 bp, Arabidopsis thaliana
  unsure (1)..(348): unsure at all n locations
tttnggnggncctngtaaggaattcntgggtcgacccactcntccgatttgtaataatcttcgtagaaaaaatggattctgattcttggagtgatcgtctcgcatcggcttcaagaagatatcagctcgatttcttgtctcgatctgacaatttcttggggtttgaggagatagaaggagaagatgacttcagggaggagtatgcttgcccgttctgttcagactattttgatatcgtctctctatgctgtcacctaaattcaattcacccatggtacccggatcctcgaattcagcttggacttaaccaggctgaacttgctcaaaaggtggggactacccaccaaa

SEQ ID NO: 131356 - DNA, 277 bp, Arabidopsis thaliana
agaaggtttgctatattatctggacctactatacctataattggtgaaggtgatgaagaggctaatgataggtatgtagagcaacgtggcggcaagtgccgaagctgctgtagaggaagtcgtcaggcgtggagtggctgatcgaagcaaaattgcagttgggggacactcctatggagcttttatgactgctaatcttcttgctcatgctcgctatctttttgcctgctggtttgccagatctggtgcttacaacagaacacttacgccctttgtt

SEQ ID NO: 131357 - DNA, 712 bp, Arabidopsis thaliana
cttcttcgacgacgttggttcttcttcctttgtcctgcgccgcgatctctccttctccaacttccctcgtcctgtccaaagaaaatgccaaaggttaaaactaaccgagtcaagtacccagaaggatgggagttgatcgagcctactcttcgagagcttgatgccaagatgagagaagctgagactgattcacacgatggtaagagaaagtgtgaaactttatggccaatcttcaaagtttctcatcagaggagtcggtatgtatatgacctttattaaccgaagggatgaaatatctaaagagctctatgagttctgcttggaccagggctatgcagatcgcagtctgattgccaaatggaaaaagtcgggatatgaacgtttatgctgcttgcgctgcatacagccaagagaccacaactatggaacaacatgtgtatgccgtgttcccaaacacttgcgtgaagagaaagtggtcgaatgcgttcactgcggctgtcaaggatgcgcgagtggcgattaaattcaacatagctttattcgctatctctgactgtttgttacaatcttgtcacttgttaaatctggattctgtagtattccataaaggctttaaaaccctgactaaaaatccccttgctcgtacttatcaactctgggtggtattgcaaataaaaagaacgttccggtttggtatataattgaaagtaaa

SEQ ID NO: 131358 - DNA, 597 bp, Arabidopsis thaliana
  unsure (1)..(597): unsure at all n locations
caanggggcggtcnatgngtcccttttacgggcaacntgaccgacnttgggttcagcccccgctngccnttaaaattctctgcgcccntcggcggcattncnccgngngngaaaccccttncnccgatcggattaancctaaccggagaaaggaggaaaaaccttaatcgaagtccgctcagtcttncctaattggggnatcggattcccatatgggctaaagctcnactggaatggaatctcttatgaaatccactaagatcaatctctataaggatggtagacatggaaaagcttggggaattgttccacaaagatggattgcgagctgcggaagctccaaagaagataagcggagttcacaaacgttgttggaagtatatcccaaacctgtcaaagactactcctgcaacaaccactgctgatgttcaagctgcctgatctgtttacttccattgttgtgggtacttcttgatctatctgtttgcggtttctttttattgggaagaagatacagttgttgtgacttgatagtttctttgaattcgtcgatagctttgtaggaaatgatccataatctacggatgatgaccgagt

SEQ ID NO: 131359 - DNA, 523 bp, Arabidopsis thaliana
aatagagagagagcgatacaatggcgatgacacttatgaacagagcaatctctagaaccgaaactgttggtgctttcagtctctcgcttagtctcttaagaaatttctctgcggcgccgtcggcggcatctactccggcgagtgaaaaccctagctccgattcgaataaacctaaacgaagaaagaagaaaaacttaatcgaagtcgctcagttcttacctaattggggaatcggataccatatggctaaagctcactggaatggaatctcttatgaaatcactaagatcaatctctataaggatggtagacatggaaaagcttggggaattgttcacaaagatggattgcgagctgcgggagctccaaagaagataagcggagttcacaaacgttgttggaagtatatcccaaacctgtcaaaggctactcctgcaacaaccactgctgatgttcaagctgcctgacctgtttacttccattgctgtgggtacttcttgatctatctgtttgcggcttcttt

SEQ ID NO: 131360 - DNA, 383 bp, Arabidopsis thaliana
atactctctgcgtctctaactcctcgtgcactctgacatcacagatatggcttgtgttcggtcgattgactctttaacttctggcaaccattctcaacgaaatgttcctcgctcacgcattgtcttatcttcatgctctgttcttcccatcaaaagctcatctttcactggatcccctgtttctctcccgcgggctcaaccatcatcccgaacagctctaagaccgatgaaacccgtctctatcacgatgatggtaaagccggcgctccaattcatccaagggacggatgagatgacaatcctctgatgttaaggttgactcgatcaagagacgggaagcaacgggaatggcactgttctcttttggaccaaccatacgtttt

SEQ ID NO: 131361 - DNA, 864 bp, Arabidopsis thaliana
ccgtttgcagtaccggtccggaattcccgggtcgacccacgcgtccgctaatggcaaacttgggatgggagctatgaagctaggtcggttagccaaaagtttagcaggtgacgtaaatgggaaacggcgagaaaaaggacttctccctagatcagttagagctggaataattggataccctaatgttgggaaatcatctctgatcaatcgtctattgaaacgaaaaatttgcgcagcagctccaagaccaggtgtaactagagaaatgaaatgggtcaagcttgggaaagatcttgatctcttagattcacctggaatgcttcctatgcgtatcgatgatcaagcagctgctataaagctggcaatttgtgatgacattggagagaaagcttatgacttcactgatgttgctggaatccttgtgcagatgttagcacggattccagaagtaggcgcaaaggctctttacaaccgatacaagatccagctagaaggcaactgcgggaaaaaatttgtgaagacgcttggtcttaatttgtttggtggagatagtcatcaagctgcatttagaatactaacggattttcgcaaaggcaaattcgggtatgtctcgttggagagacctccactgtgatccaagttagtaagagatatgctcaaacttatgtgttaatttatgtatgcaatatatgtcttgatgtatgcatacttgtgtattccggttgtcttagaggacatgataaatactagatatagacccaatccatgacgacatcagtcagaagctgctaaatgctaaccctttttctcttaagcccaaatgtatgaataatttgttcatgtaaaatatggttaatttttttt

SEQ ID NO: 131362 - DNA, 889 bp, Arabidopsis thaliana
  unsure (1)..(889): unsure at all n locations
gnnnnnnnnnnnnnnnnnnnnnnnnnnnnnnnnnnnnnnnnnnnnnnnnnnnnnnnnnnnnnnnnnnnnnnnnnnnncttttttttttttttttagactaaagtagctcatgtatgcttcaaactgaatccaacaatgccacaaacaaagcagatacaacaaatgcagagtttcgatatattcacattcacatcttcttgttccatgatttaaaccctatcaaacaagagcttatggatccaattaagctctgtttctctgcaccacaatacaaatctttaagcttgagctgcaatcaattaagcttctgctcaatgtaacactctctctctgattgtactaagctatcttcatcatcatcatcgtatctcacatttccttcatagaattgtctcaattcatcacccattctcaatcctctcataaccatctctttcacaacaatcatcgcttcttcatacctcttcctcttcacaagcttaccagccaaaaaaccaaaactctcactatccaacctcaaatcttttccggcgtaagccatcacaaactccaaacccagcgcataatagcctccctccactaaccccgttataacgtgcgcatgcgtcgagtacaacacagtcacaccatcctcctccatcctcctcaatatcgccatcgccgcttccactttacccgccctacacgcgccgagcacaagcgcgtcgtagctacgcgaatccggcgaattcccgtcttcttcaatcttacgcatcacctcgctagccgattccaattcgccgtcgtaacaatgcgaagtaaggaagtaattgtacgccgtcacatccatcgaaaccggtttggatctcattgattcaacaaactttgaagctgttttcgattttgtact

SEQ ID NO: 131363 - DNA, 384 bp, Arabidopsis thaliana
  unsure (1)..(384): unsure at all n locations
ancncacagaaacnanaaannanaaattnnanttttttttttaatttataagatctcaataattgaacattgataaccaactagtggcagagttacatatattataacaattcttatgtcaaaaacacatatataacaacagcaatgcaaaagcttaatcatataatttacttgcctcggccaaaaagcttccaattttggcaatttcttggatcttaccttcatgtgttgatgtcgtttgtgtctctagcgcatcttgtaatggtgtcacagcctctgctgtaagaattagcttgtccagagcgacaatcgtagtaagaagctcctggtttctgacaaggaaccatgtctctccttaacggttcgtaaccgatgtaccgtttt

SEQ ID NO: 131364 - DNA, 354 bp, Arabidopsis thaliana
  unsure (1)..(354): unsure at all n locations
caacaatggcttcgtcatctacaagtatctctctccttctcttcgtctctttcattcttcttctcgtgtaactcgcgtgcagagaatgcgtccagtggatcggatctcgacgaagaattggctttcctcgccgcggaggaatccaaggaacaaagccacggcggcggttcggaccacgaggaggagcgcgatcatcagcaccgagacttcgagaattacgatgatctcgagcaagnaggcggcgagtttcatcacggcgatcacgnttacgnggagnagccgttancaccagtcgacgcgaaagacggtggcggnttctnaaccaaggacaatttcaccggagttcgtcgggca

SEQ ID NO: 131365 - DNA, 458 bp, Arabidopsis thaliana
aagccaacatcaacaattggaaggaagcaaaatacggtaaccagagacaaggtagaaaccgaaatgattgcgcgtggtcgtcatgatccttgtgttgttccacgagctgtgccaatggtggaagcaatggtggctctagttcttgtggatcaattgatggcgcaatacgcacaatgccatttgtttccaataaatccagagttgcaggaacctctccagatagagcagccgcaaaatgctactgctttgtaagcaaatctcgagaagataaagagtcatagagagtgagagttcgcttttgttgtgtgattattatgctgaataaaaaaatgttaattttgtgcccaccagaaaaacaaagaccatgattttttataagaggatttgcttctatatcaatcatctaaatgtgattttaccacgaacataaactttttttattttgtatattttatttt

SEQ ID NO: 131366 - DNA, 340 bp, Arabidopsis thaliana
gccgcatcctgatacctttgactttttatagctagccatgggggtccaaaaccaccacgatctgagcctatcttgtttcgccaacctacagctggcttgcaatttcaacagggattcgtgaaggatactgatgagagagcatgtgcatacattgcgggaccagcgccaaatcgatggggctttacagttgacggggatgacctttttcagtctgttagcaaacttcctgtagctcatgatggacttttgaaatctgaggaacaattgctagagggaggagacagggagttgcaaaagaagcttcttgcccacccttttttctttggagttacaatgggtt

SEQ ID NO: 131367 - DNA, 1017 bp, Arabidopsis thaliana
  unsure (1)..(1017): unsure at all n locations
caccacgctccgggaatgatttaatttcccattcttcaaccgcaaacccgttaaggaagttgaagagctggttccatttgtaatcgcttctatttcttctacaataacggagttgattggcatgggaggaaaaacctttctagtgcccggagagttccctatcggatgctcagtagtctatttgacattatataaaacatcaaacaaggacgaatacgatcctacaacaggatgtttgaaatggttgaacaagtttggcgaataccatagcgagaaacttaaggcggaactcaaccgacttaggaagctctaccctcatgtcaacatcatatacggtgactactacaactctcttcttgcgcatttttaaggaaccagccaaattcgggttcatggacagacccttccctgcttgttgcgggatagggggaccgtacaacttcaacttcactaggaaatgtgggagtgtaggagtgaaatcttgtaaggatccttcaaagtatgtgggctgggatggcgttcatatgactgaggctgcatacaaatggatagctgatggaatactcaatggaccatatgcgaatcctccttttgatcggtcctgcctcagatctgagattaagaaggagtcattgtacaatcaaagtactctgacacaagcttgtgtgaaactttgacagacaaaagtgatgataagaatattccctctattccttattaatccaaattcaagcaaacaaatttgttgcaaaaaagatatgtttctaggtttctatgtatttttttattacttattgatgatgaattgtagaccttaattttctttttcttttttacttttattggtttaaatttgttaatcataaattgatgtataaataatcaataaagaatatattttcggnnnnnnnnnnnnnnnnnnnnnnnnnnnnnnnnnnnnnnnnnnnnnnnnnnnnnnnnnnnnnnnnnnnnnnnnnnnnnnnnnnnnnnnnnnnnnnnnnnnnnnnnnnnnnnnnn

SEQ ID NO: 131368 - DNA, 293 bp, Arabidopsis thaliana
agacattgcagaaattggaagaagaagaagaattgtgatgttgagaactcgccttctctggttgacgcttggtttttccgtgaccggaggttccattgctcatatcgtgtggcgtgatctctatgccgaacgtttcgctatttcttctgatatgaaggagaaattcagtgctctggaaggtagagtatcaggcttggagtctggcggctatgtgatcccgtattcagctcatgttgagagttgacgactcctgcaagtggtacctgcgcatattaatcaaagtcttgtctttt

SEQ ID NO: 131369 - DNA, 490 bp, Arabidopsis thaliana
  unsure (1)..(490): unsure at all n locations
cgagacttttcgtctctatccctatgcaacccacacaaataagcttccctgcgtcttcttctcagccactattatctccgccggcgaacaatttcaccgatggtggagctgggggattatgtcttacacggagaatcagagacagttccgtggtgacgcgagcagggcctagctcgagcagctacttgctcgcgttcgccattcctgctactcttatcgccgccactgtcttcacttcaatcaaaatcgctgacaaactcgacgaagatttccttgaggatattgcgttgaaccaagngataaaagcagcagaaaagggagagaatggagaaggtgatatctcactggacgatgtgattcaagaacctgtgctttaaacggacacgtaaccggcctaaacggtgaagtttaaaacggccnncanaagtttttttaannatnggnatagcccntttnaactngaatnaaangtgggttttttttnaaanaa

SEQ ID NO: 131370 - DNA, 688 bp, Arabidopsis thaliana
  unsure (1)..(688): unsure at all n locations
cagaaagcactagaagaggcggaagctcttaagaagcttactgctagacaagaacctgtagtggattcaaccaagtacactgctgctgacgtgcgcattacagaccagaagctgcgtctatgtgacatatgcggaaaaatctgttgtactgcctttagtgatcgtcggttagctgatcattttggagggaagcttcacttgggttacatgctgatccgcgacaaattggcagagcttcaggaggagaagaacaaagttcacaaggaacgggtcgaagaaaggagatcaaaggagaggagtagagagcgagaatcaagtaaagacagagacggaggagataaccgtgaccgaggaagagatgttgaccgcaggagtagagatcgtgacaggcaccatgaccaccgagaacatgacagaaactataatcagtcacgtggctatgactcaagaagccggcgcagttcacggtcccggtctagggaaagaccgagggatcatgatcgccgcagacgccatgaccgctactaaanccctgccaaagatggttgcacctggtttaagaggttcttacagatgcgtttaggatctatttggagttacaaacactttcttttttctttgctcaagtgttttaaggatttttgagattgtaacttactttaagtttgtaagaggagcttcttcagat

SEQ ID NO: 131371 - DNA, 264 bp, Arabidopsis thaliana
ctggaaagctgttcccaaagcatatccaagggctcgcagttgggaaagatccacttcttactctgcctgaaggtttggcattcatgaagccatctcttccttccgagcttgcatgaacactgttgattcatcgcatttttcgatttatcttctattcattgttttcctaggatttatctttagaccatttgctgcggaatttggatttgttttgtttaagtttcacgactttcaagcctaataactctgaatttctgggtactt

SEQ ID NO: 131372 - DNA, 899 bp, Arabidopsis thaliana
ccggaattacttggtcgacccacgcgtccggtcaagtggtaatcttttgatcccaattccagttcctaatcccccttttgagcactggtcaggtcacgcgtctgttggttccgatatctacttctttggcggatacatggaggagaatgtgcgttcctctagagtcgtgatcctagactgccggtctcacacgttgcgtgaggctccaagcctgcagatggaaaggtcggaccctgctgctagtgttattgatggaaagatttatgtagctggaggtgtcgacggtgatgatgcacgattccttgtacccgatagaagtgttcgacataaagacccaaatttgggatcataggcccatcccttactgggagaaagactggggcgctctatcaagaagcgcgtatgttgatggaaagttctacttgacgattgggatgaaggttagggcttatgatctagaggaaagtagatgggactttgctggataccagatgggtcagagttggttttggtcttgtaattgggttatagagaatgttttgtactgttatggtgatgctttccgatggtttgccactaagctgagattgtggaaagttatgaaggtgaaaggactacctaagttgtcccgtaatgtcgatgttaagatagcagattatgggggaaagatggcgattttttgggacaatccttccccttctgcttccgatacgaacaaaataattcggtgcgcggtgattgcccttgaaaggcccaacagtgaagagatttgggggacggtcgagtggcatgaggcagtgcttacagttcctgtgtcatatgagtttgaacatgctctagctgttaccgtttgatgaatgacagccttgaatgtggtgaatctttaatggtttgtgggt

SEQ ID NO: 131373 - DNA, 351 bp, Arabidopsis thaliana
cggacgcgtgggaaaagaagtagcgagcaagtgtcccttaagctcctttaggttcttaaagaccaaggaagtccctaccgggttcttcgaaatcaagactggctcgcaaaatatccgtacaccttggtgggattcgagcgtcatctatggaagcaactcgaaaacattggatagagtaagaacttacaaagacgggaaactaaagatatcggaggagacgggtctccttctccatgacgaagacggtttagctatctccggcgacattcgtaacagttgggctggtgtctccgctttgcaagctctttttatcaaagagcacaacgccgtatgcgtcgccctctaggatga

SEQ ID NO: 131374 - DNA, 388 bp, Arabidopsis thaliana
gtaactgcaccatttggacatgcctcccaggaaattgtaaacctgctgctgtgtggagaagcggttcctaatgtatttgatggacggatggatcttggaggcggcatgtttctgaaaggcatatctaagaatgtagatgtgggcttcctcacgttgctcgagtctctcaacttctgcaaagtcggtcagaatctcaaatgtcccaaatggccaatatgggttattggcagtgagtctcattacaccgtcttgtttgcacttgacccatccgtccaagaagaaaacgaacttgagctgagagagtctcagataagaagagctttcgatgcaagagaccaaagcggaggaggaggtttcataactgtggaggcctttcaccaagttgctc

SEQ ID NO: 131375 - DNA, 588 bp, Arabidopsis thaliana
aagttccaatactattggactaactgctcttaacacatggaagtacccattacctcagggggaaatccatcacgtagtaaatccagatccataccgtggagtttttggctctgatggttctctttatgctaaagatgttcaagaccacatcgagtatggtacctctggaaaagtagctggatttatcgcagagacccatccaggggggtcggcaggagctgtaggattggctcctggttacttaaagtcggtttatgaaattgttcgcaacgctggtggtgtatgcattgctgatgaagtccaaactggatttgggcgaacaggaagccactattggggtttccagactcaagatgtggttcctgacatagtcacaatggcaaagggaattggaaatggattgccattaggagctgtggtgactacaccagaaatcgcaagtgttttagctagcaagattctgttcaacacttttggtgggaacccggtttgttcagctggtggacttgcggttctaaacgttattgttaaggtgaaacgcctagaacattgtgctgaagtttgttctatattttttactacgtttgt

SEQ ID NO: 131376 - DNA, 651 bp, Arabidopsis thaliana
tctaattcgatacactatagggacagctgtgccgcctgcaggtgccggtccgctattcccggggcggccggggcgtcgtcggctgctaagacacgaaggggatataataaagcccaccatcggaggcacaagtggcatagctcaagaaagacttgcgatgatgacagtaccgaagatgtgagaagaaaacatttaaagcatcacaggcgcagtgaggtggtcacttcaagtgatagtgaggaagagagtggaagaagaaggcgaggcaaatatcacaggcacaacagaggttcagcctcctcgagtggctcggaagaagatagtgggaaaagtatgaagagaaggcaacataaaaggcatcgtttggctgagtcttcaagtgaggaagatggggcaatgagaaggactaggcatcataaacatggcagagattcagcatctgagtctgatggaagaaggtaatcagatgagaaaagagagcactacttcgacaaatgaaaatggaaaatgtctttgtttaattcacatcataagaactgaatcttgtggtaaaccatcagcacatgattactacccagatgttgggacccaaatacgatgaatattgtgttgaattactgtggtggcactctgttcttagattttcatttt

SEQ ID NO: 131377 - DNA, 708 bp, Arabidopsis thaliana
cggaatttccgggtcgacccacgcgtccgtctcaaaggaagcgaagccctagcgtcctctctctgttttctcgtttctgcgccgattcgtagtctgttgtgcgcttgcctctcctcttttggattagcatacctctcactcgcatcagatgcacttttggttatcctcataccaaaatgcagattttcagttgctttttctatccaaatggactgcaagaagttcatccagatggtcgaggagaagaaacgaagagttcttgagaacgcaagaagctcctttgaaatggggagcagaagctagaggcggctgcgaatgccaaagcagacacagaaactaaagtgaagagatcaaagggccctaagagaaaacaaagggctgcgtctgaatctagctcagaaagtgatagtagctctgaggtgagaagaaagtctagaagatctcacaataagcaccgaagacatgcacactctgattcagatgacagtgataggaggaaagagaagaaatccaggaggcagaaaagaaggtccttgagtccaagcgatgatagcactggtgattatgaaagtgggtcagaggatgagctgaggatgaagataaagcaccatcggaggcacaagtggcatagctcaagaaagacttgcgatgatgacagtaccgaagatgtgagaagaaaacatttaaagcatcacaggcgcagtgagg

SEQ ID NO: 131378 - DNA, 451 bp, Arabidopsis thaliana
gctaagatcaaatcaggaatggtgctcagaaacttaaccatttcttacgaaatcatcaaatctctgaaacatgccaaagaacatagtttagggattcaaatccgatggatctcgagcctgaaagtggtatggaagaaagacacgaggctagacgaagccatcgagcaggacaagcgttacaagctctgtgctcgggttgtgaaagaagtcctgaacgagccaggtcaagtcattcctctcagatacctcgaaaaacggcgcgagaggctacgtctcactttcaaagctaagagctttgttgaaatgaacccttccctgttcgagatctactacgatcggatcaaacccaagttcgatcccgttcaattcctccgccccacgccttgttttaaagtttttctcggcgaatagcatagattttctttgagaatgagcttttacttgttttcat

SEQ ID NO: 131379 - DNA, 439 bp, Arabidopsis thaliana
accatggcggctcaacttcaacctcctttgatcttcgagacctgtcacatctctcccccaaagggcgaccgttccatccaccactctgcgctctcaccttcttcgatgccccctggctctctctcccactcgccgattctctcttcttcttctcttaccaaaactcaactgaatctttcctccaagactttgtacccaacctcaaacattccctctccatcactctccaacatttcttcccttacgccggtaaactgattatcccgcctcgtcccgaccctccatatttacactacaacgctggccaagactctcttgttttcaccgtagcagagtctactggaaccgacttcgaccaactgaagtctgattctcctaaagatatcactgtgttgtatggcgtctatcccactggtttcttttttattacgatttttcg

SEQ ID NO: 131380 - DNA, 372 bp, Arabidopsis thaliana
cttcggtacagagcaaatcacagctcccgatggccgccacgtcatcatcaccgccgtgtaacatctccgcgtccgtccctcctcctccgtcaacctggctcgctcaatccttaaagtgttcggtttattaccacctgtaagtaggaataaccgtaaactcggccggttaacggtgacccggtctaatctggcgcaggattttcttggtgacttcggagctcgtgacccttacccggaggagatagcgagtcaattcggagataaagtgttgggatgccaaagcactgagcacaagattttgataccaaacgcatctggtttgtctctcttccagcttcagtgttcccctgttttgtcttcacagccttcttt

SEQ ID NO: 131381 - DNA, 454 bp, Arabidopsis thaliana
  unsure (1)..(454): unsure at all n locations
gcggcgattcctctcaaagctccttctcttcctggaacgagagagtgttctcccttccttaaccggttcgtcactcatcaaccggttaatttcatccggaagtttcatccttccttagatgaagcatcgttctccagacggggacgaaccactgttgttcgcgttttggagacggagaagagtacgaaaatagagaagcctgagcctccggtgaaattgattgctctcgtcggaaaaggagaagtaagccccactccaatccccctctttgggaagaaagtttatgctcccacactggcgagaaagatttgaaatgggtttgatgaaggatatgaaatgctcctcctttgatgaatgaaattgtgagtttccaatgattcagagagcttttaatcttgacaccggaactgaatccnantgaattcttgggtngtccgntgnngtttataccccc

SEQ ID NO: 131382 - DNA, 496 bp, Arabidopsis thaliana
caaaataaaagcatatagccatatatgttgataccgaaacaagatagtatccaaatagaagagacaacattcaacacagtactgtgaagcaagtgtgatccgaaaatgaaaagagaaagttcttagacatacaagtgaaggataaacattatctgaaaacaggtcatatcctagccacataagaattcgcctgtgtcacatatctcacccaacgatatggattataactacttgatttctttgctatctgcaagtatttgacctgaagtttagaaacattgtacataggtatcgtgaacgtcatgctgactggccctgcttcctttgtgatattaccatgaaattcctgtgaaaatgtaagctttgcacgcagtgtatgctcacccccgccaacaatcttttttaaattccattcaagcattttgttggattccttgaaatctgtcctctgtccagcagcaccggggtctatctctcaactcgcccccggggtgta

SEQ ID NO: 131383 - DNA, 581 bp, Arabidopsis thaliana
cagcaacaacagaacaataaggtaatagaagctgctgagaagcctgaggagacgatagtaccaaggcagtttattgatttaggccctacgagagcagtaggtgaggccgaggatgtgtcaaattcttcatccgaagatagaactcgttcggggggttcttctgcagccgagagggtaagtaacgggaagagacttgggcgtgaagaaagccccgaaactgagtccaacaaaattcagaaggtgaattctactaccccgacgacatttgatcaaaccgctgaagctacgatgaggaaagcccgtgtctccgttcgtgcccgatcggaagctccgatgataagcgatggatgtcaatggagaaaatatggccagaagatggccaaaggggatcctttgtccgcgggcatattaccgctgcacgatggccacgggctgttcccgttcgcaaacaagttcaaacgtttcgcggaagacagatcaattctggttccaaccttcgggggaaccataccatccgtttccccaacccgggccatggtttttcccacccggggggggttaaatttgtttcgggaatttgc

SEQ ID NO: 131384 - DNA, 457 bp, Arabidopsis thaliana
ctctctctttcaaccaaacccctaaacaaaaaaaaaatacattttctgatctctctaaaaatctttctccttcgttaatctcgtgatctctttctttttctatatatggacagaggatggtctggtctcactcttgattcatcttctcttgatcttttaaaccctaatcgtatttctcataagaatcaccgacgtttctcaaatcctttggcgatgtctagaattgacgaagaagatgatcagaagacgagaatatcaaccaacggtagtgaatttaggtttccggtgagtctctcaggtattcgtgatcgtgaagatgaagatttttcatctggcgttgctggagataatgaccgtgaagttcccggcgaagtgggatttcttcttcgacaagaaatcttgggtttgttcgtgaaggctaccgaggatttcgtgtgaagaaggaagaacaagatga

SEQ ID NO: 131385 - DNA, 804 bp, Arabidopsis thaliana
  unsure (1)..(804): unsure at all n locations
aaatnnnggggatttntcccngngganttnnaaaccntgacntcgttnggaaacccctttcccgtcgtgcccgatcggaacccccgatgataagcgatggttgtcaatggggaaaatttggcccagaagttggccaaagggaatccttgtccgcgggcatattaccgctgcacgatggccacgggctgtcccgttcgcaaacaagttcaacgttgcgcgggaagacagatcaattctgattacaacctacgagggaaaccataaccatccgttgccgccagccgcggtagccatggcttctaccaccacggcggcggctaacatgttgctatccgggtcaatgtctagtcacgacgggatgatgaaccctacaaatttactagctagggctgttcttccttgctccacaagcatggcaacaatctcagcctccgcgccgtttccaaccgtcacattagacctcacccactcacctccacctcctaatggttccaatccttcctcttccgcggctaccaacaacaaccacaactcactgatgcagcggncgcaacaacaacaacagcaaatgacgaacttacctccgggaatgctacctcatgtttatangccaagcattgtatnaccaatcccaaattctccggggggtgcaattctcttggtngntctcccctccaanagggaagcgtttttctncaatcacacgcgggtggggtgaatanaataacgggactccacaactgaaaccnaatttcccggggggtctttgnaaccgtttnttctttcctttnaattnaatggntn

SEQ ID NO: 131386 - DNA, 1221 bp, Arabidopsis thaliana
gtaccggtccggaattcccgggtcgacccacgcgtccgtttagtagcttcaatataggaatgttgtttttgtcgtgtttcctgtttcattgatgaatgtctgacagatctgtgatatctctggttttctgttcaggcaagacgtcgtagaggacgtactccaactccaggaaagtacttggggctgagaactgctcgaggacgacataagtctcctagctactctccccgcaggtctgttagctgctctcgtagtcgtagtcgaagctactcatctgatcggggcagatcttattctccaagctatgggagaagaggaaggtcatcctcgtactcacccttctatcgacgacgcagattctactctccttcgagatctccttcacctgatgatcgttacaacaggagtaccggttcggaattcccgggtcgacccacgcgtccggaccggtccagatcctactcacgtaactgtagagctttttacagatcaccttactacatgcggaggtacaggtccagatccaggtcatactcgcctcgctacagagcacgtgaccgatcatgctcaccctactacaggggaagagaccggtcttattcaccccactaccaagggagagacagatcctactcacctgaaagtcgttactacagaaggcacaggtcggtatcgggaagcgtaagccctggagggagaagcatgtcacgtatcatatccccaaggaagggaaggaaagagagcagaagcaagtctcggaggcacgacaggcaatcttcaatgtgtcattcgaggagcgcaagatcaagcacctccagatccgtcagcccataacagtctctacttacttgaagttgacatcaatcactcacgtctggtgttgtattaagcattttgggacttgtctattccttgtatttggaattgatgacagtacctatgttatgttggctgggtgttaagatactttattacttctgtggaaaagttgcttttgcgacgagtcgtgagagaaatggaatcttcttttttgctacaaaaaaaaaaaaaaaagggcggcccgttctaaaaggattccaagctttacgtaccgcgtggcatgccaacggtcataagcttttttctattggcggtcaccctaaaattcaaatttaactggggccgtcggtttttaccaccgtccgagaactgggaaaaaaacccttgggcgtttccccaaac

SEQ ID NO: 131387 - DNA, 1035 bp, Arabidopsis thaliana
  unsure (1)..(1035): unsure at all n locations
tttagtagcttcaatataggaatgttgtttttntcgtgtttcctgtttcattgatgaatgtctgacagatctgtnatatctctggtttnctgttcaggcaagacgtcgtagaggacgtactccaactccaggaaagtacttggggctgagaactgctcgaggacgacataagtntcctagctactctccccgcaggtctgtnagctgctctcgtagtcgtagtcgaagctactcatctnatcggggcagatcttattctccaagctatgggagaagaggaaggtcatcctcgtactcccccttctatcgacggacgcagattctactctccttcgagatctccttcacctgatgatcgttccaacaggagacgcggcagttcatactcaccttactacaggcggagggcccggtccagatcctactcacggaactgtagggcacgggacagatcaccttaatacatgcggaggtacaggtccagatccaggtcatactcgcctcgctacaaagcacgtgaccgatcatgctcaccctactacaggggaaaagaccggttttattcacccccctaccaagggaaagacagatcctactcacctgaaagtcgttactacaaaaggcacaggtcggtatcgggaagcgtaagccctgaagggaaaagcatgtcacgtagcatatccccaaggaagggaaggaaagaaagcagaagcaagttttggaggcacgacaggcaattttcaatgtgtcatttgaggagcgcaagatcaagcacctccaaatccgtcagcccaaaacagtttttacttacttgaagttgacatcaatcactcacgtctgttgttgtattaagcattttgggacttgtctattccttgtatttggaattgatgacagtacgtatgttatgttggtttggtgtttaaaaaaaaaaaaaaaaaaaaaaaaaaaaaaaaaaaaaaaaaagggcggccgctctagaggatccaagcttacgtacgcgtgcatgcgacgtcatagctagtctatagttgt

SEQ ID NO: 131388 - DNA, 540 bp, Arabidopsis thaliana
  unsure (1)..(540): unsure at all n locations
ctcatatatggggaaacgtgaaattcattttactccggtgggtcgtcaggtgcagagagttctggaatatccattgcgcttggagaatcgttcgccgatgtcttactcaagaaggtcaagatactctccttcactatctccttatgacaagcgtcgtggaaggtctgtgtcaaggtcattgtctagaagcccgacgaggagtgtctcaagcgatgctgagaatcctggtaacagtttatatgtaactggattgtctcaccggggttactgaaagagatctgggagggatcattttcgctaaaagaaagggaaaggtacctgatggtcaccttgtccctggaccccatcggcctagaagaatcctcgccggatttgggttttatcccctatgaaaagtggttggtggatgccaaaccggttgcaatccagatctcctagatcaactccggttctgcaagggccggggcaaccactggtnaaaanggaanacgcccgnaaangncggaacnccaacnncaggaaagaactttggggttnaaa

SEQ ID NO: 131389 - DNA, 317 bp, Arabidopsis thaliana
  unsure (1)..(317): unsure at all n locations
agcttctctaccggaagaggtgcttcagccgcttttacattcttcagatttatcatactctctagaagagtgcttgaaatttcttctagagtcttccaagaccgattcaggtcgttccgatctcgcttccaagtctattcttccgtccttcctcccgcttcttcagcttcttccttacccatcttcccgtcattatctgaatctctctctgaaggtccntcgaaacctctncgcaggtgaggtttcgantcaanaactctntcgtcgatcataacgggctctgntatcgtctccgantttccttgattccngncatt

SEQ ID NO: 131390 - DNA, 399 bp, Arabidopsis thaliana
  unsure (1)..(399): unsure at all n locations
tgatgagcttcttacaaatatttcgaccttgtcctctgtgtaccacaaacccccagaggcttttgttacccgcttgaaaacgactgttcagaaaacagaagacgaggactttgcggaaggaagcgaagcgggatactcatctagtaatccggttgatagtgcagcttctcctccaggtaatatcccacagccttccggatgactaccagcaccagcggtcccagctcctgtacctgatctgctaggtgacctgatgggattggataatgccgctattgtcccggttgatgatcccataactcaatctggtcctcctctgcccgttgtcgtccagcttnaagtgggcaaaggtttcagataagngntnaatttntcccgnaaaggtgggcaagtnttttt

SEQ ID NO: 131391 - DNA, 320 bp, Arabidopsis thaliana
gccactggttctggaaaaaccctagctttcgtcgttcccctcgtagaaatcctccgtcgatccacctcattccctccgaagcctcaccaggtcatgggggtgattatatcgccaacgagagagctatcaacgcagatatataatgtcgcacaaccatttgtttcgactttggcaaatgtgaactctgtgttgcttgttggaggccgagaggtgaaagctgacatgaagattattgaagtaagaaggatgcaatgtcttgtttgggacacctggaagactttctgatattatggaactaatggggattctgggtttttgaa

SEQ ID NO: 131392 - DNA, 735 bp, Arabidopsis thaliana
acaggtaccggtcccgaaattcccgggtcgacccacgcgtccgggtcctattaataactctctgctctcttcctgaagcttcttcatctttttgtttgacaagaagaggtagagaagaagatgtctcaatcaatctcctccagcacaaaggcagaagaagttgttagtgtagatgtgagccaagccaagactctcctccagtctgggcatcaatatcttgacgttaggactcaggacgagtttaggagaggccattgtgaggcagctaagatcgtcaacattccctacatgctcaacacacctcaaggtagagtgaagaatcaagagttcttggagcaagtatcttctcttctaaacccagctgatgatatccttgtgggttgtcagagtggagccagatccttaaaagccacaactgaacttgttgctgcaggttacaagaaagtgagaaacgtgggaggtggctacttggctttgggtggatcacagctttcccatcaacacggaggaggaggagccatctcctaattaataatcttaagattctcttcttttcttaatcaaataatataactgcctgtgtgatgtagtaatcattttcaatttaaaattccagtttcttgtaatcaaaactttcgtgtaccaaattcaataaaagctgtgtttctaaaaaaaaaaaaaaaaaaaaagggcggccgctctagaggatccaagcttacgtacgcgtgcatgcga

SEQ ID NO: 131393 - DNA, 464 bp, Arabidopsis thaliana
atcgtctttcgctccactagcgatccacgcgccttctcgttcgcttgatcttgaagttggaaactttgggaaccagacaggctttgtaggagaaatgtatggaacaggggacattttgaggtcagtttcgattccttctgagactgataagcctatagtcgtggagctagcggttgcagctatggaggaactcgtgagaatggctcaaactggagatcctttatggctttcaaccgattatttcagtcgagactcttctacgtaagtagagtatttcagaacgtttccgagaggaattggaccaaagccattaggattaagatcagaggcgtcaagacaatctgcagttgttataatgaatcacatcaatctcgttgagattctcatggatgtgaatcaatggtcttgtgttttctctgggattgtgtcaagagccttgacacttgaagttctttcaactggag

SEQ ID NO: 131394 - DNA, 457 bp, Arabidopsis thaliana
cacgattattctccaaagagaaagagaaaaatcaataacctcatagtgtcgacatgggttgccaagacgaacaattggtgcaaacaatatgcgatctctacgaaaagatctcaaagcttgagagtctaaaaccatccgaagatgtcaacattctcttcaagcagctcgtttccacatgcataccaccaaaccctaacatcgatgtcaccaagatgtgtgacagagtccaagagattcgacttaatctcatcaagatttgtggtctagccgaaggtcactttagaaaaccatttctcttcgatcttgacctctttaccaagaccaacccactttcagcaatttcaaacatttttcccttattacaacaacctatttgaaactcggaaagctcgagttcgacctcctcgaacaaaacctaaatggctttgtcccaaagagtgcggctttcattggatct

SEQ ID NO: 131395 - DNA, 678 bp, Arabidopsis thaliana
cccacttgggactcaagacggctcagatctttttccgacagattcttaatagtatcttacacgctcccatgtcattctttgacaccacgccatcgggaagaattctcagtcgggcatcgactgatcagaccaatgtcgatatccttattccgtttatgctcggacttgtggtctcaatgtacaccactctgctgagcattttcatagttacctgccagtacgcttggccaactgcattctttgtgattccccttggctggcttaacatctggtaccggaactattacctcgcttcttcccgtgaattaacacgcatggactcaatcactaaggctcccatcatccaccatttctctgaaagttagctggagtgatgacaatccgatcattcaggaagcaggagttgtttagacaagagaatgtaaaacgtgtaaatgataatctcaggatggacttccacaacaatggctccaacgaatggctcgggtttcggctggagctggttgggagctgggtgctctgcatctcggctttgtttatggtattgttacccagcaacgttatcagaccagagaatgtagggttgtccctgtcgtacggactgtccctgaactctgttctgttctttgccatttacattgaccgctttgttgataacaagatggttttagtggaaag

SEQ ID NO: 131396 - DNA, 521 bp, Arabidopsis thaliana
  unsure (1)..(521): unsure at all n locations
gnaaggctaaaccttgtttcaaatgctcaaggagaggttgtagagaatcttttggctgttttggataatttcgagagagctaaatcccaaattaaggtggagactgagggagaagagaaagtcactaatagctatcagagcatatacaaacagtttgtagaaattctgggatcacttggtgttatccatgtggagacagtcggcaagcagtttgatccaatgctacatgaggcaataatgagagaagactctgcggaatacgaagagggtatagtactagaagaatacaggataggtttcttgctaggcgataaggcttttacggtctttcaatggtgaaaagtatcaagcttggaccntngacccagtaaaaagcccccttttaancntttngganaangaagcccaccagcaccaaangggangccgcangatggaagattnaatctttncatccttgnnaaatttganggttgntccaaagacctcnnncaggtttttgtagttccgtnntttnttnt

SEQ ID NO: 131397 - DNA, 507 bp, Arabidopsis thaliana
  unsure (1)..(507): unsure at all n locations
ggtgttatccatgtggagacagtcggcaagcagtttgatccaatgctacatgaggcaataatgagagaagactctgcggaatacgaagagggtatagtactagaagaatacaggaaaggttccttgctaggtgaaagggcttttacggtccttcaatggtgaaagtatcagctggacctggaccagaaaagccccttgaagctgaaggagaagaagccacagcacaaggaagcgcagaagaagaatcatcttcatcttgaaattgaagatgatcaagactcagcagttttgtgtgcgtgtgtgtgagagagatacagagataaaagagggagaggtctgttttaccattattgttgttattgttattgatacgttatatcatttctacagagtctagaagtaatatagatcgacattttaatgaaaaaaaaaaanaaagnnnnnnnnnnnnnnnnnnnnnnnnnnnnnnnnnnnnnnnnnnnnnnnnnnnnnnnnnnnnnnnnnnnn

SEQ ID NO: 131398 - DNA, 481 bp, Arabidopsis thaliana
gtcagatctctgtgcgtgtaaactcaaaggacaatgctgagacatcaatacctccactgttgttatcattaagtggcgagcatggttacagaaataattccggatctggcgctggtggactctttgtgtttgatagcttattccctggaaatttctacttgcgtccccttcttaaggaatattctttcaaaccttcaacactggctatagaactgaattctggggaatccagtgaagctgtctttgaggctactcgtgttgcctacagtgcaatgggtagagtcgctcttctatcgggccagccacatgaaggtgttgcaattgaagctcgctctgactccaaaggatactatgaggagactacaagcgatattaatggaaattatcgactgagagggttacatccagattcagcatatgttattaaagtgtcgaagaaaatggtttaaccaacaattaaattgaacgtgcattttcagag

SEQ ID NO: 131399 - DNA, 407 bp, Arabidopsis thaliana
  unsure (1)..(407): unsure at all n locations
aaagggngctcccctccacagcaaccaaacttgagccagccaccactnccactatgcttgggatgaagcaatgggggagcctccttaaacgattgatgtcgcagcagcattgttggctctttaatacccctgtggacgtcgccttgctcatacattcctgattatttcaccattatcaaacatcctatggatttaggaactgttaaaagcaagttaacttccggcacgtattcaagcccttcagagttttctgctgatgtccgcctcactttccgcaatgctatgacttataacccgccagataataatgggtatcgcttcgctgatactctcagcaagttttttgaagtgagtaggaaaactatcgagaagaagtcatccgtaaccaaatttgaaccaagtaactt

SEQ ID NO: 131400 - DNA, 809 bp, Arabidopsis thaliana
  unsure (1)..(809): unsure at all n locations
cgggaaaccgccgctttctggtcttccttacaggaagagatgctttgaacatgaccactctgaaggcttttccggcaagatctctggctccggcaacggcaagtgccattgcaagaaaagccgaaaaaatcggatgaagagaaccgtgagagtaccggcggtaagtgcaaagatcgccgatataccaccagacgaatattcatggagaaagtatggacaaaaaccgatcaaaggctcaccacatccacggggttattacaagtgtagtacatttagaggatgtccagcgaggaaacacgtggaaagagctttggatgattcaacgatgttgattgtgacgtacgaaggagagcaccgtcatcaccagtccacgatgcaggagcatgtaactcctagcgtgagtggtttggtgtttggttcggcttgaaagaattatattagtttggtagttttgtaatattttgagaaattgaggggttggttttgtaattttttttctataacaaaattagttttagattttttttttagtagtcttttgaatggattttaatcttaccaccgagaaagaaaaaattcttactacattttcataatttcttgtttgatatatttagtggtgtcatgtaagaaaatgatgtttagcaaagtaattggtatataaatgtgtaggcatatgtatttaatgatatggttcgtaaagttccccttaaaaaaaaaaaaaccaaacccaaagggcggccgcttctagaggatccaagcttacgtacgcgtgcaggcgacgtcataaatcttnnnnnnnnnnnnnn

SEQ ID NO: 131401 - DNA, 905 bp, Arabidopsis thaliana
  unsure (1)..(905): unsure at all n locations
gattcnnnnnnnnnnnnnnnnnnnnnnnnnnnnnnnnnnnnnnnnnnnnnnnnnnnnnnnnnnnnnnnnnnnnnnnnnnnctttttttgtttttttaggtataactttttcaaatccttaacaatttgcgtcatgaaagtttataacttaaatctttcttttgttgtgtcctcaggttcttaatgatcagacatttgccataatggttctaatggctctcttcacaaccttcatcaccacaccagtcgtaatggcagtctacaaaccagcgagaagagcgaagaaagaaggagaatacaaacacagggcagtagaacgagagaacacaaacacacagcttcgaatcctcacatgtttccacggagcangaagcattccttcaatgataaacctcctagaagcatcaagaggtatcgaaaaaggcgaagggctctgcgtttacgctctccacttacgggaactatcagagagatcatcagctattctaatggttcataaagtccggaaaaacggaatgccgttttggaacagaagaggagtaaacgcatacgctgatcaagtagtagttgctttccaagcttttcaacagctaagcagagtcaatgtccgaccaatgacagcaatctcttcaatgtctgatattcatgaagatatctgcacaacagctgtaagaaaaaaagcagccattgtgattcttccgtttcacaagcatcaacagcttgatggttcgttagagactacacgtggcgattaccgttgggttaaccggagagttttgcttcaagctccttgttcggttggtatattcgttgaccgtggactcggaggttcaagtcaagtctcagctcaagatgtttcttactctgttgttgttctgntcttcggtggntctgatgatcgtgaag

SEQ ID NO: 131402 - DNA, 492 bp, Arabidopsis thaliana
cggggtttagcctattctacaatgtctcaactctgttatatgatgttagctctaggtatggggtcttatcgatctgctttatttcatttgattactcatgcttattcgaaagctttgttgtttttaggatctggatccattattcattcaatggaagctatagttggatattctcccgataaaagtcagaatatgattcttatgggtggtttgacaaaacatgtcccgattacaaaaacggcctttttaataggaacactctctctttgtggtatccccccccttgcttgtttttggtcgaaagatgaaattcttaatgatagtttgttattttcgccaatttttgcaataatagcttgttcaacagcgggattaaccgcattttatatgtttcggatttatttacttacttttgaaggacatttaaacacttattttctaaattacagtggaaaaaaaagtggctccttctattcactctctttatggggt

SEQ ID NO: 131403 - DNA, 657 bp, Arabidopsis thaliana
caaatgtctatagctatttttctaggtatcattatatattccaagaattactacacaacttttttttgaatcaacaaaaaaaattcttgataaatatattttcaagaatgaagaagatggagaaaaaaaaaaaaaatactctttattttatttcgactataaaaaatttaatatccaataaaaaaaaaatgagttatgacctatgctctttatcacaagcatatgtattttacaaattatcacaaattaaagttagtaacttttgtaaattaaaggctgttcttgaatataacatatgcataacatccttttttgttaagaataaaataaaggttttttttcaagaacacggaatctttcattatgaattgaaaaataaaacctttttgaattccgaagtaaatcaatggaaaaactggttacgaagtcagtatcaatacaatttaccccagatttcatgggctagattagtaacccaaaattggaaacatagaacaaataaagattctctagttctaaacccaagtctaaccaaagaggcactcatttgaataaaaggatctcagatcattataaaaaacacccattttttgaggccgactcattattaaatccaaaacataatgtaaaaaaagattcatatatatatcggacgcg

SEQ ID NO: 131404 - DNA, 503 bp, Arabidopsis thaliana
aaaaaaaacttcagaaaatttgaaatccttagaattgcagagcaaagaacaaccatggcgaatcctattcaagagattctggagaagcaagttctaacggtggctaaagctatggaagataagatagacgacgagatcgcctctttagaaaagcttgacgaggacgatctagaggttttgagagagagaaggttaaagcaaatgaagaaaatggcagagaagaagaaacgttggattagtcttggacatggtgaatactctgagatccattctgagaaagacttcttctccgtcgttaaagccagcgaacgcgtcgtctgccatttctaccgcgagaattggccatgtaaagtgatggataagcacatgagtatattggcaaagcaacacattgagacacgttttgtgaagatccaagctgagaaaagtccgttcttggctgagaggctcaagaatgttgttctacctactcttgcacttattaagaacactaaagtcgatga

SEQ ID NO: 131405 - DNA, 508 bp, Arabidopsis thaliana
  unsure (1)..(508): unsure at all n locations
ccnccaaatttanaanncccccaccccggtggaaaaaattgccaatggcccttttgcgggccctctatttgtggctgggaaagccgcctcctttataatgcaaggtgaggcctttcacacaacctaaagttctccgaaccagcatactcttccttcagctcccatattttccttgctcgactcggtgctgctccatttctgaaatatctgaaatgatcattgaaacgcaaggaattgttgtgtcattaaagatcaaagagaagagaacagtggatttagttacatggaagctcaagtggtgcagcatagagaatgctatcaagtttgcggccttgctcaaagctcttcatcccaattcgccacaatggccgttggctgtaagatacaggagataagtcttcgtttaccttttcttttgttttttgaccgatcacctctgttttgttgttatgtatatacaacacaatgcacattgttcatattcatttgatccagtttgtttttttgg

SEQ ID NO: 131406 - DNA, 748 bp, Arabidopsis thaliana
  unsure (1)..(748): unsure at all n locations
gctgtacgggcagccattaaggttaaggcatccgtaattatatgcttcacctcttctggaagagcagccagattgattgccaaatacaggccaacgaatcccggcttatttccgttggcattccccccggggttaaggcaaatccaaactgaaatggagctttagggggagcctttgaggcgaggccaggtcacttattgccagaggcctcttccctattgcttgctgaccctcggtcaccctgcggaatctacaagtgcgacaaaccgagtcagtcctgaaggttgctctagaccatgggaagcatgctggagtaatcaagtcgcatgacagagtagtggtgtgtcagaaagttggtgatgcatctgtggttaagatcattgagcttgaggattaacttttgcctcgcaaaaacattatataattggctgcattttgggttgccttgaattgatgataactcccaatgccggagtgaaaatattatctccgggacttctggtttctttttgtatacttaggagatttgatgtctctaaggtttcagctatatttgattaccttcaaatgtacgcatatgataaaagtatacaatgcctagcaattttataataagctgttacattccctaaannnnnnnnnnnnnnnnnnnnnnnnnnnannnaagnnnnnnnnnnnnnnnnnnnnnnnnnnnnnnnnnnnnnnnnnnnnnnnnnnnnnnnnnnnnnnnnnnnnnnnnnnnnnnnnc

SEQ ID NO: 131407 - DNA, 705 bp, Arabidopsis thaliana
ggagagaagagaatggaaggtgtaggatcgagattgagccggacgtcatcgagatacagtggtccggcggcgacggcggtgttcagtggccgtgtaaggaaatggaagaagaagtgggtacgtgtctcaacctcatccgtcggtgttttcagagcatctaaatccaacggtcgtaacaacagcaacaacagtaactcaccacaccatctacttctccataagtggactccacttacctcagcgacggttactgcctccgacgctaatggttccggtgagacggaggagccgcctaagcgaagattcagatacgctccaattgcgatgcttgagcatagagaaaaagtgatttctaaggattctgaaattgaagagactgaagaattcgacactgaatctccattacctaaagctgttgagctagacatgaacctaacagactcggaccaaactaaggaagcaaaactggtaatttgaatctgggactgtgtctgaattctgaagggactgaagaatcaagagaatcatattgatttgggatgaagcaactataaaaaaggtgttcagcctgttgatgaaggctttatattcgtatcctaatttctaggcgtttttttgccctttgatgtcttctagttctctatgtagtgtgaaagtaagttaggaagaagttatataaatgtaagatttgaagcctttaccaag

SEQ ID NO: 131408 - DNA, 381 bp, Arabidopsis thaliana
gaccacctcctcggaagcttgaaatgcctgtacgactcaaacaaaggtactgtggagttggtcgctgactttgtagtttgtgaagaaggaaaacaactttcgccaaaatcagcccacattttgcgtctattgcgaatgaagatggctactttcaagctgaacttgctctgcagatggagccctagtgactttgagctttacagagaagatctgtcagagctttaccgagaagatctctcagacgttgaaacctcttaggaagccaagattttgactccaccctttaaatttttcttaatatcatcactatcacatggattttatattgtggcacatggtttgcattcaaatgttttaagtcaaagttttgcttgctttaaa

SEQ ID NO: 131409 - DNA, 760 bp, Arabidopsis thaliana
  unsure (1)..(760): unsure at all n locations
cggttaggatcccncccccccgggtgggcccacccttccaatggctcggnttnattncgggcccaaacccttttgccctcccccatcaaacccaatgctccttctctccctcagcacacccttctcggaattcgaagaaatccctttagaattacccccgccccccccaaatgggacccgccaaaggtttgtcccacaagccagccagggcccttgcccccccttgaagtgctcccttgagaaaccctcaggaggagtactgttccctaaaccagctgtgaaatccgagaggtacctaacaggcgaggttgtctctgttgggtctgaggttggggaagtggaacctggcaagaaggttttgttctctgatatgagcgcctatgaggttgattttggaacagaagatgctaagcattgcttttgcaaagaaagcgacttgttagctatcgtccagtgaaaagtagcatcgaagttgtgcattcaatgatatcatctaccaaagagtttctggttttcttgtaatttcagtgacagcagcatatgttctgttgtttgagtttcatgaaagagctcaaagtggagattgatcggaaaccgaaattgttaaagtcaacaatgttctctcaaacagaaatcgttttatttgcaaatttctcataagccttatgttcatagcttagctggtgaacaagaccgatcccattcaattttttcaaggatttgatctttacttgatatcaaaaaaacgaattattttacc

SEQ ID NO: 131410 - DNA, 443 bp, Arabidopsis thaliana
caacacagcaagcacgagcgaatctcctcaacttttttaacctaatagctcgccgtgtcgtgactactcaccgagtaggaacctaaccttatccaatggcttcgagtttcattacagtacctaaacccttcttgtccttccccatcaaaaccaatgctcctactctacctcagcagacccttctcggaattcgaagaaattcctttagaattaacgccgtttccaccaaatggggaaccggcaaaggttgtaccacaagcagacagggtccttgtccggcttgaaggtgcttcctgaggaatccccaggcagggagtactgttgcctaaatcagctgtgaaatttcggagagggacctaacaagcggaggttgtcttcttgttgggtctgagggttttgggggagtcggaacctggcaagaaggtttgttctctgatatgagc

SEQ ID NO: 131411 - DNA, 413 bp, Arabidopsis thaliana
gcaattggtgcattcctcttgtcactcttctgcttcttctacgtttacacactcttgaaatggaggaagttgctgaaacatctgtctacaacgggagagaagaaacgcagtcctggtagaacaagcgcaggaagtagagttcgtagcagcacaagcagatcaagcacagaaaacggagaaccaaagctagtgatgttcaataacaagatcactctagctgaaacaattgaagcaacacgacagttcgatgaagaaaacgttcttagcagaacccgatatggattgctatttaaagccaattacaatgacggaatggttctctctatccgccgcttacccaatggaatcactcttaaatgagaacttgttcaaaaaggaagccgaagttcttggtaaagtcaagcaccgaaaca

SEQ ID NO: 131412 - DNA, 1057 bp, Arabidopsis thaliana
  unsure (1)..(1057): unsure at all n locations
tacgactcactatanggaagctggtacgcctgcaggtcccgtcccggatttccggggtcgaaccacgcgtccggcagctgggataagtgtcaatgtcacgcttaatattctcaatcgccagatatgaagcagtgatcgatgcatattgggagggcctcgaggcgtttggacttgatgacctctcaagagttaccagtgttgcttcctttttgtcagtcgggtggatactctcatggacaagatgcttgagcaaattggtacccctgaagccttagatctccgtggaaaggcggctgtggctcaggctgcattagcatacaagctataccagcagaaattctctggcccaagatgggaagctctggtaaagaaaggtgccaagaaacagagacttctctgggcatcaacaagtgtaaagaacccagcttactctgacaccttatatgtcgctcctctcatcggacctgacactgtatcaaccatgccggatcaagccctggaagcattcgcagatcatggaatagtgaagaggacaatagatgcgaatgtgtcagaagcagaagggatttacagtgcactagagaagctgggaatagactggaacaaagtaggagaacagttggaagacgaaggagtagattccttcaagaagagtttcgagagtctgctcggtacactgcaagacaaggccaacactctcaaactagccagccattgaggaaatgagtcatcattatgtttttggttacgctaaaataaaaagaagaacctttggcttttgttcttcaatccttatgcatgctttctaaagtggttatgatggattttgcttgatgttccacattatgggttattctattttctttgttcttgtaagatgatgcttcagaagagtttgttactttttaccgtatttgtaatttacattttccctgaaaacaattggcgagtaaaaaagtgtccttgtcttttaaaaaaaaaaaaaaaaaaaaagggcggccgctctagaggatccaagcttacgtacgcgtgcatgcgacgtgcatagctgtgtaac

SEQ ID NO: 131413 - DNA, 403 bp, Arabidopsis thaliana
aagagaaaacaacgatctcactcaatcatcggcgtgtgggatataagacgatggcttttactctaacaatccctagattttctgcaatttctcgcaaacccatcacttgttcttcttcgaggacacagtgtcctgctccctttacccatggacgatcgatttctctcagacgaagacttaccttattgccccttaaagcttctactgatcaatcaggtcaggtgggtggggaagaagttgtttgctagattttaccttattgtagcatcaacaagaatgagaagagaactatcggtgaaatggaacaagagttcctccaagcgatgcaatcgttttattacgaaggcaaagcgattatgtctaatgaagagtttgataaccttaaaaaaaagttgatgtggga

SEQ ID NO: 131414 - DNA, 1260 bp, Arabidopsis thaliana
ccgggccagaattcccgggtcgacccacgcgtccggaaaaatggtgtcagctctgtcttctcttgtgtatgggacgaatccaataatgattcagctcgggtcgagacaagatgctggagatggaaattctagtttccgtggtaaaaccgcgttggataagattgcggaaactgttaagaggagtccgttctctgttatcttgcttgaagatattgacgaagctgatatgttggtgcgtggaagcataaaacaggcaatggatagaggcagaatccgtgactcgcatggccgtgagatcagtttaggtaacgtgatctttgttatgacagcgagctggcatttcgcagggacgaaaacatcgttcctagacaatgaagcaaaactacgagatttggctagcgaaagctggcgtttgaggttgtgcatgcgggagaaatttgggaaacgacgagcaagttggctgtgtagcgacgaggagaggctgacgaaaccgaagaaagaacatggatcgggtttatctttcgatctgaaccaagccgctgatacggatgatggttctcataatacgagcgatctaacaacagataatgatcaagacgagcaaggttttagtggaaagctgtcactacaatgcgttccatttgcattccacgatatggttagccgtgtagatgatgcggtagcgtttcgagcagttgatttcgcagctgtgagacggagaatcacagaaacattatctgagagattcgaaacgatcataggcgaatcactatcagtagaagtcgaggaagaggcacttcagagaatcttgagtggagtgtggttagcccaaacagagttagaggaatggattgagaaagcgattgttccggtgttgagccaacttaaggctcgagtttcgtcttctggtacttacggtgaccgtacggttgctcggctcgagctagatgaagattccggtgaacgaaacgccggtgatttactgccgacaactattactttggcagtatgagagttgtaaaacagagattggagttttgttgttacagtggactgtggaaaagggtagagatgtaaatatgtctcaactggttttggcggggggaacgggaaacagttaggggtaaaaatagtaaaaaaaaaggtgtttatagttctttacttctttttgttttaaaaaaaaaaaaaaaaaaaaaaaaaagggcggccgctctagaggatccaagcttacgtacgcgtgcatgcgacgtcatagctctt

SEQ ID NO: 131415 - DNA, 526 bp, Arabidopsis thaliana
gagttatccacagatctaaaattgagaaaacttaaaaaagttcccaatttcgaaaaatgtcactaaccgcacaattctcgccgccggtcaccggaataaccaggagtccccgggatacgaaaccgtcactgtccactcgccgtgtatttccggtttacactgagattagaaccatgacgacgagtaatctgaggaaatcggcgtgttttgtggctaaggctatagaacagagacgagatacagctggatctgaatcggaatcagaagcgactccgtcaccggcggaagagagtggaagcggagaagataaggaagtggagattagcgcgataggaccagagataaaaccagcgatggagcagaggaaaacggcggaggaagagaaagggaagaacgagtttcttagtggagttgcggaggaagtgaaggagattgagtggccggcgtttcagaaagttctcggaactaccggcgtcgtgctcggtgttatcgctggctctagcgtcgtcttgctcactgtcaattt

SEQ ID NO: 131416 - DNA, 458 bp, Arabidopsis thaliana
caaaaagtttggttcttgagaaatgatggcggctcgttctcattgtatcaaccttatccccaaagtatgtcttccacaatccttcataactggagaatcagtgactaatctcagatttgattgcgtctctaagtcatcgaagctttctctcaagacatcatgtggaagatcaagaacgcatcaccggaggcaaaatctcagcatccggtccgtgtttactggaatcgtggaggaaatgggtgaagtcaaggacttgggaatggccgatcacggaggattcgacctcaaaatcggagcgagagtggtgttagaggacgtgaagctcggtgacagtatcgccgtgaacggtacttgtttaacggtgacggagtttaacgcagaggagttcacagtagggttagcaccggagacgctgtgaaaaacatcgttggaggagttaaagataggatctccggtga

SEQ ID NO: 131417 - DNA, 431 bp, Arabidopsis thaliana
gtcaaaaactctcactcaatcgatggcagaaccatcttttgctcgtctgtttctcttgttcttcagctttctccttatctttgccacctactcttgggtctttggacccgactcaggcttcttggtcgggactcggggcccgaaaactctcggctcggatcggcaaggccaccgtggccactctttagaaaagcctcatcatccacttgatccactaacggtgcgagaaatcaatagagtcagaacaatactctcgaaccatgacccgggttttggttccgggtcggccacgattcactccatggctctcgatgagccggagaagtcacgtgtcgtccagtggaagaagggaaataagcttctgtcacgaagagctgcggtcgtagcttatttggggtggtcaaacacatgagataacgggtggatcttga

SEQ ID NO: 131418 - DNA, 686 bp, Arabidopsis thaliana
gaaatggataatatcaactttgcaggatcagcgtccttatcgagcgtgtaccaattccatgaagcgaaaatgtccgcccttataagaagaaatgggattctggaagggcagttagaagcagcattggcgggaagagagccgcctgagaggaatgtgtcggttgcgttgaggagcaaacaagagactgataaaaagttatctgcccccatgagagatgttgaattgcttaaggagaagctgaccgggttagagctcgctcaagaggaagctaatagtttgtcaaacatggttcactccgacaatgtcaggcttgagcatgatgtagcgttcctcaaagctgtcctagacgatacacaaaaggagttgcattcaacaagaggagttcttgcaggagaaagagcaagagcgttccagttgcaggttgaagtgtttcatctgaagcaaagattacaatctctagagaacagagctgctacacccagaaagcctttccatgtctaaacacagaccagagacaacacgataacttttatgacttccattttgtagtactcgagacatgactgaattcatgtgtgttgtggagtaatgtataattgaagtggaaaaaaaaaaaaaaaaaaaaaaccccagcgcccccgctctagaggatccaagcttacgtacgcgtgcatgcggggtcatag

SEQ ID NO: 131419 - DNA, 528 bp, Arabidopsis thaliana
  unsure (1)..(528): unsure at all n locations
gcgtccgcgattcgaaagtattccgacccggatgggtcggtttgtttcgattgatatctcaaaattcagaatcccggaagaagatcaaccaacctgaaccggagtgaacagtcaaattaacccgcccggtttaactcgagctccgtctatcttagaacgggtcaaatccattaagctatcctccttctacagatccgacccggatttggatcaaaaacaaaatccggatccggttcttcacgaggagcacaagcatgtacgaagcaaatcggaatcgaaaaaaccggtgaagaagaagaagaaagctttaacgaagatgacaaaatcggctagcgagaaatcaggttttggtttcgcaggaagccatgcggaagcgccggagacggtggaatccctcgaacggagaagaccagatacaacgagagtcgaaagatcgacgtctttcggcgacgnagaagatngcgtcgacgcgaaactttcagattttcatcaacaaattcaaacagcagctgaaattncagagactcg

SEQ ID NO: 131420 - DNA, 809 bp, Arabidopsis thaliana
  unsure (1)..(809): unsure at all n locations
aagtaccgcttcggaatttccgggtcgacccacgcgtccgggactgtgttgagtctgcaacacttgttgtcttcttttggagtttgaatatctaggaagtcacaccacagagcttattgttggctccacagacaagcaaccactactcgagactcctggtgaggtttttgaactgcggaaacttcttccgatgtccgttgcttatgacttcaacatccatactatggattttcagcctggagagtttctgaatgttaaggaagttcattataaccagcatggtttgttgcttctggaggggcaaggcatttatcgcttgggtgataactggtatccagttcaggctggtgatgtcatatggatggctccttttgtccctcaatggtatgctgcactcggaaagactaggtctcggtatttgttgtacaaagatgtgaatcgaaatccattgtgatcaaagattgatatgactttgcagtaaaagtcagaatcttgttgttcagcttcttgtcttataaacgccatgtccactctaagcactagctacgtgagacttagttgtatgaatcttataacaattgtgaaaagaaacacattgataaatgatgaaatgactctctctctctccagccnnnnggagcgcgcccgccccggttattataccccctcgcctgaaaaaaaacagggggcgggcccgctcttaaaagggatcccaaacttttaacggtaccgcgcttgctattgcggaacgtttataaagcttctttttttatatgggggtccaccctcaaatatttcaaatttccact

SEQ ID NO: 131421 - DNA, 472 bp, Arabidopsis thaliana
  unsure (1)..(472): unsure at all n locations
gtgcactatagagacttgacgcgctgccgcgtcgtagctcgnattcgctcgagctgatcttttcagtctatattcgggccgaggtgctgtgacctcactaccatccagttcttcaaaaaattgacggttgttcatatgcgtacctacctccaaactttcaccattccttggactgtgttgagtctgcaacacttgttgtcttcgagcggaggtatgagtatctaggaagtcacaccacagagcttattgttggctccacagacacagcaaccactactcgagactcctggtgaggtttttgaactgcggaaacttcttccgatgtccgttgcttatgacttcaacatccatactatggatnttcagcctggagagnttctgaatgtaaaggaagttcattataaccagcatggttttgttgcttnctggaggggcaaggcatttatcgcttgggtgataacttgtatccagt

SEQ ID NO: 131422 - DNA, 554 bp, Arabidopsis thaliana
  unsure (1)..(554): unsure at all n locations
gaccngcagnggtcttatnttaacctantnagggaccgggcctgaattcccggggtgaacccactgcagtccggggctcttcttcgtcgttccatggcatttccctccaaattctaggtcacaaatcaaaccagaagaaccctaatcccaatgttgccttcaccaatcactctctctctttatctactccttcactatgtcgtctccatcgtcacgcgacgtttccagactcaattccagcaaaatccagaaacctcacttcgtacttctccaccacaacacaagagccagtcctcgaatcttcttcttcttcttcttcagctcctgaggtagtagaagaagagatttctaaaaccagattgattgctcagaatgttccatggacatctacacctgaaggtattagatcgttgttcgagaagtacggggagtggttatcggcattgacgatgtctattgcataagaagggaaagaaattagggggtttnggggtcattgaaatgggttttccttnaggaggntgaaaaagttnttaaaanntttgaanncgggg

SEQ ID NO: 131423 - DNA, 451 bp, Arabidopsis thaliana
cggacgcgtggggcttggggctcgctcttgggaatgcagctagcagaaagagatatcattgtagcatgccttgactacaggaacgttcctcagggaacaattagtgatatggtgactgatgcttctcaaggaatctcatttgtctgcaataacatctctgcatttggaggtgaccccaacaggatctacctgatggggcaatcagcggagtgcccatatagccgcttgtgctctattggaacaagctactaaagaattaaatggagagagcatctcctggacagtgtcccagataaaagcttattttggattatctggagggtatcttctaagcttttggattcccgttggcttctatgtgctttttggtctacagcaattgatctgcttatcattttgaactttaataggtacaatctatacaaggtggttgatcacttccataatcggg

SEQ ID NO: 131424 - DNA, 404 bp, Arabidopsis thaliana
aaaacaaaagaagagagagagagagagagacgatagaaacagagagattctctcgaaaatggccaccattagagtaccaaacgaagttccttctccagctcaggactctgaaactctcaaacaagctattcgcggatggggaacagatgagaaggcgattatacgagttttagggcaaagagaccagagccagagaaggaagattagagaaagttttagagagatttatggcaaagatcttatcgatgttctatcctccgaactgtctggtgatttcatgaaagctgtggtttcgtggacgtatgatccagcagagagagacgcatggcttgtgaacaagattttgaacaaggagaagaagaagaaaagcttagagaatttgaaggttatagtagagatctctt

SEQ ID NO: 131425 - DNA, 513 bp, Arabidopsis thaliana
atggatgagctgatcaagtcaatctctctgatagctaagaactttgcttatgtccccatgctttcacgaactcatgggcagccagctacgccaacaactttggggaaagaaatggcgaattttgctgtgaggttaagcgaagaaaggagatatctttcagaaactaagattaaggggaaatttgcaggtgctgttgggaactacaacgcccatatttccgcatattcgaatattgactggcctcatgtttccgaggagtttgttacttctcttggattaacattcaacccatacgtgactcagattgaacctcatgactatatggctagactttttaataatatcagccagttcaacactattttaatttgattttgacagagatatatggagctacatatctctagggtactttaagcagacaactaaagcgggtgaaattggatcgtcgacaatgcctcacaaagtgaatcctattgactttgagaacagcgaagggaatctagggaaagc

SEQ ID NO: 131426 - DNA, 509 bp, Arabidopsis thaliana
aatgatcgtcttcccttttatcactcactcttttatttctttgctcagcaaaagatttgatttttttttttgcttttatagattctgggaatagtttagagatggggagattgttcttggtgaatttggaaggcaagtcttacagttgtaagcactgcaagaccaatcttgctctctgtgatgatgtagtctctaagtcttttcagtcccgacatgggaaagcttacctcttcagtaaggtgtaagttttcttctccaagtttgatctggtgtttttggctagccatatttgaaggaacccgaagatccttttggatggataggacgggctatgcatttccaccagttattgggatttgtgtgaccagagggaaaatgtgtatgctggcaagaaaggaggttagggtgattgttgccggggatgcatacgggtggtcgatatttactgtgtcaaatgcggctcttatgttggatggaaatatgagtttgcttttgagaagaatcaaaag

SEQ ID NO: 131427 - DNA, 745 bp, Arabidopsis thaliana
  unsure (1)..(745): unsure at all n locations
cacttcttctaagctggagatgagtacaggttctactagtttccgtttcaaatgtagcgaacgagctgagaagagaaaagagttctatatgaaactggaggagaaaatacatgctaagaaaacagaaacaaaccaagttcaggccaaaacacagcaaaaggcagaagctgagattaaacagttcaggaaaagcctcaattttaaggcaacaccaatgccttcattctacaacatcggtactagaccggtgtctcataacaagaccgagccatctaaagtagcacaatcaagatcacgaccagcgacctcagcctcaattacaaacagggcggtcaccagagtttcttataaacacggttttgaagaagctgaaatggtaaaggtaatggtcagtaatagaaaacagagtgcggctaaagattcagatttgcaaaagggtaatcttatggcggttgaaatgaaacaacagattggtgctcgaagaagcagaaactagacagaggcaatttgaattctgcggttggctgcatagctttctattgcgattagtactttaaccaataagaaaactatgaatagtatagtacttaataataacattacatccgctgtcaaaaaaataaaaaaataacaacattacatccatttatttcatttttaaaaaaaaaaaaaaaaaagnnnnnnnnnnnnnnnnnnnnnnnnnnnnnnnnnnnnnnnnnnnnnnnnnnnnnnnnnnnnnnnnnnc

SEQ ID NO: 131428 - DNA, 604 bp, Arabidopsis thaliana
  unsure (1)..(604): unsure at all n locations
tggccctgcaggtcccgttccggaattcccggttcaaccccccgtccggatttggtgtctctatggacttccaaatgagacatgggaggttaatctacccgttgaggaagttcctcctgagcttcctgaaccagctttaggcatcaatttcgctagagacggaatgcaagaaaaggactgggtatctttggtcgcagttcacagtgattcatggctgctttctgttgcatttcactttggtgcacgtttcggatttggcaagaatgagaggaagaggctgttccagatgattaatgagctgccaaccattttcgaagttgtgagcggcaatgcaaagcagtccaaggatctatctgttaacaacaataatagcaaaagcaaacctagtggcggccaagtcttcggccaatcccgaatctcttttccaaaggttgcaaaggatgtcatctccaccgccaaaagaaggtggaggaggcaggaagatgagagtgaaggtgtagagtgaaggcggttgaccaaggttcgggttttggggcttttnggggcaacttcggnncanattggnttcttggntttccttccncgggtttnaaaantggtccct

SEQ ID NO: 131429 - DNA, 526 bp, Arabidopsis thaliana
ctagattcgctcctccactgtcttaaatttcactatcttcttcttcattttccttccttctcacttcaaatccataatcgctctacttctctctctctctctagattcgaaaaaatggcgaaactggtgatgatgatggataaatgggtgtaacctaacatcgctatattgagtggggggaaaaatgtttggtccattctaccaacaaagaggcctgtccaatcacaaagctctactgaattagacacttgtctcagcagaactctgggttcaccgcctagctctatctctgcttcactaccaaatagtgaatacatcgataaagtaaatgcccctggatggagatctatcgttcatcgtcctaggatcattgtcatcaactctgaaatatcacttccacctccacttagttttccattatgcgacgctggcgatgtattgaaaagattaggccttcctccgtcgaaagatttagactctctgctccaagatgcatcaaaaccttcctcataactctaagaacaat

SEQ ID NO: 131430 - DNA, 753 bp, Arabidopsis thaliana
  unsure (1)..(753): unsure at all n locations
caaagttcttccctgaagttctttctgccttaaggcgtttgtgtagggccggtctcaaaaagtgctgcaaccgtcatcacatatccagcaatcaggtgcaaggttatgattcaaccagcagatgactccaaggaaaatgaagcgaagaagccccgacaaagaatcaggaaaccggtccccggggtagtctatgctatatggaaaaaagaagggatcttaggcttctttaaaggcttgcaggctcagatcttaaagacagttctgagctcagcattactactaatgatcaaggagaaaatcactgcaaccacatggattctcattctagcaataagaactctgtttgtcacaaaggctagattgaaaagtccataaaagattaccattccgcaagagtcccaaggccaagtaagagcaaagtcatttgtttggcgatcagaatcgaaagatcaagtattgtagtctttctcatttcaagaactattgattttttttagtaaagatctgattgtactaggtccacataaagcttcttgttgttgccagattgagtttctgggcttagagattattctatggttattatgtagtttatgtttgttttcttcagctgtaataaaattggggatttatactattttcccaaaaaaaaaaaaaaaaaaaaaaaaaaaagnnnnnnnnnnnnnnnnnnnnnnnnnnnnnnnnnnnnnnnnnnnnnnnnnnnnnnnnnnnnnnnnnnnnnnnnnnncattc

SEQ ID NO: 131431 - DNA, 507 bp, Arabidopsis thaliana
  unsure (1)..(507): unsure at all n locations
gtttccgtntcttttctnngtccgcgaatgcatgtattcatgcctgttgaaaatgccaatcatagtattcattcttatgggaatgggaatgaaaaacaagagattctttttctagaaatatggacaaatggaagtttaactcctaaagaagcacttcatcaagcctcccggaatttgattaatttatttattccttttctacatgtagaagaagaaacgttctatttagagaacaatcaacatcaagttactttacccttttttccttttcataatcgattagttaacctaagaaaaaaaaaaaaaacaaaagaactgagcctttcaatatatttttattgggccaattagaattggctcccaggatccgacaattggcctcaaaaaaatcccatcttccatacattattgggcccttttggaataacaggcaagagggccctttccaaattggacattttcccggtgaggtggtaaaaggggttttgggcctttttggnaaaantt

SEQ ID NO: 131432 - DNA, 521 bp, Arabidopsis thaliana
  unsure (1)..(521): unsure at all n locations
gatttatacacataaatgctctatatatagaacttgtttcagaaactgtaaagttatcgacacgtgcgccagtgatccttcaaagacctgcattgcatttttaacagttccaatgtcgatatctgctagttttccagtcttcgaagcaataattacacagttactcttctcttctgcatacggtacaaagagcttccctttctcttctgaagagaacaacccaatacatggtttgtctcgcgcattagctagttgaatcgcagctgtgtttgttgcgatgactccagcagaatcggtttatcagagcagccaactgtcctggtggtgtgatgatcactatagatgtatcatcaccctcaaaatcctcaacggtttccccttccttcncatgnggaanccaaaggccngnttgaatccccttanacccttaaaanctaggccatttttcaggggaggaaanatcagatccccttggtgnatggggcctagaacggtcanaccaggtcccnaantcccgcnng

SEQ ID NO: 131433 - DNA, 541 bp, Arabidopsis thaliana
aatgtattaggaacactatagaagagctatgacgtcgcacgcacgcgtacgtaagctcggaattcggctcgagcgacaccgcagattgatctggatattggcgcttataacaactacgggaaactttacctcagccctcttttcgcactctctatcggatccgggtttgcgagattcactgcaacactaactcatgtggcattgttcaacggcagggacatatggaagcagacttggtctgcagggaacaccacgaagctggacatccatggaaaattgatgcaaagctacaaaaaagtgcctgagtggtggttttatatattgctggcaggaagtgtagccatgtctctcctaatgtcttttgtgtggaaggagtcagtgcagcttccatggtggggaatgctctttgcttttgcattggccttcattgtcacactccctatcggtgtcattcaagcaactacaaatcagcaaccaggatatgatataatagggcagctcattatcggatatatcctgcctggaaaacccattgcaaacc

SEQ ID NO: 131434 - DNA, 424 bp, Arabidopsis thaliana
ctttcgatgccagaaagttccccattttctccaaccagctattcactactagtggccagaagtatgacacaaccaagatcttgacaccgcagtttgatctggatattggtcttataacaactacgggaaactttacctcagccctcttttcgcactctctatcggatccgggtttgcgagattcactgcaacactaactcatgtggcattgttcaacggcagggacatatggaagcagacttggtctgcagtgaacaccacgaagctggactgccatggaaaattgatgcaatgctacaaaaaagtgcctgagtggtggttttatatattgctgccaggaagtgtagccatgtctttcctaatgtcattggtgtgggtggcgttagggctgcgtatcatttgacatgcaatgtatttttgtttt

SEQ ID NO: 131435 - DNA, 476 bp, Arabidopsis thaliana
cggacgcgtgggcttcctctcttctcctctcctcttattaatctaatcctcctccccgaatatttctctgcctttagttctttcttttttggtaatatatttatttttcgttacgatttggtcaaaaccctagatttgttttccaaaagcatatctgaaaatgaaggacaactttcctcttctccttcggttataaatattctctccggttttgcttgtttaacctaaaagcctcagatctaactccaacaccttcaaagtctgcctcctttccaatcttctttcttctgttcgatctctaatctcagaatttgtgtcggtaaggtaaaggtgataatgagtgatgactgatgagggagttttgggacaaattttaagagtaacgcatagaaactgacagtagagagtgagcacacaaaggcactttgtatgttcgatgcatttgcttctcttgcgtgctaactgctctatctgtc

SEQ ID NO: 131436 - DNA, 528 bp, Arabidopsis thaliana
ctttgtcaatggtaaatgagctgaggcagatagtttctatccaaggagacccttctcagagaatcgcagcttacatggtggaaggtctagctgcaagaatggccgcttcaggaaaattcatctacagagcattgaaatgcaaagagcctccttcggatgagaggcttgcagctatgagatcctgtttgaagtctgcccttgtttcaagttcgggtttttagcagctaatggtgcgatacttgaagcaatcaaaggtgaagaagaagttcacataatcgatttcgatataaaccaagggaaccaatacatgacactgatacgaagcattgctgagttcgcctgggtaaacgacctcgcctgaggttaaacaggaattgatgaccctgaatccagtcccaaccgctccattggagggctaagaaatattggtctaagacttgagcaactcgcagaggataatggagtattcttcaaattcaaagcaatgccttcaaagacttagaattgtctctccatcaacacttcggt

SEQ ID NO: 131437 - DNA, 354 bp, Arabidopsis thaliana
gatcttatcatttcctcgaatagataaacaaaagtcgacaccgagagatccttaccgtctcacgtttctccgcttctcttgtttgtcacttttcgttaaaccccaattcacggcagaatcttgataattggagaaaacgaaagcgtttatggtgttgtgggagaacaattcatagttgtgaagttagttggattcaaggtgaagaaatctaagtatgtcgagcagaactatggatgttctagaaggtctggttaaagatagttcacttaaatggttgcttgggaagcaaagttcttttgatgaagaaatcgaagagattgagaattctccatctgctggtgccaattggatacc

SEQ ID NO: 131438 - DNA, 603 bp, Arabidopsis thaliana
  unsure (1)..(603): unsure at all n locations
gcaccggntccaccagctcgggatccgnagnnccgggttcccaggatgcccaattnttcncggtaancncntccagggntccnaatgncccttgggttggaacattttccncattgtcacacggccggttcctggcgaagcctttgggaacaaccggcgaatttttccggcgaagagatgaatggaggaagcatccgatgctttcgaatcaaatgagacacgctcttcccggacttggaatcggcgtcgccgccttctgcgtttatctcgtcggtgagcagatctacaacaaagctttggctccttccaaatcatctcaccaccaccaggaacagactgctccgtctcactgaagagcatctttcttcttcgatgagatgcttgaaacagtggcacaaggctgaactcagggtctcttcttggttactagttttcgttggattgtcttaataatcatgtttaaatcgaatacaaagaatttgatatctatatttgaactgtaaagcttgttggctcaaaggttctctttgtatcgcacaagttaagattctgcatattcttatcttatttgatacttgctacttagctaaatgcgtcgttaaa

SEQ ID NO: 131439 - DNA, 358 bp, Arabidopsis thaliana
gtcttacacaacaatccttcttacatttctaccaacaaaacacaaaacacaaacatagcattcaaaactttgaaaactggcaccagctcctagtccaatcaattctcaacacgtggcggtgatcggagccggagcagccggtttagtagcagccagagagcttcgtcgtgaaggtcacaccgtcgttgtccttgaccgagagaaacaagtaggtggtctttgggtttacacacctgaaaccgtgtccgacgagcttggtcttgacccgacccgacccatagttcactcgagcgtttacaagtcttttcgaaccaatctccctagagaatgtttgggttacaaggattttcctttcgtg

SEQ ID NO: 131440 - DNA, 458 bp, Arabidopsis thaliana
agagaacccaccattgaaattgggggaagaagagatgagaggctaacacacaaaaaaaaaaaaaccctgctttttcgctggctgactcgggcccttgtcggcttacttcgccggaaatctgaattatccttttgccggagactacttacccttctctttcttcatcttcgaaacggggttttaaagctcagctcttggtgacgccgtcgtgagagagagagagactgaagtcgaagaagaagaaattgaggttgagagatgtatgtagtgcctccgcctcagcgatctgattctggatccaatggtgatttaagggtttaccaaacttggaaaggcagcaatatattctttcttcagggaaggtttgtatttgggccagatgttagatcactggcgctgaccatttgtctcattgctgtccctgttacaattttctgcatctttgtcgcaaggaagct

SEQ ID NO: 131441 - DNA, 505 bp, Arabidopsis thaliana
cggacgcgtgggtccaaagagaagcttcaataattggcttgcaaaacgattttgcgttccgttttcgtatcggaatcacgacggacttccggcgcacgtagatgcttctttctccctccttctccagcatcagttccagtccatggtttgttcccggcgccaaagagtctatgtttcaatggttttgcatctgttcccgagcgggctactcggcttaattgcagccataacgatcaatccgatcaaggtccgcctcaagaagctgttctcaaggcaatctcagaagtgtcaaagactgatgggagggttgggaaaactactaacatgattattggaggcactgtggctgatgattctgctaaagattggctcgaacttgaccaaaagggcaatacatacccaacagaaagagggtttactgcaattgggactggtggcaatgactttgtgcatgctaatgttggtgctggtgaatctggtattgaccgacaaattccagaggact

SEQ ID NO: 131442 - DNA, 744 bp, Arabidopsis thaliana
  unsure (1)..(744): unsure at all n locations
cggacgcgtggggttcacgcttgtctcagcttgttctctactgctacaaccttgataagaccattggagaaatgagatggagttgactcatgcacatgaggatgccgatgtgaagcttagatctctcgacaaacatcttcaagaggtgcataggtctgtccagattcttagagacaaacaagagctagcagatactcagaaagagctagcgaagctacaacttgtgcagaaagagtcatcttcgtcgtctcactctcaacatggtgaggaccgtgtcgccactcctgttccagagcctaagaagagcgagaacacctctgatgcacacagccagcagcttgcacttgctttgcctcaccaaatagccccacagccacaggtgcagccgcagccacagcctcaacaacatcagtattacatgcctcctcctcctacacagcttcaaaacacacctgcaccggtgcccgtttctactccaccatcacaacttcaagcaccaccagcgcagagtcagttcatcgcccccacctcctgcttccatctcacccaagctcagcccaaactcagtcattcccgcagtaccagcaaaactggccaccccaaccacaagcaaggccgcagtnaagtgggggttcaacatattgcctgtncacagggaacaaccgcagtgatngttgaagagggtgaggtgattncatanttggccnctaaaggtttgaagttgggtgngtgcanccaggtttc

SEQ ID NO: 131443 - DNA, 577 bp, Arabidopsis thaliana
  unsure (1)..(577): unsure at all n locations
acgcgtccgggggaatcggattaatgctgcaaagctagacttctcatgagtatatctgggctgatgaaattgaagcagaactgaatgaggctgctgtgatatctatgggaactgaagtcagtgaccttgatttattgcacatccgagaactctgtgaccaggttctttctcttgccgagtacagagctcagctttatgactacttgaagagcagaatgaacacaattgcaccaaatctaactgcccttgtcggggagctagtcggtgctcgcttaatatctcacggtggtagtttgttgaacctcgcaaagcaacctggaagcacggttcagattcttggagctgaaaaagccttattttagagcccttaagaccaaacacgctactccaaagtatggtttaattttccatgcatctgttggtggccaagcttgcaccgaaggaccaaggggtaaaatttcacggtcaactagctgcagaaatctgttcttgctatccgcttgtgatgctcttggtgctccaagacaacacttatgggggtttaaccngtttaagnttgangncggttggnccngta

SEQ ID NO: 131444 - DNA, 611 bp, Arabidopsis thaliana
  unsure (1)..(611): unsure at all n locations
cccaaaggtcttcaatggaaagcatggaaccgtcttggatagtggaacaacatatgcttattttcccaaggaagcatttattgccattaaggatgcggtcattaaggaaattccatctctcaaacggatccatggtccagacccaaatnatgatgatgtttgtttctctggcgctggaagggatgtggctgagatacacaatttttttcctgagattgctatggaatttggaaatggtcagaaactgattctttctcccgagaactacttattcaggcacactaaagttagaggcgcatactgccttggaatcttttcctgataggggttcaacaacactcctaggagggaattgttcgttcgcaatactctttgtcacctatgatcgtgaggattgataagctcggggtttctgaagacccaactgttctgatcatttggggggagcctggcggcaccagaatcttctgcacctacttcaccaatatcccaaaataaaagttctaacatttctccaagccctgctacaagcgagtctcctacctctcatcttccaggtgttttccgggttggagttattaccttcgaagtatcaattaatgtgaacaatt

SEQ ID NO: 131445 - DNA, 875 bp, Arabidopsis thaliana
ccaaccacctatagggaaggctggtccccctgcaggtcccgtcccggaattccggggtcaacccacccgtccgacagtccttgtctctaacctgaatgcagatagtattgatgaagataagctattcaatctattttctctttacgggaacattgtaaggattaagcttcttcggaacaaacctgaccatgcccttgtccaaatgggcgatggtttccaagctgaacttgcagtacatttcctcaagggagcaatgctgtttggtaagcggttagaagtaaacttctcaaagcatccaaatataacaccaggcacagactctcatgattatgtaaactctaacctgaaccgcttcaaccgcaatgctgcaaagaattaccgctattgctgctcccctacaaagatgattcacttatcgactcttcctcaagacgtgacagaggaggaagtgatgaaccatgtccaagaacacggtgcagtagtgaacacaaaagtgtttgagatgaacgggaaaaagcaagctctggtacagtttgagaacgaggaggaagctgcggaagcattggtatgcaagcacgcgacttctctaggcggatcaattatcagaatctccttctcccagctacagacgatttaaaatcacgaaagacctctctctctctctctctctttctctatctctctttcctctaataacattagggtttggtgaggattaatgaatgtatgttgcttttaacttaaaactctctgctctttgttctgttctctctgttttttctttttaacgtgttggttttaattgtttggcttgatttcatgggcttaacatttaatggtaataaagacataaggaaaaaaaattggtaggggcc

SEQ ID NO: 131446 - DNA, 723 bp, Arabidopsis thaliana
  unsure (1)..(723): unsure at all n locations
ngcgcatcaccagatattggtctctttatacaaatctgcttagcggatacaggagtggcgtatactcagattggctacacattatcggttgcagctgcctttggaggaggcttgcctccgggtataaccggcacaaatgataggtgtacagtccttgtctctaacctgaatgcagatagtattgatgaagataagctattcaatctattttctctttacgggaacattgtaaggattaagcttcttcggaacaaacctgaccatgcccttgtccaaatgggcgatggtttccaagctgaacttgcagtacatttcctcaagggagcaatgctgtttggtaagcggttagaagtaaacttctcaaagcatccaaatataacaccaggcacagactctcatgattatgtaaactctaacctgaaccgcttcaaccgcaatgctgcaaagaattaccgctattgctgctcccctacaaagatgattcacttatcgnctcttcctcaaggcgtgacagaggaggaagtgatgnaccatgtccagnacacggtgcagtagtgacacaaaagtgnttnangtgacggggaaagnaagcnctggncagtttagnccggggggagttcggacgtttggtttaagacgggcttttttgggggtcanttnaggtttctttccagttcagcggtttantncggggccttttttntnnnnttnancctttccaac

SEQ ID NO: 131447 - DNA, 496 bp, Arabidopsis thaliana
atggtatcacgatattccaagaaagtcgttgagactctgaagctaggactcaaacaagctgtacttgtcgggttgttcttcggaggactaaacgcagctttcacattatctgttattacggttgttagttatggagcatacttaacaatatatggttccatgaccgttggagcattcacttccttcattctttatagcctcacagttggttcatcggtatcttctttatcgagtttgtacacaactgcaatgaaagctgcaggcgctagtagacgagtttttcagatcttggaccgtgtttctagcatgtcaagttcaggggataagtgtccagtcggtaatcctgatggagatgtggaattaaatgatgtctggtttgcttatccttctcgtcctagtcacatgatactcaagggaatatcgttgaggttgacaccaggctcaaaagttgcactagtaggaccaagcggtggaggaaaaacgaccatagctaatt

SEQ ID NO: 131448 - DNA, 497 bp, Arabidopsis thaliana
  unsure (1)..(497): unsure at all n locations
cgagcttctgtttctattgattcaaaaactggtttgcctgaagattctatccagaagattgtgaatcaggttgaatactatttcagtgacttgaacttggctactacagatcatctcatgagattcatttgcaaggatcctgaaggatatgtgcctattcatgttgttgcgtcgttcaagaaaattaaagctgtcattaacaataattctcagcttgccgcagtgctacagaactcagctaagctttttgttagtgaagatggaaagaaagtgagacgcataagtccgattactgagtcggctatagaagagcttcagtctcgcattattgttgctgagaatctccctgaggatccattgctatcaaaacctgatgaagatttttttaactgttgggagggtgaaggacatccgtacctgccagcctcaaaaattgaagaggggtcccccgcggggggtcagcagctaaagggntggncggtttaaggaccaaggcc

SEQ ID NO: 131449 - DNA, 523 bp, Arabidopsis thaliana
  unsure (1)..(523): unsure at all n locations
cnnnnnnnnnnnnnnnnnnnnnnnnnnnnnnnnnnnnnnnnnnnnnnnnnnnnnnnnnnnnnnnnnnnnnnccacgcgtccgcgagaagacgacagaagggagccggagatggattcgccaaactgggaactccgtggttgttgtaaccggaatcaaaatactttcctcatcaccatcggagtcttcaccatagttatccttctgctatggaggacatttctattgactccatttaaactcattacggtgtttttgcacgaagctagtcatgccgttgcttgcaagcttacatgtggagatgtaaggagctttctcacttcaactactagtcttcaaatgaacttaaaagggtagaggggatggaggtgaatgcaaatgaagggggttcgaccacaacacgtggtggcatttattggttgatcttacctgctggctatcttggctcatcattttggggaatggcattgattcttgcatctaccaatctgcttacagcaagaatagctgctgctggtcttggtc

SEQ ID NO: 131450 - DNA, 867 bp, Arabidopsis thaliana
  unsure (1)..(867): unsure at all n locations
nnnnnnnnnnnnnnnnnnnnnnnnnnnnnnnnnnnnnnnnnnnnnnnnnnnnnnnnnnnnnnnnnnnnnnnnnnnnnnccacgcgtccgtacggctgcgagaagacgacagaagggggtagtaaggaactcccatcagagaaacccaaaaacccaaaatctctctctctatctctatctcgcccgaggaaaagctccgataatggcgtggatgcgactgatacagagcgcgagatctgttcttacgacagcaccagcgtcttcgactcttaacttccatagattctactccaaatccgccgctccttatcacgtgaaagttggaattcctgagtttttgagtgggattggtggaggagttgagactcatattgctaagcttgaaaccgagttaggcgatcttccgaaattgctcgtgactcgtacgcttagactcaagaagtttggtattccttgcaaacataggaaattgatactgaaatatagccacaaatacaggctaggtctatggaaacctagagctgacgcaataaaggcgtgattggttcctgtactcatcgaatcataagttcctctcatactttgttatgctaatggaatgagttgttctcagaatgatctaggcatagcaatgttgcaaatcacttgaaacattgtacccatttgcattcatgtacttgttttttccatggttataaacattaagcgactgttcacatcctggagcagtaacttttgaagtgttgaatgtatcggtcttgggcaaataaaaaaaaaaaaaaaaaaaacccaaacgttaaannnnnnnnnnnnnnnnnnnnnnnnnnnnnnnnnnnnnnnnnnnnnnnnnnnnnnnnnncggctcaat

SEQ ID NO: 131451 - DNA, 584 bp, Arabidopsis thaliana
  unsure (1)..(584): unsure at all n locations
ggaggagtgactcattgattaaagtttagaaataggaatctcaatcactttcattagtttccaatttaacaaatcaaaatcagaagaagaaaaagatgaccagctctgatcctcaatctcacaacgtcttcgtctacggtagcattctagaacccgccgtcgccgccgtgatcctggatcgcacagccgatacagtccccgccgttctccatggctatcacagatataaactcaaaggacttccatatccatgtattgtttcttctgattctggaaaagtcaacggaaaggttataactggagtgtctgatgctgagttaaataatttcgatgtgattgaaggtaatgattatgagagagtaactgttgaagttgtaagaatggataattctgagaaggtgaaagttgaaacttatggtttggggttaataaaggatgaaccctagaattgtatggggaattgggatttccgaggaattggagagtgggtcaccgcggagaaatccgtggggccttttagaaaaatttgtatttgccaggaacccattggaagccttggggggncttnggccctttttnccttt

SEQ ID NO: 131452 - DNA, 298 bp, Arabidopsis thaliana
gcgacgcttgcatcactcccatcagttctgatccattctgcaaatgtgtgcaatgcgagttcttccttcataaagtatgtgctagtcttccacggaggaaacgaaatatcatgcacaccgagaagcttgatctacaagttacgaaggctggcgagtataataagtgtatatcttgtagaaaaatatttgatggcttccggtactgttcaaggtttgaaaagtttgatgtgcggtgcggctccatttccgagccttttcaccatgaactgcatccccatcccttataccacattttgtc

SEQ ID NO: 131453 - DNA, 387 bp, Arabidopsis thaliana
  unsure (1)..(387): unsure at all n locations
tnagaagagaacgaaggaagaagaagaagaggaacgatggggtacgtgtttagagtacgattggcttctttcttcgccggagctgcgactgcgtcttttatcggactctccgttctctacaaggattacaaagtcgctcacgaatcgatttctcagcaggcgaagtcttttcatgactctctggatagaaggatctctactcttgaaagcttgagacaaagtgaagctcctcagcttgctgagacaactgaatagtaatctgtctcgacattgaacactctctgcttggcaatgatgttttgagttgagatgctctttttcnggttttatgaataacttggaagtncttgtatgactctnctgttataaaacaatgaagtttaaggt

SEQ ID NO: 131454 - DNA, 791 bp, Arabidopsis thaliana
  unsure (1)..(791): unsure at all n locations
cttcgattaggttaatcgtatctgggttccaccggactcaacccctaggatcgccggtatattctccgagcgtcttcatctccgtacctaaattcttcaactctgagtcaaaatcgacgggaactggttcaagatccgtagcaatgagcagcgttgagaaaaccgggtcggattctggagcaatagagaatcgagcgagcaggatgagagagaagcttcaaaaagagctcgaaccagtggagttagtgatcgaagatgtttcgtatcagcacgctggtcacgccggaatgaaaggtagaaccgacgatgagacgcatttcaatgtgaagatcgtttctaaaggattcgagggaatgaatttggtgaagagacacaggttggtctatcatttgctccgggaagagttggatactggattgcacgctctttctatcgtctccaagacgccgtctgagtctccttctaaagactagtgtactggtactgtttaatgtatcttctgtttctgttatcagagtttctcatcaaactctggtcgaatccaaaaatgaatttttaccaaccaaagggtttggtttgggaattaatgcggaacccaaagtctccattttaccaacggcttaaggtggggggtgggggtttcggaaatggggggtggaaccaaagcccctggctttaaggtcaaatcgaagttctttcttnnnnnnnnnnnnnnnnnnnnnnnnnnnnnnnnnnnnnnnnnnnnnnnnnnnnnnnnnnnnnnnnnnnnnnnnnnnnnnnnnnnnnnnnnn

SEQ ID NO: 131455 - DNA, 494 bp, Arabidopsis thaliana
  unsure (1)..(494): unsure at all n locations
gaatnnnggggcggacccaggcgtccgccaacccataataataataatttttgggggccggaggaaaggggtgggggaccagagaaaagggcggaccaggccctggggtttttttaactaacctcctttgttaaaccagttggccagattttgggttaaaaaccagttgcgtttgcctaacagaaaaagagttccttggtggttaaagttgttgcaactccacctgtaaggcagggggccaccagaccatgggggttggtttaatcgaaaagttttttttactgggatggcagttaacctggggactttggattcgaccttttgggtttttaagacccagagggtcctgggggattaatggagccaagatggttggcttccggggggatcataaacggccggttcgccatgttgggggcagttgaggcttttgttcttgagattttaggaaaggttggtttgtttccagcaaaaactgcttttctttggttcca

SEQ ID NO: 131456 - DNA, 534 bp, Arabidopsis thaliana
agttgctaaacctggtgctatcattgttctttatacgtggcactaagttccatgctgggagggatatttttattggtcgggctcctaccatcttctctttaatcgatggattagtcaagttcgagaagtttggtcctgacaggaagaagataagtgtgtatccaagagaaattgtaccagagaatcccaatagctacagagcaagaaagagagaaaacttcagattgcaaagggagaagaagaaggcgagacgcgagaattactcgtacacacttcctacaccagaacttgttcttgcatctgcctcagtcgatgatgctgaagccaatccggagtgctagaagattgaatgtggagtttccttgtctctttttgtttagtcttgtttatgaaaaatgatcctttcagagtattaagagttggttgtattgtcgaatccaagcctctcttttgtcaaattgagtcccaagcaggcggatttttacccaacttgaggtattagtgtaatcaaatggttattgttaattagtcaaa

SEQ ID NO: 131457 - DNA, 641 bp, Arabidopsis thaliana
  unsure (1)..(641): unsure at all n locations
cgttctccaaggagtcgagtctgtgaaacgttttgttctgatcattaagcagattatgcgcgcggggcattacatatatgaggggcgtgcatnncacnnncattgttcaccgnnacgtgaagcctgccaacttggtggttacaaagaagggccagattaagctcatcgactttggtgccgctgctgatcttcgcattggcaagaattacatcccggaacgcactttactcgatcctgactactgtcctcctgagctctatgtcctcccggaggaaacgccaagccctcctccggagcctatagccgctttgctttccccgattctctggcagttgaacagtccggatctgtttgatatgtattctgctgggatagtgcttctccaaatggcggttccgaccttaagatctactgccggtctgaagaattttaatctggagatcaagtctgttgaatatgatcttaataggtggcgggacaggactcggacgaggccagacttgagcatactagatctggactcgggcagagggtgggacctcgtcactaaactcatatccgagagaggttctctgagacgtggacgcctttcagcagcaaatgctctcagacacccttattttttgttgggcggtgatcaa

SEQ ID NO: 131458 - DNA, 607 bp, Arabidopsis thaliana
  unsure (1)..(607): unsure at all n locations
gccggcactaatacgactcacttagggaaagccggtacgcctgcaggtaccggtccggaattcccggttcgacccacgcgtccgtacggctgcgagaagacgacagaagggggagggttagggttttagaatctttaaagaatcacattcacacatcagagaggaagaagaagatcgcagccatgttcccaggaatgttcatgcgaaagccagacaaagccgaggctctgaagcagctacgcactcatgtcgctctttttggcagctgggttgtcattatccgtgctgctccctacgtcctctcctatttctccgattccaaagatgagctcaagatcgatttctaaatgactctttcaattttcagcgttgaagcggtgagatagatgcattatgcagcaatggaagatatcttgtttgtttttgcaaccttcttactcttaagacctgagattacgaaatcatgagacatttagttatatagtggtgtacttttgggatttannaaaaaaaaaagaaaaannnnnnnnnnnnnnnnnnnnnnnnnnnnnnnnnnnnnnnnnnnnnnnnnnnnnnnnnnnnnnnnnnnnnnnnnnnnnnnnnnnnn

SEQ ID NO: 131459 - DNA, 623 bp, Arabidopsis thaliana
  unsure (1)..(623): unsure at all n locations
gnttaacccccnttgggaatttccccccaggncggccggatccgggnacccanggccgttaaagatcacttcccacatcggggaggaagaagaagatcgcagccatgttcccaggaatgttcatgcggaacccagacaaagccgaggctctgaacgcagctacgcactcatgtcgctctttttggcagctgggttgtcattatccgtgctgctccctacgtcctctcctatttctccgattccaaagatgagctcaagatcgatttctaaatgactctttcaattttcagcgttgaagcggtgagatagatgcattatgaagcaatggaaggtatcttgtttgtttttgcaaccttcttactcttaagacctgagattacggaaatcatgagacatttaggtatatagtggtgtacttttgggatttgtttttggtttatgttcttctcaccaacgttctccaatttccagcaaattaccttcggctattcactaccgatttgcagatcagattctgcccattattcttttgaatttgccaaattttcttctcagaactagttttgtcttttgtggagcgttttaattaaaacactttttaatgaaacgagtaagttttggac

SEQ ID NO: 131460 - DNA, 438 bp, Arabidopsis thaliana
gggtcggccccaggcgtccgaaattggttcattggggaccagggaaaaataaaaccatgggcacctaaggccgccgggatcttaaattccgccttaccaccggcggaaccctccggggtaaggaaactccattttttttaaacaaccaacggtccaaaatccttttctttaaccaaaaccgaaatccgggccgggaaaccagattcttccgccgccgttgttgaagccccggccacgaaggaggctccggggggattaacgccaccgaagttggaccaaaccacacggtttccgattttggttggaggcaccggggggtttttacgtaaggggcagggggaggagttttacgttattacggggaactaaccgaaggaccagatcttggggatgccgccggggggggcagcgttcatgaaagagggtccgatttttttg

SEQ ID NO: 131461 - DNA, 424 bp, Arabidopsis thaliana
aaaatttggaggatgggaggagggggccattgttcaaggttccataaccggggaaggtggccattcggtaccagacgttaacataaccgccatgggtccttaaacttaatggccagaggatccaaccctttcatcagttatggacctaggggttgccgggttagcagatgggggggatgcctttgcagttgggggggcctccttaattaaaggcccgtttagtagaaggaacctgaagatggtcctggttagggccgttggggttgatggaggttaccaggccttatttgatattatccatatcttggtattttaaaggcagggtttctaacattattaaaaaattccagaaattcaactttctgtgtccattaagtatattactgaaattaattggaaaatagttggggtttaagcttttgtt

SEQ ID NO: 131462 - DNA, 637 bp, Arabidopsis thaliana
gaagatgcaagtgtatccgtcgactccagcatttgcctaaaggctgagaaagatgcagttgatttgaagaagcgagagcttgccagcttcatagtaaagtcatcacagaaagaggttccggctgctcttagcaaaacgagccccgaagctgagtcaggaggtacctccgaaaaggatagtgcagtaaccgagatagtttatagtagagaagaggagaatggagcgaatgcaaatgagacaaatggaggtgaagggtttgtgattgtggcaaagaaaaggagaaggaagaacaaggtgcgacttacaaatgttgcggctgggctgtacgcatcaaaccgtcgtcagtttgtgcatgatctgataagtgggtttcatcaggttaacaaaataaagcttcttgtgaagcagagaatattctcatctcatttggtttattggcttttttttattgggataggtagttggttgcttctattcttatgttgcactctaggtgcagcttgacgccgttgtgttgtaaatttttcgtcgctagttgtcttgtttctgagattttggaagttttttctggtctattatagtccagaaatcaacagcaattttaggtggacaatctgaatctgataccagttttttc

SEQ ID NO: 131463 - DNA, 620 bp, Arabidopsis thaliana
  unsure (1)..(620): unsure at all n locations
acgcgccacagctatcactctgctctgtcactttgtcttttactcagagaatcagagacagagagagaaagagagagagagagagcgaggggaagggaaatggagaaggcattaacgaaagtgacgagctttaaagtgggaagttcatggatctctaagaaagctaaagaagagctctcaaacatcaccaatgacctcactacattctccagtacggttgaagagaaagcaaaatggattttcaacaagcttaaaggaaaaccactgaaaagcttaccagacctcctcaaagaatacaacttaccaccaggactcttcccacaaaacataatctgctacgaattcgatgagacgaagaataaactcaccgtcttcttctcttcaccatgtgaagtcacattcaaagatggatcagcgattagatatgcaacgcggtgtgcaaagggnttttcctttgaggggagctgatgggtgtgggaggattgaggccaaagtgttggtgtggggtaaagccccccaatccaggccgggccccagcttggnaancttggtccctggtggggcaagaacccggccttnggggttttgnnccccctggngntncaagcctnggggtttgg

SEQ ID NO: 131464 - DNA, 591 bp, Arabidopsis thaliana
  unsure (1)..(591): unsure at all n locations
aaccnctgcttntggagtcngcatgctcccnagganttcgggcagtcctgtgaaccctgaactccgatncactgctctgcnnttttcantcncccttaaccatcctcggtaccccggactacactncattgaagctgcgtattcttactacaatgtgccacacagacctcgtttcttcagctgatgtatgatgcgctaattgtctcaaagcaaaagggtttcgatgtgttcaacgcgtgggatgtgatgcacaatgagagtttcttgaaagaactgaagtttgggccaggagatggacaactccattactatctctacaattaccgtttgaaaagtgccttgaagccagcggaactcgggcttgttctcttataagctcaacaacttgatttgatggtatcaacaaacttgaaatttgtctctctttttttttcttcagtctgaactacttctcccatggtttactgaaactgagtttaattattttggcaatgcaattttggattttgctttttaaaaaaaaaaaaaaataataaaaaaaataataatataaaataattaaaagggcggccgttctagaggatccaagct

SEQ ID NO: 131465 - DNA, 492 bp, Arabidopsis thaliana
gggatttccgggtccgccccacccgtccgcaattttagaaaatgggaggagggggccattgttcaaggctccttcaccagggaaggtaggcattctgaaacagacggtcacatcagcgacaatggtccttcaacttcattgccagaagatccaaacctttcatcagataatgaactagaggatgacgagttagcagattggggtgatgactctgcagctggtggtgcctccctcactcaaagcccgcttagtagaaggaaactgaagatggtacttgataaggacgatgaggatgattgaagataacaagacttatatgattatatccatatctgggttatataaatgcaaggtatctcacaataataaaaaaatccagaaattcaactttcatgttacatttagtaatatactgtaattcattggaaaatagttggtgttttagtctttgttttgccatattgttgctctatgttttgacttgttatcaat

SEQ ID NO: 131466 - DNA, 639 bp, Arabidopsis thaliana
  unsure (1)..(639): unsure at all n locations
agctacatggttggttatggtaacaatttccctcagagagttcaccacagaggctcttccatcgtctctgtcaaggtggaccgtacatttgtcacctgccgaggtggatatgccacttggttcagccgtaaaggcagtgacccgaaccttctcactggtgctattgtcggtggccctgatgcttacgacaatttcgctgacaggagagataactatgagcagactgagcctgctacttacaacaatgcaccactccttggtgttcttgctcgtctcagcagtggtcattccggttatagccagtttcttccagtggttcctgctcctgttgtccgaagaccaatgcctattcgtagaccgaaagtgactactccagtccgagcttctggtccagtggctatagttcagaagataactagttcatgggtctcaaagggaaggacttactacagatactcaacaactgtgattaacaaatcttctagacctctgaaaagtctcaacctttcgatcaagaatctctatggaccaatctggggactctcgagatcaggcaactcgttcggtttaccctcgtggatgcactcattgccatncggaaaatccctagagttcgtctacattcaactcaacaananc

SEQ ID NO: 131467 - DNA, 536 bp, Arabidopsis thaliana
ttaggtgcactatagaagagctatgacgtcgcatgcacgcgtacgtaagctcggaattcggctcgagcatttttccccttcctcttctcatctctcgataacacctctctctctatctctctcactcgtttcaacaatggcgattcaaactcagcttccttgcgacggagacggtgtatgtatgcggtgccaggtgaatcctccgtcagaagagactctcacgtgtggcacctgtgtcactccatggcacgtgtcgtgtctccttcctgaatcactcgcttcttccactggagactgggagtgtcccgattgctccggcgttgtcgttccctccgccgctccgggtaccggaatctccggacctgaatcttccggttcagttctcgttgctgcgatccgtgcgattcaggctgatgtgactttgaccgaagctgagaaagccaaaaagaggcagagactgatgagtggtggtggtgaccatggtgtcgttgttgaagaaaagaagaagttagaaatcttttggtctatttgcattc

SEQ ID NO: 131468 - DNA, 419 bp, Arabidopsis thaliana
ggattcacaatcacattcttcttaaattgccgggttttggggtgggatcttttaggtttagctggggttaagggttacggcaactactaaggcctgggcctggattttccgacctggtccttaaaagccaagattcctaaccggtttttccggtgggtggaaccgggactggtcgtttacatggatcggttaatgggccaaaacgtcgtcgttcaaggtggaagctaaaaaaggagaagggtggcccggttgggcatcgccggattatctaaccggcggttttgccggggccaatgggttggacccgtggggtttagctagggttccagagaacttgaaatggttggtccaggctatagttggtcaacggccgatgggctttgctcggggttgctgggaggttttttgccggaggtttt

SEQ ID NO: 131469 - DNA, 424 bp, Arabidopsis thaliana
tttaaatcctttcctttaatggaggttaattataagattccgattttggccacataagttttccaccaatcctccttggccggccaaacggttttaaggccttccagcgacctaatccaaaaggggggcgtttgggccgggtggccgggggaccatcgcgtggacccgtaaggtttactccccaaggcattgggtttggcccagaccgtcccaggtcctggggacctttttgggggaccacaccgccttacttaactggggattcccccggggcctccggttgggccaccgttggactttgggttgccccggggccattcgttaagaaccgggggctggaggtattccacagcagaggggctttgtggggggctttcggtggcccattccttgaaattttttccaagaccggggttaaattcgg

SEQ ID NO: 131470 - DNA, 843 bp, Arabidopsis thaliana
  unsure (1)..(843): unsure at all n locations
gtccccattgaataccgtcaggaccaacagcttgtgtctcatgatgtgaaaagcagtttggacaactataagtacacttactgtgttaagatctgtcctgtttgccgtgaggatcttgtttgcttgccttctaaagttgctagcggcttggggaaccttggtccacttgtggtttgcacaaaagtctctgataatatcactctacttgatccgagaactctaaggtgtgccttcttggatgcgagacagtactggaggtctgggttccgatctgcgctcaccagtagacaacttgtcaagtactttgtgtttgatgttgagccacctgttggtgaagcgactgttggtgggcaaaagtacgctctttcctatgtccagattgcccgtgaatcagacattggtaagatgttttatgtccaaactcatcttggacacattctgaaacctggggatcaagctttgggttatgacatctacggagctaatgtgaacgacaatgaaatggagaaataccgtctgagtgtgaagaatgggcttcctgaagcaattctgatcaagaaatgttacgaggagcagagagagaggaagcagaagaaatcccgtaactggaaactcaagtcgcttccaatggaaatggatgattcaagaggcagggttgatccagagaagacagacaaagaatacggagagtttttgaggggatcttgaaggaaaaccctgagctaaggttcaacatatctttgttacaggggccaaggtttatcaagcttcttgagacctgctttcaatgacagttggggaagggtgcccccttttttccccatttnnggngtttcnttnctt

SEQ ID NO: 131471 - DNA, 395 bp, Arabidopsis thaliana
atcacatttaattaactaaggagcctttaacttgccccacactttaaccgaaagggccgcttggccatgggttttttcttttccggtttggaccggaagggccgttaagttttccccgggggcctccgaagattttggaaccggccgaataaccatgcgcaaggcctccaagccaaccggtccatccggaagccaatggtccggatccgcccgggtaaagtcctggggtccattttccggggggcctccgggttacctaactggggagttccccggggtttacgggggggacactgccggtttttccgccgatcccgagaccttcgttgggaaccgtgggctagaagtattccacagcagatgggccatgctcggagccctaggttgggttttcc

SEQ ID NO: 131472 - DNA, 402 bp, Arabidopsis thaliana
aatcccggggcggaccacagccgtccgaccaaaaaaacctaaaaggttttagagggaaggagggggggggttggagggtaaagaaaaagatgttggagtcggggttaacaggtttccggaggggcacccaaccggaacttcggttaaaagggccagggcctccaaagggccaccacctgccccgttgttcaagcccggcaggctagcttaatggtccttttggagggctgggatggctgagttaatagctccgttttggttcctgaccataactgtttggactgtaatgggtgtgaaggggcaaccgaccttgtgtgcttccgccggaatccaaggtttcgtttggcctttcgggggattgattttggttctcgtttactgaaccgttggaatttctggtgg

SEQ ID NO: 131473 - DNA, 541 bp, Arabidopsis thaliana
  unsure (1)..(541): unsure at all n locations
aggattcagtgccttggtattctgcggatacatagtctatgataccgacaacctcatcaagcgtttcacatatgacgaatacatcctagcatcagtagctctctacttggacatccccaatctcttcttgaccatattgcgtatactgaggcaaggcgacaactgaaaggcataaaacgatgcttcagtgatgtgatccagtttataactataagagaatccaaaagcctttatgtgtgtatatctgatttctgtttggagaattaagtatatgatgctatgtggttaaacgattgatataaacaaaatcaagcaatgtcgattttcaacttcaaataaatttgttaattttggcggaattttgatgccttttgtcgtatccatttcgatattctgattgcttaagagcaaaagcaaccattgataccaaaaaaaaaaaaaaaaaaaaaaggnnnnnnnnnnnnnnnnnnnnnnnnnnnnnnnnnnnnnnnnnnnnnnnnnnnnnnnnnnnnnnnnnnnnnnnnnnnnnnnnnnnnnnnnn

SEQ ID NO: 131474 - DNA, 664 bp, Arabidopsis thaliana
  unsure (1)..(664): unsure at all n locations
ggcgattgctctctcgtcgtcgtcgagatcacgtccattactctgcagccgaagctgaagacgattcatggattagggacagtacttcctggttattcggtcaaatctcactttcgtagtgtctctctccggcgtagcgccgtggtcgtgtcggccattaccggagcttcttccggagctggaatagggaaaggtacagctgattcgctagatacagtgaaagtcttggatttgagaggaaatgagattccgatttctgatttatggaaagataggaaggccgttgttgcatttgctcgtcattttggatgtgtgctctgtcggaaacgagcagcttatcttgcagaaaagaaggatgtgatggatgcatctggtgttgccccttgttctgatcggaccgggaagcatcgatcaggctaatacttttttggacagactaagtttaaaggagaggtctatgcggatccaaaccacgcatcatacgaggcgcttgagttcgttccaggggtttctgttacatttacacccaaagctgctatgaagntactagagtcttacatggaaggntaccgccaagactggaaccctcgtttatgaaagtncagttgaagnggcggcttgnaacaagggggatnttagttctggccnnggaaaaananaanta

SEQ ID NO: 131475 - DNA, 913 bp, Arabidopsis thaliana
  unsure (1)..(913): unsure at all n locations
cgagtcttatattcagttcgtttcatgaagataacactactgcattcacttgtgctatttgccttgaagactacactgttggagacaagctcaggctcttaccttgctgtcacaagtttcatgctgcgtgtgttgactcatggttaacctcttggagaactttctgtccggtgtgcaaacgagatgcaagaacgagcacgggagagcctccagcttcagagagcacgccattgctctcatctgctgcatcgtctttcacttcttcctctctgcactcttcagtcagatcatctgcactattgattggtccttccttgggctcattaccaacttcaatctctttctctcccgcatacgcaagctcatcctatattagacaatcattccagtcttcctctaaccgtcgatcacctccaataagcgtaagtcgaagctcagtggatctcagacaacaagcagcttctccatctccatcaccatcacagagatcatacatttcccatatggcttctccacagtcactaggttacccaactatctcccctttcaacacgaggtacatgtcaccgtatagacctagcccgagcaatgcatcacctgcaatggctgggtcatcgaattatccattgaatccactgcgttacagtgaatcagctggaactttctctccatacgcctctgcaaactcgcttccagactgttagaaagtctacaggaccaaccactcttggttcaggtcatataagattatttctttttgcaatttgagttttactacggaacggacttctggcggttgtgtgtggtgtgtgtgtgtgtacggtggttttatagcttttgggtaaggggaacacatcggtttgggtngggggtttacactngggattnnaaaangggccttttcaagnaaggc

SEQ ID NO: 131476 - DNA, 469 bp, Arabidopsis thaliana
catttcccatatggcttctccacagtcactaggttacccaactatctcccctttcaacacgaggtacatgtcaccgtatagacctagcccgagcaatgcatcacctgcaatggctggatcatcgaattatccgttgaatccactgcgttacagtgaatcagctggaactttctctccatacgcctctgcaaactcgcttccagactgttagaaagtctacagaaccaaccactcttggttcaggtcatataagattatttcttttgcatttgagttttactacgaaacgtacttctggcgtttgtgtgtggtgtgtgtgtgtgtaaccatgcttttatagtcttttggttgagatgaaacatcatcgcaggtaggttagagagattttaacacttcgacaattacacaaactcggttcctttgtacaaagaaatatgagctaaagaaaatacacgtctctttccttgtt

SEQ ID NO: 131477 - DNA, 473 bp, Arabidopsis thaliana
  unsure (1)..(473): unsure at all n locations
gcccgaaannccggggcggaccgaggcgtccgttaacacccccccgtttaaaccgttttacttggggctgaactacttaacctaaaggcccgcctgaccaagggttgtgtctgcccgggccttccccggtaaggccgccaagctttcccccggggattttgaagtcctgggaggcggccgggtgccattgaggaagactgtggccaagccaaagggcccttcaggcagcccttggtccggttctgcccgggtcaggtcctggggtccattctttggcaattaaccgacctaccttaccggaaggttccccggggcctccggttgggccaccgccggcctttaagttgaccccgagccattcgcagggaaccgtgacctagaagttttccccagcagggggcccttgctcggagccctaggctgcgtcttccctgagctttgggctagaaacggagtcaagttcggaaaggcgg

SEQ ID NO: 131478 - DNA, 442 bp, Arabidopsis thaliana
cggaatccccgggccgcccacacccgtccgaaaacctaaactgggattctttcgggtaaccttggtttcggttccttcttcggtccccaggggttcaactgaatcttaaggatggcgagcctcctttgttttttttcctttcggcaggaaacttttttccgatgggttcgtttccatcgtttccttccagacttttgcattgggaggcagggggggttccaggaagggtgggcctgaggccaaccttaagggggccattaatggattcggtgggaccggggggaccttcctgggatgttggcttggccgcagggcctctcctttggttatcatggccattaatgccactggtggcgtcaggcaggcttcgcttttccttaattccgactttcctttcggattcttggttgctgttgtcaaaccttttgaggggcctgcattt

SEQ ID NO: 131479 - DNA, 451 bp, Arabidopsis thaliana
  unsure (1)..(451): unsure at all n locations
cgggncggccggggcgtccggtttttttttcctttttccaaacttaattttttccgaaacccttttttttttaaaattttggggaaaccttgtttgccgccgggcgccattttggggccggcgaatccggagtttccaagacctatcctaaataagccggtaccatccgtaaggggggcaacatggtaataaaaaaccgtccttgcagggtggtgggggtttcgacttccaaaactggcaggcccggtacccccaaaggtaacttggtggttatggatattttaactgttaaaaagctggaagatatggttccattttccaccaatggggaggttccacatgtgacccgggtggattaccagtggatggatttaactgaggagggtttcgggggccttttaactgacagggggggcaccaaggatgatctaaagcttccaaccgatgatgg

SEQ ID NO: 131480 - DNA, 451 bp, Arabidopsis thaliana
attggtaataatccagcaaaaggggggttattccgagcgggttcaatggacaatggggatggaatagctgttggatggttaggccaccccgtctttagaaataaagaagggcgtgaactttttgtacgccgcatgcctactttttttgaaacttttccggtagttttggtagacggagacggaattgttagagctgacgtcccgtttagaagggcagaatcaaaatatagtgtcgaacaagtaggtgtaactgttgagttttatggtggtgaactcaatggagtgagttatagtgatcccgcaactgtgaaacaatatgctagacgggctcaattgggtgagatttttgaattagatcgtgcgactttgaaatctgatggtgtttttcgtagcagcccaagaggttggtttacgtttggacatgcttcgtttgctctacttttcttctttg

SEQ ID NO: 131481 - DNA, 481 bp, Arabidopsis thaliana
gtcttctttcttcttcggtaaacttcaaatcagaagcgaagaagagatcaaatcaatctgatcgtagatgggttgtttcagttgcttcgacggaacccaaaaggaacagcgtaaggaaggagagagacaagcctccgccgaagctcgtgccaaagccgccgaagctgcccagcgacggaaagagcagtttgataagtctgcagctggaagagctgcacaagctcaattacaacaaatggctaaacaatctgcaaatactaacaaaggagagcctgttcttaagtggcaaatgacgtagtgatgagtcctggtttcaaaaggaatcaatttgtgcgatttggttctttggaaattgtgtgttcttcaatgtttgcaatactttggttatgtgaattgaagcctattttcctccttattcatctgattatcttttgactttcggtaaaacaaaaaagaaattacagagttcattgttaagatc

SEQ ID NO: 131482 - DNA, 652 bp, Arabidopsis thaliana
cgactacacctgttgatgttgtttcctctttttaaagatatgaggaatctagaagactgagagtcgctattatccatgcaatggcgaggatggctgcaattatggcttccacttacaaagcatacttaggtgttgggcttggtcctctgtctttcttgacaaagtttagagtaccacatccaggaagagttggtggtagattcttcgttgacattgctatgccatcgatgcttgactgggtccttggaggtaacagtgaaaaactccaaggaaggccacctagttgcagactcactgacattgccgatgaccggcttcgagagtggtttggggatgacgatgctcttgaacggactataaaggggagaatggtatctaattccacacggcgacgattgttgcgtttcggaaaccattatgtctaaccaaagatgaagatcaaccttgcatcgtcggaagcgaaccagatcaagatttttctggaatgcgcattgtgatcccttcgtctcaggtttcgaagatgcatgctcgtgtgatttacaaagacggagcttttttcttgatggatcttttaagcgaacacggaacctatgtgaccgttaactaaggaagacgatattgagcaacaccgaattttcccgccgcggttaaa

SEQ ID NO: 131483 - DNA, 497 bp, Arabidopsis thaliana
caacaactgcatccaccaaatcctcaccgttatggaaaccctttgcctcaaactgttgttccgttgatgaccaaaccgtctttggcaatctcagccgttgccgaccttcgagatcagaattctccaagaaccatctcggaccacttccttcttttcggcgactctcctttgctgatctaagccgttcttcttcggctaggatcaatgaagatcttgcacagactcttggagccgacttagtggattttcagatgtgtgaactcaagatgatcactcagagtttctccgggaactatcttctcggagaaggtgggttcggcaaagtgtataagggttatggttcgatgattatctccggcaaagtctcaaggctcagcctgttggctgtcaagctattggacattgaggggcttcaaggacatcgtgaatggctttctgaggtcatatttcttggacagctaaaacacccgaatttagtcaaacttattggttactgc

SEQ ID NO: 131484 - DNA, 703 bp, Arabidopsis thaliana
  unsure (1)..(703): unsure at all n locations
aacagtaccgtttgagctaagctttgattactagtcgtcacacaagacgtccgaagaagaggtaatgaagaacgttgaaagtagtggtgaatgtgttgttaaggtgaaagaggaagaacataagaatgttctgatgctaagattaaactatgactcggtgatatccacttggggagaatggaggagaaagtactcatcagaagcaatacgttggtggatgtttaccatcaagtgggtttggagatggaggtagagaagctagagtttcgagatacagagagaagaggaggacaaggttgttttctaagaagatacggtacgaggtacgtaaattgaatgcagagaaaagaccacgaatgaaaggaagattcgtgaagagagcctcgctcgctgctgctgcttcaccattaggtgttaattactgaatagttaatatctattcatgttatatctcactttacaaatttcggtgaatcttttttcttctgaaacaacagaagttattttggcacttaattgtgctttgaggacttgtatgtacatagaagtaaccaataataatgtgacttttacttgtattgatagcactgatgtatatatctggtaataagaatgtgcaaactgaaaaaaacaaaaaaaggannnnnnnnnnnnnnnnnnnnnnnnnnnnnnnnnnnnnnnnnnnnnnnnnnnnnnnnnnnnn

SEQ ID NO: 131485 - DNA, 453 bp, Arabidopsis thaliana
  unsure (1)..(453): unsure at all n locations
gntgagggnccgggncngaantnccgggnagcccactgtgccggagtatttctccgttcgtnctctccctctctctcgcttcacgttggcgcccgatcggacaaaagtaaacgacaatggcggatgttttggtgaaatctatgcacaaggaagaagctctgatggagaagatcgctgggaagatccacgatcacgactcttcgtcgtcgtctgattccgagcacgagaaaccagagtctccgtcagctttgaaggccaagatatatcgtttgtttggtagagagaagcctgttcataaggttctcggtggtggcttaccggctgatgtggttctttgtggagggacaaaaaacttctcagcttctgttcttggtgtagcgacctgccatatggggntctggtttgaattggttgaggatcaattttctttnagncttggtgtggnancatttt

SEQ ID NO: 131486 - DNA, 713 bp, Arabidopsis thaliana
  unsure (1)..(713): unsure at all n locations
cgagtcgacgcagcctctgtactgagtcgaaataacgacagaggggggaagcagacccaaaagaaaaacacacacaagacttggcttacaaaacaaacaagtcttcaagaaacttggaaagctaagagctatggctatggagttagagcttgatgatgatgtcttctttgcagacataagcaaacagatctctcttctcatcatggatgaagatgaacacttaaaccctgtttctctctcttcctcctcctcctctctctcattccagggtttgttcagaggaggttaccaaacggctccatatatgtatcaacaagaacagagcaaagggactggtgtgttcatccctaaatcgtctcagcctagaagaagacctcatcatcatcagaagcaaggtaggtatagttccttcaacgccaagcaacaacactctcttcatcaaaacagacaagagtatcagcaaaatcatgagaactcaagaagtactctcaccacttcacaaccaataacaacaacaagagcaacatgaaccagcactagtgttcatgcttctatccccaggaggagcttcagagatggatatctttttcacttggtaattttacaaatattttcctgggggncaatcntataattttaattggtnctnnggttttttgttgaaattcnggcataaagggttttggnggtttgggtntnccctccaggtntnt

SEQ ID NO: 131487 - DNA, 363 bp, Arabidopsis thaliana
gaacagcactagtgttcatgcttctatcccaagaagaagctacagagatgcatcatctatctacacttgattaattttaacaaatattcttctgtgtgatcaattcatataatttaaattagatgcataagatttatttgtttgtaaattcagcgaacaataaaagggttgtataaggaaggtattggagatgtgttccaacttccaagtttgttcttgcttttatgtaactctttcttgtcattttagagatgcactaactttttcccccatttgtaatcttttaaggattgaatgaaaatcaaatttgttggttgatgacaacaagattgataaataaaaaaaaaaagggcggccgccgac

SEQ ID NO: 131488 - DNA, 428 bp, Arabidopsis thaliana
cacaagtgaaggttcaagatacaacctcacttttaccttaggcgatgctaacgatgcgtgcggaggacatttcgtggtgggtgctcaagctggctccgtaactcaaaacttcacattggagagtaatgggactggctctggtgagaagtttgggttagtgtttgaagcagacaaagatgcagcacagataagtttcaccagctactcagttacaatgacaaaagagaatgttgtttgtggtcctgtgattgatgaagtgatggtacatcctcttggtggaacagcctcagtaaaacccacttggctgctacttattttcgctttgttgtatgttgcagttctctgattgaaactgtttgggagagaggtcataaagaagatatttttgcaaggagatgtgataatcattctagcttcatgatttatat

SEQ ID NO: 131489 - DNA, 378 bp, Arabidopsis thaliana
  unsure (1)..(378): unsure at all n locations
cttaanttaaaccananccacatgttttctattggtcctaaaccgccccctccggcattcatccagattaccagggatctccgccgtttccggtaaagagctgatactttccggcagggtacgggcggtggagcccaaagaagccaatgcggttgtggcgtcggagggatatttactgtaggacgtggggccggcttgggaaagagaaaaggcacccgggaaaggttccttacacgtgccactgttcggggaagacccagacattgggccgaccacgttgcttgaagaaagggattcatttgggatatattcggctttggcggggccagaagttcaccatnntcaattgnnggatttncccctccgttttttttgnng

SEQ ID NO: 131490 - DNA, 463 bp, Arabidopsis thaliana
aaaccaacaacaaaaagttaaagaaccatcttatcatcataatcataatcatgataccacaaacttaaacctctccattgcaccatcatcatcatatcaacattacaacaactttgatcgtataaaagagattatggcgagcgagcaaattatgaagatagcgatgaaggagaaagcttacgctgaggaagctaaaagagaagccaagaggcaacgagagatagcggaaaacgagtttgcaaatgccaaaaagattaggcaaaaagcacaagctgaactcgagagagctaagtttttaaaggaacaatctatgaagaagataagttcaacgatcatgcaggtcacttgtcaaacatgtaaaggacagtttcaagcagttgcggttccggcggctacggctgatgagacgtctcttgtcgtgagttacatgtcgtcagcgaatactgacggagagttggaaaat

SEQ ID NO: 131491 - DNA, 459 bp, Arabidopsis thaliana
  unsure (1)..(459): unsure at all n locations
gatttctggcattttagcagatatgagaaagatatttccatttgagcttttccacttgggtggtgatgaagttaatacagattgctggaaaaacacaactcatgttaaagaatggcttcagggtcgcaacttcacgactaaggacgcatataaatactttgtactccgagcgcaacagatagctatatcgaaaaattggacacctgtcaactgggaagaaaccttcagttcctttggaaaagatcttgatccgcggactgtgattcaaaactggctagtgtctgatatatgtcaaaaagcagtagcaaaaggtttcaggtgcatttccagtaaccaaggatattggtacctcgaccatttagatgttccgtgggaagaggtttttaacaccgggcctctaaaatgggntcnggggtccttctttccnaaaagctttttcatcggggggggnagtttcat

SEQ ID NO: 131492 - DNA, 377 bp, Arabidopsis thaliana
tccaaccaaaaaaaggaaaccccaaaaccaaggtttttatgggtttcctaaaccatggtttggtcctcccttgccttggccggaagggttgggaagcctgccgaataaaatgtcctgggaggcggccgggtgaccatgaggaaaacggtcgccaagccaaagggtccataaggcagccaatggtccggatctgaccgagtaaggtcctggggtccattttccggcgaggcccccgggttaccttaccggggggttcccgggggactacggttgggacaccgttggtttatccgccgacccaaagaccttcgccgggaaccgggggctagaagttttccacagaagatgggccatgctcggagccctaggttgcgttt

SEQ ID NO: 131493 - DNA, 411 bp, Arabidopsis thaliana
agaaaattaggggggtcatgggagctcctctgtaccgacctccaagcaatcagatggtggaggatccttgggttcctatgtcctcgccggtggattcgaaacccggttttccaagggagggaatcaacctaggattttttcaggaggccaggttggtccgtcctgaaggttgggaggacttgttttttttctgcactggggattccgctcctgtggctagggaggttggggccagaccacggggggggggactcctcggccttgagggggctggtaaaacctctctattccgcgctatactgggccaaagcatgctaagttcgatgactcatgtggaaaatcttcagatccaatctgatgttaaagaatgtattattgggggggttggttactcggacactgggggcgtaa

SEQ ID NO: 131494 - DNA, 657 bp, Arabidopsis thaliana
tccgtttatatatatattccaagttaaacttcatatcatacacacaaacctaaaacaccgaaacaaaaacaaagagatttaaacaagaagagttattatggcgagcttgctagataaagccaaggacttcgtggcggataaactcaccgcgatccctaaaccggagggttcagttacggacgttgacctcaaagacgtgaaccgtgactcagttgagtacttggccaaagtctctgtcaccaatccttacagtcattcgattccgatctgtgagatcagtttcactttccacagcgccggcagggagattggaaaggggaagataccggacccgggttctctgaaagctaaggacatgacggctcttgatattcccgtggtggtgccgtatagtatactgtttaacctggctcgagacgttggtgtggacttgggcatttactacgagctccaaatcggtctaaccatcgaccttcctgttgtaggggaatttactatccctatctctagtaagggaggaatgcaaacttcctacttttaaagatttcttctgatcgcacaaaacctatatataagaccacacatcgttatgatggtgaatggtgatcgtcgtaatgtaataaggtgggtttgctataactaataatatgttatttt

SEQ ID NO: 131495 - DNA, 479 bp, Arabidopsis thaliana
aagaaagaggccaaagttattatggacaaacttcgtttaccaaatggtctagctctaagcaaaaacggttcgtttgtagtcacatgcgagagtagtacgaacatttgccatagaatatgggtcaaaggtcccaaatccggaaccaacgaggttttcgcaacgctccctggttccccggacaatatccggcgtacgccaacaggcgatttctgggtcgcattacattgcaaaaagaatttgttcacacgtgcagttttgattcacacttgggtcggaaggtttttcatgaacacgatgaagatggagactgtaattcatttcatgaacggaggaaaacctcatggaattgtcgtgaaactctctggagagacaggagagattcttgagatacttgaggacagtgtaggggaagccggtggaatacgttagtgaggcttatggggcaaaagatggaaagttatggatcggatctgtgtatt

SEQ ID NO: 131496 - DNA, 717 bp, Arabidopsis thaliana
  unsure (1)..(717): unsure at all n locations
gncccttcncaatcnccgacccatgggnccccgnccccggcttttccntgtaaatggctncatccaaggggtggttttngaggttttgnccanctnccatngccttcaccancatgatcccttgatttttgggaccagaccattcgtcatgcttatgagcttttggaattgaatggaaaccgggttatcgtcatcggagaactcgcttctgaacttggtgttggatcatccatcccggttcataccattctaaatgactggataagacatactgacgggaagctgagtttcttgggttttgtcaaactgctgcacggtgtctcgactcgacaatctttagcgaaaacgcgatgaggaaagtgactcggtgttataacggattcgaaagaggaagaacatacaactgcaagaagcaaatgggtggattggggttgggaattggaatttttttcaggacccattcctatgtttatagtgttagaaaaagaatgctaagttccgacaaagaaagagagtatccagaaaaatccgacaggcctggagagttgtataataagatgataatccacagtcgtgttcttccaaatcatggaagacagacattaagaacatccctttctcttttcaaaaaaaaaaaaaaaagnnnnnnnnnnnnnnnnnnnnnnnnnnnnnnnnnnnnnnnnnnnnnnnnnnnnnnnnnnnnnnnnnnnnnnnnnn

SEQ ID NO: 131497 - DNA, 603 bp, Arabidopsis thaliana
  unsure (1)..(603): unsure at all n locations
tggagagcatggccttcaacatcacggccagaatagatgatgtgctttatgttgatgatgccatgagaagatccatctctgtcacagaatcgctatccctattcagcatcaatggactcaaccctcaaaaagcgttctctgtgcagagctctccgcacggttcaccatttgcaacgcctgccctaagtgtagcatcaagaagcccgaggagagcaccgccgctgtattcagtgaagaggaatgggacgagagagaagggaatagtgggagaaacagagaaagcatggtcgtatgcagggaatctgagttcaagaagagtaacgggagtgacgccggaaagagattaagattgaaaatagaagaatgtaaatcaatggttgtagagactgtagttgtttcttgtttgtctgactacgaagacgaatgtggtaatagcaacaagaatgttatcttatgtggagttctgaaatgttgttaccaaatcaattccttagcgcatttaccaagtttaaaaaaaaaaaaaaagnnnnnnnnnnnnnnnnnnnnnnnnnnnnnnnnnnnnnnnnnnnnnnnnnnnnnnnnnnnnnnnnnnnnnnnnnnngg

SEQ ID NO: 131498 - DNA, 587 bp, Arabidopsis thaliana
tctatgacgtcccatgcacgcgtacgtaagctcggaattccgttcgagtgcgtgtgctagcgggaacttgctactgctttgaaagaggctaaaccgagatttgatgcggctggtgttaaattgatagctgttggagttggaactcctgacaaggctcgtatacttgcaactcggttaccttttcccatggatatgtctttatgcggatcctcagccgcaaggcatatgatgttcttggtttatacttccggttgggccgcactttcttcaacccagctagcaccaaggtcttctcaagattttgcgagaattcaagaaccaccaaaaatttctccatagaatcccactcctgaaaaacgaaaccattgtggtggcaccagggaaggacctttgggttcaaaaggaaaaaattatcggtccggtcaaaaagacaaaggcccgggaaaccttcctccctgggagaaggcacttatgggcggcgcaaagcactgggtgctgaaacataggggaacaaagccctttgggttggccccctacctaaaaaaaaccggtttttggagcttgaaaaaaaggtcttttttttttaa

SEQ ID NO: 131499 - DNA, 504 bp, Arabidopsis thaliana
  unsure (1)..(504): unsure at all n locations
ctccgtttcaccgattagtaggcctttttttttttacgagagagctgccactgaggccttgactgattacagagaaggtgtcgctgaaatactcggcgatgtctctatctttactgcttcaggccaacgcgtgcaattcagtgatctctgggatcagaaagatggaattgctgccgttgtactcttgaggcatttcggatgcgtttgctgttgggaacttgctactgctttgaaagaggctaaaccgagatttgatgcggctggtgttaaattgatagctgttggagttggaactcctgacaaggctcgtatacttgcaactcggttaccttttcccatggaatgtctttatgcggatcctgaaccgcaaggcattttgatgttcttggtttattacttcggttttgggccgcacttttnttnaaaccccagnctagnaccaaggtcttntnaaanatttagcgagattccgtgaaagcaccaaaaaaatttcacccctaggag

SEQ ID NO: 131500 - DNA, 1136 bp, Arabidopsis thaliana
cttatttcgggtcgacccacgcgtccggtgactttggagactccaagaccgcttctctctgcgtcttgagactagtttacacaaatgatggcggagagattgttaagggggtctgctccaacttcttgtgtgacttgaagccgggtgatgaagctaagatcactggacctgttggcaaggaaatgcttatgccaaaagaccccaatgccaccatcatcatgcttggaacaggaactggaatagctccattcagatcatttttgtggaaaatgttctttgaggagcacgaggactacaagttccatggtttggcgtggcttttcttgggtgtacccacaagcagctcacctgctatacaaggaggagtttgagaagatgaaggaggaagaacccagacagacttcaggctggacttttcggtgagcagagagcagacgaacgagaagggagagaaaatgtacattcagacaagaatggcagagtatgcagaagagctgtgggagttgctgaagaaagacaacacctttgtttacatgtgtggtcttaagggtatggagaagggtatcgatgacattatggtctcgcttgctgctaaagatgggatcgattggttggagtacaagaagcaattgaagaggagtgaacagtggaatgttgaagtctactaaggaagcttctgagggagtaattatataatgtagataaaaagcttctgatgcattgtgaaatcttcatatctgcttcttttttctttctcaaggattttcaatcaaaacattcaaaagagagcatcaataccaccaaactactctttctcacttgttgttcatgttatatttcttgcaacaatatagtgagttttgtgaaatatgtttttctcatctccctttttgaagggctaaatcacttttcagtaaagtcatcaaccgaacgacccttttgagcgaggtatcacaacacattcttctttgcttcgttgggtggcaatttcctgatttttgcaacgaaaaggccgctggttgctgaggtggaaggatcaaaccgcagtgtcttaggcgtgcgacacttctacacggccaatccttggccatttcaatctcttgtagctctgcagagaacttttcagaaggacttga

SEQ ID NO: 131501 - DNA, 312 bp, Arabidopsis thaliana
gagaaatgcaaggaagcagaagcttgggtgtgtgtagcttgaaaaacaggtaacttcgctgggggaaggtgtatcattggaagctaaacttctgagccgaaaagaagcagctttgcgtcaaagagaggcggccctcaaagatgcaaggcagaatagagatgggactaatagagagactactgctcttcggtctcaagtagagactgcaaaactggtgaccgctgctatagtagcacaacttcaaggagcagaatctgtagtcaatggtctacggacaatgacgcatagaatgatattgaccccaaatgagat

SEQ ID NO: 131502 - DNA, 555 bp, Arabidopsis thaliana
actgtcctacgatgtggtcacactatgcatctagaatgcacgaaagatatggggctacataaccgatacacatgccctgtatgctccaaatccatatgtgacatgtctaatctgtggaagaaacttgatgaagaggttgctgcatacccaatgccaaagatgtatgaaaacaagatggtatggattctctgcaatgactgcggctcaaacacgaacgttcggtttcatttgatcgcgcataaatgcagtagctgtggttcctacaatacaagacagacacagagaggctctgatagtcactcttgctcctctggaatgcctcaggttgttggttcaaccggttaatttttaaccagagctggttttggtgtctgaatttcccatgaggagattatttgtactttctataagtttggtatcagtcaatgcctttggttgttaacaattatatcatcacagattcaaaagctgctttgagccaatccaacttgcaagtctagaccattatagcccaaaacaaccatatcttgaaataaattatatatattaatgttt

SEQ ID NO: 131503 - DNA, 654 bp, Arabidopsis thaliana
  unsure (1)..(654): unsure at all n locations
acatttttattttttataaaaacccaanacancagtggtgcctgggaatatataatgaaaaagctaaataacatttaagggtaaaaagattataagttttctttttttgacaaacaatatttttttacttcgtcctttgcattaaaagaagagatacaaaaaaaatgatatgattcaaccacaaacctatttgaatgtagcagacaacagcggtgctagagaattgatgtgtattcgaataataggagctagtaatcgccgatatgctcatattggtgacgttattgttgctgtaatcaaagaatcaataccaaatactcctctagaaagatcagaagtgtattacagctggaattgtacgtacttgttaagaactcaaacgtaacaatgggacgataatacgatatgatgacaatgccgcagttgtcattgatcaagaaggaaatccaaaaggaactcgagtttttggggcgatcccacgggaattgagacaattaaactttactaaaatagtttcattagctcctgaggtattataagatctaaatatcgatagcgatagttagtatcggattaaaaaaacaggtactgaaataaaattaattaatcgattttggatcacggataatcccttaattattaaataattaggat

SEQ ID NO: 131504 - DNA, 511 bp, Arabidopsis thaliana
  unsure (1)..(511): unsure at all n locations
aacaaggaaaccgccgtcgccggatttgattgtgcatatccatgaagtagaagacgggggggcttactttctgatcttagaacggagtatatgtacagaagattcgcgtccctcaatttttgatctcaagggtcgggtttacctttttttccttcttatttttggtggctttgcgttttctcattcgacgatttctggatttggggatttcaaaaccatgaggaagaagctcgatactcggttcccagctgctcgtattaaaaagattatgcaagctgatgaggatgttggcaagatagctgtggcagtgcctgtcttagtctcaaaatcttttggagttgttcttgcaaagcccttttgttgatccgaccatattgaaattacccccttgaaaagaggnngccaangnctntanagcctcattgcaccctaaaaanatttttttgggaaggtnttaccgnggtttaatttttttngggnaagntttttggaaaggncccctncttttggc

SEQ ID NO: 131505 - DNA, 504 bp, Arabidopsis thaliana
cgtataggtggggccgcgattttgctttctaaccggtctatggcccgtaaacgcgcaaaatacgagcttgtccactccgtgcgggcccataccggagcagaggaccccgcctatgaatgtgcaactcaggaagaggatgaagatggcatagttggggtttccttgtcaaagaatctaccaatggtagcctgcaagaaccctaaagatcaatatcgcaactttgggtccgcttgttcttcccataagcgagaagtttcacttctttgtgaggttcgctaaaaagaagtttctcaaccccaagctaaagcattacattccggatttcaagctcgcattcgcgcattttctgtatccatgcgggtgggtagagcgcttaattgatgagatggagaagaatcttcatataactccactagacgttgaggcttcaagaatgacattacacaagttttaagtgtaatagttcaatttgggtggctctttgtaacgtcaaaccttttacta

SEQ ID NO: 131506 - DNA, 781 bp, Arabidopsis thaliana
aggatccggacaagaaaccatcagtgaatgttattcagggtcctaaacctgggaagccaactgatctagggagaatgaggcagatattcttgaagctcaagacaaatcccccacctcacatgatgccgcctcctcctccagccaaagatgccaaagatgggaaggatgcgaaagatggcaaagatgcaaaagctgggaaagatgggaaggatgcaaaaggagggaaagacgctaaggacttaaaagatgggaaacctgcagatccaaaggtgacagaggaaaaacgtccttcacctgccaaagacgcaagtgttgaaacagcgaaacctgatgctgctgcctcgggagagggagagaaacctgtagctgtgactgaggccgagggaaccaaggcggagtgaagggtctttagtattactgttgggggattatttgatattgatgaagtcccaatagctgcgggcgaaaataagaagaggtaagttatgtgcacatagaagctcttatgggcgctgtctgtgagcacaacatttcctcttctggggagagaattttagtccttttgtttttggttattattttttattaccattatatttgttctgcaaaatttggttattgtcttggatgatgttcaccttaaatcattttggttccacgtattttacatttataagacttgagagaagtaaaggtttgttggatgaatcatttgattgtattgtgtgatgtgggcatgaggtagttgaggattgtcatggcatgtgaacgatccttcttt

SEQ ID NO: 131507 - DNA, 850 bp, Arabidopsis thaliana
  unsure (1)..(850): unsure at all n locations
ctggagctcctttctcttctactcagtatacaccaggtggattattgtttaaaatggcagacgccaacatgcaatacgtgacgtcaacatcgttcttgctcttaatctatgccaaatacttaacctccgccaaaaccgtcgtccattgcggtggctccgtctacactcccggtcgtcttcgctccatcgccaaaagacaggtggattatctacttggagacaacccattaagaatgtcttacatggttggttacgggtccaaaattcccacggagaatccaccaccgtggctcctcattaccttgtgttgcaagccacccggccaagatccaatgccaccaaggatttgcaatcatgaactctcaatctccaaaccctaacttccttgttggtgcagtcgttggtggtccggaccagcatgatcgcttcccagacgaacggtctgattacgagcagtccgagccggctacttacatcaattcaccactcgttggagctcttgcctacttcgcccacgcctatggtcaactctagtttagtaacgagtgtgttagtttaagtaaaaataaaaatgaaggaagttttatctttgtttttacttttatttgttagtaatgtagtggaccgaaaatcggatcacaagtggacattggtccgagggatggtttatttggttcgttataatataacgtcaagtgtaatcttattgtggttattaatgttatcatcctattaattactatatccatgtcgttaaaaaaaaaaaaaaaaaaaagnnnnnnnnnnnnnnnnnnnnnnnnnnnnnnnnnnnnnnnnnnnnnnnnnnnnnnnnnnnnnnnnnnnnnnnnnn

SEQ ID NO: 131508 - DNA, 655 bp, Arabidopsis thaliana
  unsure (1)..(655): unsure at all n locations
ggcgtccgcgattctccacgaagcgttacactttcnctttatttgtactatgagctcagcaaacgtgctggcggtgcttaagaactcgcgaacgcaagagtagcagcagcggtttcaagaatcgaggaagctaaagaaacagaaatgagaagcttggagaagttggaagaagtaaacagagacatggatgcgagaaagaaggcattaaaagaagcaactgaaaaggctgagaaggccaaagaagggaagttgggggtggagcaggagctgaggaaatggagggcagaacatgaacaaaagagaaaggctggtgatggagtcaacactgagaaaaacctaaaagaaagctttgaaggaggaaagatggagcaatcacctgaagctgttgtttatgcctccagcccaagtgagtcatatggaacagaagaaaactctgaaaccaatctatccccacagaccaagtctcgaaagaaaaagaagaagctttctttcccccggttttttatgttcttgtcaaagaagaagtcacataataattgagttcagtttcaattcaaacgcctaattctcttttgatctattggagctttgtattcagaaagaactccatttgaacaagtattgtggtgtaaatggttttttcatttcttttcaa

SEQ ID NO: 131509 - DNA, 871 bp, Arabidopsis thaliana
  unsure (1)..(871): unsure at all n locations
cagggatcaagctgtggccatcaaatgttctattcaggtgcagttgctggaggcagggaggctttgatttctggggtaccctctttgtcaatatcgttgaattggaagaaaaatgaaagccaagaaagtcactttaaggatgctgttggtgtctgcttacctttgataaacgcaactatcagagacattgcgaaaggagttttccctaaagactgctctctcaacatagaaattccaacatcaccctcatcaaacaagggtttcaaggtaacaaagcaaagcatgtggaggcagtatcctagttggcaagctgtttcagctaatcgtcaccctggtgctgggaatttcatgtccaaccaacaaagtttaggggctcagcttgcccagcttggcagggatgcttcagcggctggggcggctcgtcgttttaccactcagaagaagagtattgtagaaattgaatcagttggtgttgctggtaaaactgatacccgtgttaagaaattctttcgtctagagtttcttgctaaagaacaagaacacacagatgaagatttggatgtcaaggctctagaagatggtttcgtttccgtgactccattttctctccttccaaaaacggattcagaaactcaagccgcagcatcagaatggatctccaaagcccttaactctgaccaatggaaaagggcatactcggtaaattattgttccatggtttggcccaaaactctcccacaatctggtttcctgggtttnaaatttttttgnccttgggggtttttnnaanttanccctttggtntttattttttnncccccccaaagcttgggngccctttngggntttttannagggttaccctnaatgc

SEQ ID NO: 131510 - DNA, 556 bp, Arabidopsis thaliana
  unsure (1)..(556): unsure at all n locations
cacgcgttcgactactttatgctgacaatgaacaccgggtatgcaccttgcttcagtctacaatggtaggaggatgcgttgcagctatgcctatccttaaaatgatcccaacatcagtcctttggggctattttgccttcatggccatcgaaagcttacccggaaaccaattctgggaaagaatcttacttctgttcaccgccccaagtcgccgcttcaaggttcttgaagattaccacgcgacattcgtggaaaccgttccattcaagacgattgcaatgtttactcttttccaaacgacttatctcttgatctgctttggtctcacatggataccaatcgcaggagtcatgttccctttaatgatcatgttcttaatccccgtacgacaatatctcctccctagattcttcaaaggagctcatcttcaggacttagatgcagcagagtatgaagaagctccagctttacccntcaatctngcagcggaaacggagattggttccacaacatcgtatccgggngatttggngattnttnatgaggttatggcccg

SEQ ID NO: 131511 - DNA, 554 bp, Arabidopsis thaliana
  unsure (1)..(554): unsure at all n locations
ccacctcccaactatggaggagcaccaccagcaaacaacatgggaggagcaccaccaccaaactatggaggaggaccaccacctcaatatggagcagtaccaccacctcaatacggaggagcacccccacagatcgacaactaccagcagcagggtagtggaatgcagcagccacagttccagaacaactacccacctaaccgggatggcagtggcaacccctaccagggttaaagcagttgaagcagtcgtgggtttcctttttaatcatgcattctgggctgtgtatagataatttgaggaagagagagtgcagtagcaagactttaaaactccttttatctcgagtgtttatcagtctgggattatgtgagagagaatagcctaagttactgtggcatggttagaacttttcactcttgcgtttctttttagtagtttatatcctaaatcgatctcaagttcttccttgtgatgcttgctactcttatgtccactcctggttctgcattaaacgggatttagtaacatgtctccctaannaaaaaaattat

SEQ ID NO: 131512 - DNA, 851 bp, Arabidopsis thaliana
  unsure (1)..(851): unsure at all n locations
ttttttggggtcttccttttttccatccgaaatattgggtccaaatatacttttaaaacctttctttcttcaatccccttttgaataaaaaaagagaaacctttaaaccccacaggtggccctgtgctcttgggccctttggaaatgaaacaatattcgatcctcaatgcctggaaacgcaagaaagtgcaccgatcaataccattactggcagaacctgaatgaagacagaactctctggaaattgggaactctacctccgggattgatcacattctattcaaagacgaaatcattggacaaatcatggcatgtacttgggttaggctataacccgggagtgagcatggacgaaatcagaaatgcaggagtgattcattacaatggaaacatgaaaccgtggctagacattgcgatgaaccaatacaagtctctctggactaaatatgttgataacgaaatggagtttgtgcagatgtgcaattttggtctctaaagagagaacgatgaaaacaaacaaaccggaaagaggaaaaaatagggagaagaggtaacctcggatcgatgtgtttctgtctttctcggcattctttaactgatgatacgtttatctttatatagggttacaaaaaaaaagaagcattttgcttgttatttctgtcatagttttggtctttatttttattttgtaaactcttcacagcaatatgttctcccaagctacaatgtcttgttgtctttatttcaaaaaaaaaaaaaaagagaatcaaaaaaaaaaaaaaagnnnnnnnnnnnnnnnnnnnnnnnnnnnnnnnnnnnnnnnnnnnnnnnnnnnnnnnnnnnnnnnnnnn

SEQ ID NO: 131513 - DNA, 468 bp, Arabidopsis thaliana
ggggggggccaccccaagggccgggggcttggtagtgattgatctaagggggcaagtgcaaggaaccggacaagtattcgtggatacatttggacccaaggacaggaagaagatgaagccattggcacttgtggtgggttcaaacccatatagcaaaggattatgtgaaggcatagattatgtacttaaggtccatgaaggctggaggtaaacgcagagtgattgttccaccatcgttaggatttggtgtagacggtgctgaattggaatcgggtttgcagattcctcctaatgcttcgttgggatatatagttgagattgatagagtctcaattgcaccacctttgagttgttgttacggacagctttggtttcattcccaaatccttcaaatatttggttgtataagtatgagtggaaaacaaagtgtaaatttttgtttcttttggggtcgatgtgattgaaccg

SEQ ID NO: 131514 - DNA, 793 bp, Arabidopsis thaliana
  unsure (1)..(793): unsure at all n locations
caacaagtggtcagattctactagatggggttcctttgaaagagttggatgtcaagtggcttaggcaaagaatcggatacgtggggcaggaaccaaagctcttccgcacagacatcagttcgaacatcaagtacggatgtgatcgtaatatatcgcaagaagatataatatcggctgcaaagcaagcctatgcacatgactttatcacagcacttcngaatggttacaacacaattgttgatgatgatctactcagtggagggcagaaacaacggattgccattgctcgtgccatccttagagatcctagaatcctcatcctcgatgaagccacaagtgcactcgatgcagagagcgaacacaatgttaagggcgtacttcgttctatcggaaacgactcagcaacaaagagaagcgtcatagtgatagcacacagactttctacaattcaagctgcggatagaatagtggctatggacagtggacgagtcgtcgagatgggcagtcacaaagaacttttgagcaaagatggcttatacgcgagattgacgaagagacaaaacgatgccgtcttatgattgatcctacacatgctaaactgttcatgaaatagtcatgattatgtttttgaatggtcatgacgatatgtaatggcaaaattatgtaaagtgtaaccatagagaattcttattatttcacacaaaaaaaaaaaacaaaagggcggccgctctagaggatccaagcttacgtacgcgtgcaggcgacgtcataagatcttctatagttgacctaa

SEQ ID NO: 131515 - DNA, 464 bp, Arabidopsis thaliana
  unsure (1)..(464): unsure at all n locations
gtcgaggtttctctctctctgaaaaagtgcttttgctgcgtttccatgctctcggaaggaacttggctgaatcgttggagaattatcgatctggcgtcgttggtgcatctctagctgcgccaattcatcggatccggtttgatttctccctttcgcgaatctagccttccgtgatcttagcagccatgttctatggcacagctgtatgggacccttggcttatcgttggccagattatttgcctccaatgctcttactatctcactcttggactcttcaccatggtctttcttggccttcgggttcctcgccttagtcttgtctacttcttcgattacgctactctcactacttccaccttcaccggttggtctgttattgcctaattcccttttctctttcactcgctggggcgcttgtgtacatggaatttttttgggtggaggggggcancggaaantttt

SEQ ID NO: 131516 - DNA, 450 bp, Arabidopsis thaliana
aataccggggcggacccacgcgtccgaaacaaaaagggtttggcaaaagcttcctttattggggctgttttggctccggaccatgggggcttttccagcaaaggcaaagggccctgttggcccgccgtcaaccaaactaagccgggcaggtttccttgagggtttttaattgggcccggttcctggggattaccaggtcgagggggcgattaaggaaactggtcggggcccagccttatgggccatttactgtggaagatttccaggggggggcattaccgataccggcgatggggccgtggattttttccatcgttttagggaggatttccacctaatgaagattttaaccccagccccctttagatggtttatggcatggccaagaatttttcttaatggaagaaaggagaagggagtgagtcaagctggggggcaattttaccacga

SEQ ID NO: 131517 - DNA, 493 bp, Arabidopsis thaliana
accagaaaatgggccatgctcggagccctaggttgggttttccctgagctatgggttaggaccggggggaagttcggagaaccggttgggttaagggccggttaacagatcttaagcgccgggggatgggactactgggccaacccgggctgggtccaccctaaaagcattttacccatttgggctactaaggttatcctaatgggagctgtggagggctccaaagtccccggagatggcccattgggagaagcaaaggactggttttacccagggggcagcttcaaccaatggggcctggttactgaccccgaggttttcgcggagttgaaggtgaaggacctcaaaaccggaaggtgggctatgtcctttatgttgggattcttcgtccaggccattgtaaccggaaagggaccgttgaagaaccttgcggaccacttggttgatccagtcaccaccaatgcatgggccttggttaccaacttggtccccg

SEQ ID NO: 131518 - DNA, 561 bp, Arabidopsis thaliana
  unsure (1)..(561): unsure at all n locations
acccacgcgtccgcgtgtgcacaacgcatccttgattgctcaaccagcacttgttcagaacgagaagaagcttggggaaaagatcaacattctctgccttatcgagatcatcttcagccgacccgctgaagatagaaccattcctttgagcatcatcgctgagcgtactaaactttccattgaagatgttgagcaccttctcatgaagagcctttctgtgcatttgatcgagggcatcatagaccaagtgaacggaacaatttatgtctcatgggcgcaaccgagagtactagggattccacagatcaaggctttgagggatcaattagacagttgggttgacaaagttcacaccactttactatctgttgaagccgagacaccagatcttgttgcagcataagagaaaagaaaaccttcttcctccttttggagctactgaatgtaaaacaccatcttctctgggattagattcaagtttttaatttcagtcgtagaagaaattacaattgcttttnaatcttttgacttccatttcaagatgtccgaaatttcagttct

SEQ ID NO: 131519 - DNA, 359 bp, Arabidopsis thaliana
cggccccgtggccaaaaaaataatgttgaaccgtccgagggccatttttttgggccgcccatcgccgttaaggagggggcttaaacctcggcccgccggccgacgtggttttccggttggtccaaaagggggtggtctttcggaaggtggttcaccaggctttttgcgaaaaaggagatccgtttcctgtgggtgggcctcgatcctgctggtaggacgcctttcctttccaggctcaaactgggggggaccgtccccactattccacccatggggtccaccgttgggactgtggaatccaaaaccatcagcttaaccgggtggaatgtggggggtcaagacaggatccgtccattggg

SEQ ID NO: 131520 - DNA, 426 bp, Arabidopsis thaliana
  unsure (1)..(426): unsure at all n locations
cccctttggggaaagctggtaccncctgcaggtccccggtccgggattccccggtcgnccccacgcgtccggtccgaaagacgccttcgaaagaataaaataataaatgtctttgacatccaattataccactgaaattttttttcatttttgaatggcagttccaaaaaaacgtacttctatctcgaaaaagcgtattcgtaaaaaaatttggaaaaggaagggatattggacatcgttgaaagctttttcattagggaaatcactttctacaggtaattcaaaaagtttttttgtacagcaaaataaataaaaaacactataataattagaattagcctaacttaaaaaccaatttgtttaaatacatctaaaaaaaataggaagcaaaagaagaaaaaaagacaatatatagataanatatat

SEQ ID NO: 131521 - DNA, 454 bp, Arabidopsis thaliana
ccacgcgtccgctcttcagctaaaactttgatcatccatacagtggaaatggagaaggtgcaacaaatgacggacaacaaaggaatcatgaaggttgaaattcatagccatttcaattctgcggtggaagtgggttcccgtgggctatctcgtcagacaagcatgaccaagaccaactgcctttgctcaccaaccactcaccctggttctttccggtgtaggattcaccgttctctttcgttgcaacgtaccaagagtatcgaggctgcatctctattggattctccaccaaagccagcggattcccctagtaccgctacatagattcatgcatgaatccatgacattaccaatgtttgttgtaacttgtaatttgatcattatatggaggagtaggcctttatttttccaacaatacgcatgaatttacgcgttaatcaatggcattacaatt

SEQ ID NO: 131522 - DNA, 806 bp, Arabidopsis thaliana
gcagtaccgcgtccggaattcccgggtgcgacccacgcgtccgcgtgactactttcaagcgaccttcctcttctccaagtcccatcttcgtctccgtcatcttcacggcgcatcctccaaaaacgcttagcttctctctctgttacgtttactcaagtcttttttagtctcctccttaactctcaagccttttccaagtttcaagcggctccaacggttcaattgcgcactttccgatttcgtggcttcactttccgatctgttctagagaacttcaatatatatccatatatggtttcattggtctgtgagccatatcctaaggacctaaaactagctagctctcttactatggagggagaggaaacttgaaccttcagcgtaccccttccttttcaacaaaggacggttgcaagaaggcaagcagggggctctgtgcgtagaaacaagagttataacttcactgattatgactctaaggcacgtcaatggccttctggtccagttcttgttccatatatgacgggtctagatgatgaggttactgaacctgcctctgttcctttcacttgggaacaagctcctggaagattaaagggcactgatttcaaaccccaaagtttgtgttttgatgaaagaagaacaaccagtttttacaccatgtcttccaccgggtaaagccgcggatgcaaaccatgacaagattgcagagttcaaagggtaaacaagctgaaaaatcacatgatgatgaacattatgggttttttgaaggctcttgacactctctttttcaaaggactcgtttc

SEQ ID NO: 131523 - DNA, 459 bp, Arabidopsis thaliana
  unsure (1)..(459): unsure at all n locations
cggnccggaaatcccggggcggccccacccttccgttcttaaatcctttcctttcaatggtggttaaccaaggattccgattttggccacttaagttttccaccattcttctttggcgggccaaccggttttaaggccctccagggccctattccaaaggggggccgtttgggccgggggccgggtgaccttccttcgtcccgccaggtttactccccaaggcttttggtttggcccagcccgtcccaggtcctggggccctttttgggggaccacacgcgtcttaccttaactggggattcccccggggcctccggttgggccaccgttggcttttgggttgccccggagccattcgttaggacccgggggctggaagtattccacagcagatggcttatgtggggggctttcggatgcccattccttgaaatcttttccaggaccggtgttaaattc

SEQ ID NO: 131524 - DNA, 435 bp, Arabidopsis thaliana
  unsure (1)..(435): unsure at all n locations
ccggncgggatttccgggtcggccccacccgtccggggggtcctcggagtaaagcggtgggggccttgaccttcctcctaactagttctacaactatggcttcggtaatctttccaccttggcttaggggccttttaatgggaccagtagttccggtggttgcagtggccatgtcaaagcctttacttaagggggtcctggttccaataactctgggcctggggttaaatccttttgcaaagcctggggccactctttttaaaccggggatgccgttggtggctttggtttgcacttcgtggggcatgggaggcccactttcgattaatcgcagccagatcctgccagctgaaggtctgggttggatggttccaatggttccattccatgccgtaccattggccttaggatttgggtcctttaagatcccaggct

SEQ ID NO: 131525 - DNA, 430 bp, Arabidopsis thaliana
cctccctctaaaattccccggcgactcagttctccggaaatcgtagaataaatcagattcttgctctttagtatgaaacaatgaatttgatctcaagaacattgacaagagcagtgtcttcgtcactataccactcaaaagcagcgaagctccccactcaaaaatggataatctcgcagcaaatccgtgttttctccgccacagtcatcagcggtggaggaaagaaacctctggcaaaagtatctgtgaaaccaccgctaaatgtagcgacggagaaagaatcgactccgccaaagaaaattgagtacaaaccggaaatttcaaactggttcaacctaatcggattcgttgaacaaccagttcaattcggtccttgttccgatggaaaattctgggctggaacagttatttctcagcggtctggttcaaa

SEQ ID NO: 131526 - DNA, 832 bp, Arabidopsis thaliana
  unsure (1)..(832): unsure at all n locations
cggtccgacccaggcgtccgagtcagactactgtccctgagtttggcaccttttcaaaaagtcagcatcaaggacagactggttctaaaagcaaaagagtgggggttgaaagatatgtaccgaagcctatagtaaaggaaatggctgagcaaatcgtcagtaaaaatctagtaacctctgctccagatatgtcggagaatgtaaaccagaaagaaaatcgtggaggtgagggtacaggaattctccaaccttctggttcaactgcagggaaatctgggtctccttcaaagtcaagacatgggaatggtaggcagggaaagcatggtagagaacatgcatcatggcaccagagaggttctggagcacctactaaagctttggaggatggacaatttgtaacctcaaatcagcccatccgaggaacagtgaactatcactctagtaagcaaaccgaacaaattgctgccaaggntcaaaccacatgtaataaggatggatggaacgatggctggtatatgactcctgaaacgcattactctgctgccgaagaaatggaatccagtgctgttggaaaagatcaaggaatgagcatgcacgggcaggcagcatgctttcaaggaggcaacaaggatgggaggaagcaacttttggtgaccctaaaaaaggcatnagnggggttttcaataaaggctcatncggggcactnttggccatgggnttngccaaccnggtttnccttgtggttnaaaagaaggtngttncctggggtcantttttgnantcanttntggccagtagtttgtggcngtgaantcaagggcaacctttnttc

SEQ ID NO: 131527 - DNA, 506 bp, Arabidopsis thaliana
ataccgcgataaccgacggagaagcatcgaggataacgacgacgatgacgatgataacgaagacggtggcgattggttaccgccgcatgagtttctggcgaagacgagaatggcttcgttctcggttcatgaaggagtagggaggacattgaaaggaagagatctgagtagggttcgaaatgcaatttttgaaaaatttgggttccaagattaaatatttggaaacttttggagttttcctttaatttttggcttacttcaatcattttctcaagtaactgtcagagaagagagagagcatgtaatatttctagaaatgccctccatttatcgttatattccgaaaatcttaccctatgtaattgtttttttaacttttgagatttttatcacattttgcgtaatgagtaatagataatgttttctttaaaaaaaaaaaaaaaaagggcggccgctctagaggatccaagcttacgtacgcgtgcgttcgacgtcatagtcttcta

SEQ ID NO: 131528 - DNA, 679 bp, Arabidopsis thaliana
cataactctcccgagccaacccaacttgcctttccttgactctgcaaccgctggaagctctgcttcctttttcagggaggcgagggattcatctctgtttaggaattggctaaggaatttggaatcagagagtggaattttagctgatggttcaatgacattaaaccaagttcttatccagggagttgatatgtttggcaaaagaattggatttctcaaatccaaagcggatattttcgacaaggaaactggtcaaaaggttgttccaggtattgtatttgcacgaggaccagctgtagctgtgcttattctcttggagccagatggtgagacttatgcggttctcactgaacaggtatctctatttatgttcgtgttgttctattttttaacaaagatcaacattatacgggttgttttggaaggttcgggttcctactgggaagattgttctggaattacctgctggaatgttggatgatgataaaggtgactttgttgttactgcagttcgcgaggtcgaagaggagattggtataaacactgaaaaaagaagatatggttgatctcactgctatccttgacccatctactggttaccggatcttcccttttcctggaggctgtgcttgaaacgatatccgtgtttttttaccgaggtctagttaagaaaggaaac

SEQ ID NO: 131529 - DNA, 434 bp, Arabidopsis thaliana
  unsure (1)..(434): unsure at all n locations
gggccgacccacgcttccggaatggagattactttggatcagttttcttttttggtggaaacacancaagagcggatgcggcaagttcaagaagcgggggggcccaaacaaagagccaatttgcatttgatgattcagtccccagcactccactctcaagatccgggaactctccacctcggttcagcgatgcatcagcttgagataataactttgatagcttctccaggttcgactccttcaacaccagttgaagcaggcgccgggttttcttcgcagcccgagagactgtctcggtttgattccatcaacagctccaaagactttggtggagctgccttctctaggttcgatccaattaacagttccagagacgccactgggagcttgagaaatttttcggaggttttgattccatcaacagtaggcaaaga

SEQ ID NO: 131530 - DNA, 349 bp, Arabidopsis thaliana
gaacctttaaaccgggggggggggaaggaatgggcgccttcgggaccgtccgggccggaggttccgttgaagggttcggcggggaaccattccaggggctggaggggcgggacccatgttttcgttgcccccattggccaccacatccaaaaggccgtggttaacgaaggcgaccttgattttaacgggtttttcaggggtggggcctccccttttgttggaaggagggggtggttcaaggggaagggggggttggttgttgggattaaacctttgccgaaaggaggactggttggtaacgtgatggagcttttaaaagttttggatttcatttacgaatttattccca

SEQ ID NO: 131531 - DNA, 238 bp, Arabidopsis thaliana
ttacaaaaaactctggaatttttcaggaccaaaggatttggccttctttaagggcggccatgacctcgggggttttaactggcagctccccaatggcgggttctggctcggtggagcttacccagaaggtgggttgggggaatccatcagtggggttgggccagaaaaaccagaggattttgccggggaccaaggctaaccgcgttgtgggggaggatgttgatggaccttcgggagg

SEQ ID NO: 131532 - DNA, 698 bp, Arabidopsis thaliana
  unsure (1)..(698): unsure at all n locations
aggaagttgttctgaggctaatgtagagaagaagcctgcagaggaaaggactgagancaagggcagcgtgacaccgaaagctaacggagaacagaatgtaaccctgggtgagcctaaccttgatgcagatgctgaagcagataagggaaaagaatccaaagaatatgatgagaagacgacagaagctgaggcgaataaggaaaatgacactcaagaatctgatgagaagaagacagaagctgcagcaaataaggagaacgaaacccaagagtctgatgtcaagaagaccgaagctgcagtagcagaggagaagagtaacgacatgaaggcagaagacacaaacagaagcttggaggcgaatcaagttcaacagcagcagggagctgcagcttccgtgagctgttaaaacctatatcgttctgtacagagcacagagcgtgaagagtttgttgtgatttcaggtgtagcattaacattatgagtggttgttgtatgtgttggtagaactaatgtctctctatgttgtagttcagtccattatcatttgacgtttgtatctttgtacctttgtactttgttgtattattaatattaggcatttagactaaaaaaaaaaaaaaagnnnnnnnnnnnnnnnnnnnnnnnnnnnnnnnnnnnnnnnnnnnnnnnnnnnnnnnnnnnnnnnnnnnnnnnnnnnn

SEQ ID NO: 131533 - DNA, 577 bp, Arabidopsis thaliana
gaccgtccgaccattctcctttgggtccacagccgagaccgaaggagcgaaaagaagatgaacgtagttcacggtttgaagaggattcctcgcatcaaattccctcagagacatattaatccttcagcttcagagggaaagagtcaggtggcaaatgaagctgatacattgttcttctccaatttgaacaacatccaaaagactactggcgggaaggcatcatcgcagccaaagcgcacgccagtttcaaacgaagaaatggaagccattttgttgggaggctgcatctgatcatttcaacatgatctgttgacaagaatggtggatcacttctcatctttaccatttacagaatatactcgatagtcaagaagaaactgatatggttgatgtttacaacacccaatgataacaataaaactactccattgcagtttttaacttctatactgattcatcattgattgagtgcatttgaatctctaaaaaaaaaaaaaaaaaaaacacctcctaaaaattaaaaaaaaaaaaaaatataaattaaaatataaataaattaaatataaattatataata

SEQ ID NO: 131534 - DNA, 561 bp, Arabidopsis thaliana
catatactagcactccctgcaccagatggaaccgttcagaaagtgaaccaagacccgttcgctgcttccctgaccattccgcctccttcctatgtgcaaatggctgagatggacaaaaagcaatatctattgactcaagagcagcaattatggcagcaatatcagcaagaaggaatgagaggtcaagctagtttggctaagatgaatacagcccaaaccgcaatgccttatggtatgccgccggttaacgggatgggaccgtcgccgatgggttattactacaacaacccttactgattttattcatttggttggcttttttcttacatatattttccggacccaatggagatagtggtataatgcgggttttcttggatttggtcctgatcctgcgtcccattattggacctgtgagacctttgccttttttgaagtattgaggaataaggagttaatccaaaaaaaaaaaaaaaggcggccggtttaaaagaatccaggctaacgtaggggtgcatgcgacgtcatagctttctataagtgtcaccataaaatcaaatc

SEQ ID NO: 131535 - DNA, 568 bp, Arabidopsis thaliana
gttcgtgggattcacaaggttgagttgccattgtacctgaaagcaatattctttgtctttgttcgagactccgagagattgcgttccggttcgtgggattcacaaggttgagttgccattgtaccgagtagatcaaaatctttgggagaaacatcatttagcaagagttttaaagaattgttgtataccataccagaaagaaaggaagatagatgttctcatcaatcaattcttgaagatacttcaactgttttggtctcaaatcttaggcatgattcaaaatcaaattgcttcattctttccctccccattccagttttgcttctgtaattcgttctcagattaggccggggactgaaccgaggagagaatctgtggttttgaaaagatgctaaagggatggcccagattttgttgaagtgatgataactgtgaggtgatgaatgttttgtgttgtattcttgtgtcatgtctaaaacagatataataaatcctatatttagccaaataagtgttatagaaaattggcaatttgcaatcaaaaaaaaaaaaaaaaaagggcggccgc

SEQ ID NO: 131536 - DNA, 623 bp, Arabidopsis thaliana
  unsure (1)..(623): unsure at all n locations
actacccgaattttccaaacnntatggcccnggttgggctttgcttggaatccggncctaaactggctngcctcgggncaggttccagggggnccagccaattccgttggnccgggancacccccattggnttttngaccngccctcaacccaagattgacccagatgagatcatagcccgtgcaaaacaggtttctccaggaccagcgtcgggtcaagatgaacaggaaacttcagcagctaaaaggaacaaagaagaagcggctacaagctacgaaagtgagcgttgaaggtcggggtatgatcaagtacctctagagaggttacaaccagaccataccatccatccacattgaaattggttccttctatcgtgttaatcttccaactttgcttggatcagtgtttaaaggtctttcaggtgaagtcgaagacttaaaggcattggggttatacgtatatgtactcttctatatatgctttgctttgagcctctaatgtaatgggaagtgaaaacactttgttcgtcacttctttcttcagagcataaaatattatgataatcaattttcagtgagttttcaataaacactttgccctttttttttttttttttgaaagag

SEQ ID NO: 131537 - DNA, 527 bp, Arabidopsis thaliana
  unsure (1)..(527): unsure at all n locations
ctctctaaaaatggctcaacaacactcttttctcctcttatgcttctccctctcaatctcttatttactatcttccgcccaaaccgaagccacctcaatcgagagattagtgccaagagacctctacaacaaaattttcatccacaaggacaataccgcttgtcccgcaaatggtttctacacttacgaatcatttgtccaagcgacgaggcggtttccgagattcgggagcgtaggaagccccgtgacacaacgactcgaagtggctgcatttttggctcagatttcacacgagacgaccggaggatgggcaacggcaccagacggaccgtacgcttgggggattatggctttaaagaagaagtgagtccacaaagcacttattgtgattcttcttgatacacagtggccttgtttccctaacaaggcttttttatggaaggggggccaatttaacctttcgncggncttcaattanggcccggccggttgaggccttagggttgacgggntaaggnatccngaaa

SEQ ID NO: 131538 - DNA, 554 bp, Arabidopsis thaliana
  unsure (1)..(554): unsure at all n locations
cngnccaaangccttttttacccgnggaggttaataagaagccccctactttggagggggatgcagtactcttaacgcatcctgccgttctcagggtgttgcattcggtgtccctgatgagaaatatggggaagagattaactgtgcggtgattccaagagaaggaactactgtaaccgaagaggacattaaagcgttttgtaagaagaatttggcagctttcaaggtgccaaagagagtgttcatcactgataacctccccaaaactgcctctggtaagattcagcgccgtatcgtcgcacaacatttccttgagaagccctgaaacacacagaaaacaccatcttgctcgaaaatcatcggtgatgagtcctagttttcacttttcacgcaaatggatatgcgttctctattattggttcttggtttaaaagttactttttatatgtttcatggtggtaaaggttatagattaaatcacaaaagtggaaataaaagtcgataagtgattattaaaaaaactttgttttctttttatcttttttttcttttta

SEQ ID NO: 131539 - DNA, 674 bp, Arabidopsis thaliana
  unsure (1)..(674): unsure at all n locations
tgaaattgtntttcagaacaatgagaagtcattgcagtcttggcatcttgatggatatgacttctgggtcgttggatttggttctggacaatggacacctgcaaaaagatcacttcacaatcttgttgatgctctgaccagacacacaactcaggtctacccagagtcttggacaacnnncttagtgtctttagacaatcaagggatgtggaatatgagatcagcgatatgggaaagacaatattcaggacaacagttttatctcaaagtatggaattcagtccagagtcttgccaatgaatacaatcctcctgacaatcttcaactctgtggcaaagctgttggacgacatgtttagagaaaatcctcttacagtttcctctgttctttcttaaaagtgatttactttaaggctttttcgattcaattcggttgaggttttgcgtttgttcgttatggtcatgaagagtatggctgatggcttccttgtagtaaacaaagggaagaggaaagttatatgtgtcattggtggtaggctagcttggagttttataataatcttcctatatccaattaaaaaaaaaaaaaaaaaaaaagggcggccgctctagaggatccaagcttacgtacgcgtnnnnnnnnnnnnnnnnnnnnnnnnnnnnnnnnnnnnnnnn

SEQ ID NO: 131540 - DNA, 667 bp, Arabidopsis thaliana
tgcggtaccggtccggaattcccgggtcgacccacgcgtccgcttttctatttccgtcggactcagtggagaagaagaagaagatccaaatcgatccgttgaaaaggaatttcgaatttgctgtgcgatgtcgagtgcggtggacgctacgggaaacccgatccctacttcggcggttttaacggcgtcagcgaagcatataggtatgaggtgtatgccggagaatgttgcgttcctcaaatgcaagaagaatgatccaaacccagagaagtgtctcgacaaaggtcgtgacgtcactcgctgcgtgcttggcttgctgaaggatcttcaccagaagtgccaaaaggagatggatgattatgttgggtgtatgtattactacacaaacgagtttgatctgtgtaggaaagagcaagaagccttcgagaaagtgtgtcccttgaaatgagaatcacaagttcttgtcatgttttgatttgtacctcataataaagcaaaatgttcatttttgaatgagctttactctctccatctcttgttttgttgtcatcccatttatttcctctcagatgctttcgtagtgagttccaaagacaactaaatgactcagttttattgttcgatggttcactaatcagcacagaatggtacaattgtttttaaaaaa

SEQ ID NO: 131541 - DNA, 527 bp, Arabidopsis thaliana
  unsure (1)..(527): unsure at all n locations
ggggtactgtcnggttaaccagtcatttcatataaccgttgaggcttttaaatggatcgtcggagtttgtacttacttatgaggataaggaaggagattggatgcttgttggtgatgttccatggagaatgttcatcaactcggtgaaaaggctacgtgtgatgaaaacctctgaagctaatggactcgctgcacgaaatcaagaaccaaacgagagacagcgaaagcagccggtttagatctcttttcgacgttacggtgttacaggttttatattttggggttttgcaagtctgagatacttctgaagcaagcataagctagattgatcttatatccagtttgtgtattttcttggttcttataatggtttttactggttttctttagtttttttttttgctgtcttttaattttcggttgcgatttcactatatactatggatggaagagaatgctctttatatcttttactacactgtaaatatttgaagcttatctaatatcgtttttaagggtttttgttg

SEQ ID NO: 131542 - DNA, 379 bp, Arabidopsis thaliana
gggccgccccacccgtccgttccatttcgaacctccaccgaatccttgggggattttcccaagggcgttggcaccatcgaggggttggaatctaatggggccttccaagggctggccttttttttcgccttcgcctttccttagaggcgattggggtttttcccccaaaccctttttaacggggccttttcctttggaaaatctcaaagctccgattccgttgccaatggattcggcccttaggaaaggagctggggcccccaataccggccgggattttcctgggcaccgactcggcgtaaagatctacggtgcccaagtggctaaacctggggctatcattgttcgtcaccgtggccctaagttccatgctgggaaa

SEQ ID NO: 131543 - DNA, 674 bp, Arabidopsis thaliana
tcatcagaggtttgtgaaaacatatggccgagctattcattcagctcaagcttattccatgaatgatgaattttcaagagttctgagtcaacagatggagttttattccaatgatcctaatgcagacaggatgagcagaatcaaaggtgaaatgagtcaggttcgaaatgtgatgattgagaatattgataaagttttggatagaggggagcgtttggagttgctagttgataaaaccgaaaatatgcaaggcaacacttttcgtttcagaaagcaagctcgtcgttacagaaccattatgtggtggagaaatgtcaagcttacaattgctctgatacttgtactagctttggttgtgtacatcgcgatggcctttgtttgccatgggccaagtcttccttcttgtttcaagtaagaagacattctcttatcttcttcacctttcccttcttgggaattatcagactctgcttcgattttggaatgtgagattatatgcgtttgtctaaaatgtgtgtttatgtgatctttcaatttcagcttctgcttattgctttgaattacagagtcgattatttatttgtaagtgtgatatttcactgttaatgatcatcccctgtctgtttgcaatttatgctgcggcgttaaaagttgtataaaatgatgacgttttt

SEQ ID NO: 131544 - DNA, 456 bp, Arabidopsis thaliana
atttgattccatatttgtcacaattcaggctatttctaatgggtttgaagaaatatgggaaaggagattggagaaacatatctcggaactttgtgataacgcgaacgccaacacaagtagctagccacgcccaaaagtacttcatccggcaactttccggcggcaaggacaagagacgagcaagcattcacgacataaccaccgtaaatctcgaagaggaggcttctttggagaccaataagagctccattgttgttggagatcagcgttcaaggctaaccgcgtttccttggaaccaaacggacaacaatggaacacaggcagacgctttcaatataacgattggaaacgctattagtggcgttcattcatacggccaggttatgattggagggtataacaatgcagattcttgctatgacgcccaaaacacaatgtttcaactatagctaatga

SEQ ID NO: 131545 - DNA, 417 bp, Arabidopsis thaliana
caaatcaaaacaagaataacaaaatctttctcttataaattcttatttcaagacatcaaaggagaattaatggaggcaatgaagatgaagatgatggtgtttattatggttgttgcggtggctttctcagctgccacggctgctaccgttgaagctccagctccaagcccaacttctgatgctgccatgtttgtaccagcactgtttgcatctgttgttgctttggcatctggtttcatcttttgatcattctttttttcttcattatttaattgcatttgttaatgagtttgcgtgatttgattctctattgttagaatgttgcattcttatttcttaatgtaaccatctgtttctctatgtatctatgtgtattatcaattcatcactgtttatgaaaaaataaaaaccaactaa

SEQ ID NO: 131546 - DNA, 465 bp, Arabidopsis thaliana
gcgtccggatttaataggcaagaggatccaatatgattgtcctggtgtcttaccaaacaaacgccagcaccgtatggcaggattagctgtgatagagattgctcaaaaagtttccaaagcttggcgcatagagtggaggaattcaaccaaaggcactacaaaaaatggaaagaaaaaccggaggagagagagaaccaacattcttagccagaatagaggtggtgctgggtgtagtagtagcagtttcagtgaaacttcaactggatatgcctcactagaagatagatcatcaggccgctctatcttgtcttggcaagacgtttattcccctgctgtcagatggagacaaatttcagagccttgtgacccagtggtgtgggttaacaaactaagtgaagagtttaattctgggtttggttctcatacaccaatggtactcggtcaagctaaagtagtacgctattt

SEQ ID NO: 131547 - DNA, 461 bp, Arabidopsis thaliana
gggggatctgagggacgtgtggaccgttatgttgaccgggaccgttatgtggaccgcgaacgatacatagatgatcgatacgacggtgctgcacgctatggtgctagagacaggtttgacagcagagaagcctacataccccgtgatcgatacgccagtgacaggtatgcagccccggctgatcggtttgcaggtggtgatagatacagccgtggatcagaccgttatcctccagggagctatgacaaagctcggtcctttgagagagacatagccccgagtgcaggcagtgacaggtacggtggtggtagagctggtggtcccatccgtggaggaggagaggagggaagagggtttagaagcagagccggtgctccttatgagagaccgagcagaagtggtggtgggggagcttactccggcgtcgtccacttttgaccgttattaagacacattaatga

SEQ ID NO: 131548 - DNA, 906 bp, Arabidopsis thaliana
  unsure (1)..(906): unsure at all n locations
agaaatattaccagctgctccggtcaccacagagaccanggtggaagagaaagtcgttccagtagaaaccacaccggctgctccagtcaccacagagaccaaggaagaagagaaagccgctccggtcaccacagagcccaagggggaagagaaagcagctccgggggagaccaagaaagaagagaaggcaaccgcctctactcaggtcaagagggcctcaaaatttattaaagatatatttgtctcagtcaccactagcgagaagaagaaggaagaagagaaaccagcagtagtaacaatcgagaaggctttcgcagctgatcaagaaggaaggaacaaaaaccgtttgaagcagtcgaaggattcaatcgtctccatcactcttccagagacagctgcatacgtagagccagaagaagtctcaatctggggaatcccacttctagaggacgaaagatccgacgtgatcctcctcaaattcctccgtgcacgtgacttcaaggtcaaagaagccttcacgatgctgaaaaacaccgtccaatggcgcaaagagaacaagatcgacgacctagtctcagaagatcttgaaggaagcgagtttgagaagttggtgttcactcacggtgtcgacaaacaaggacatgtcgtgatctatagctcgtacggtgagtttcagaacaaggagattttctcagataaagagaagcttagcaagtttctcaaatggagggtttcagttccaagagaagttgtgtgaggtctctttgacctttagccctcaggctaagtcaatcgttcgtgttcgttaagtgaccttcaggaacgctcctggcctttggtcagagggcattgtggcagttcattaaacgcgccgttaagcaattcgaagataactatccagagttt

SEQ ID NO: 131549 - DNA, 773 bp, Arabidopsis thaliana
cccacgcgtccgaggaagcaagggacttggaatttacaggaacacagctaaagctgtcatgtgtggacttctaccaaagtctccaacatttacagctagtagaacaaacggtggtcttatatgggttagtgaatggaactcgatgcaacaatccgtttcgtcagcgtttttagcctcgcttttcagggattacatgctcacttcccgtatccataaaatatcttgcgacgggaaaatcttcaaagcaacagagcttagagatttcgccaaatcgcaggctgattacatgctggggaagaatccgttgggaacgagcttcgtggtgggttatggagacaaatacccacaatttgtgcatcatagaggagcttcgatcccggcagatgcaacaacgggttgcttagatggattcaaatggtttaactcgacgaaaccaaacccaaacatagcatatggtgcactcgtaggtggacctttcttcaatgagacgttcactgactcacgagagaacccaatgcagaacgagccaaccacttacaacaatgcactcctcgttggtctcttgtctagtcttgtcactacatcttctactttacagtcgttgaagtgagctttgcgtgttttagccttcttattgaaaatcacattgcttcatttttaatttgtaattttttaaaaaaaatcgtgggtgtgtgtgtattcacgttgtgtattgcttgaaatggtggtgcgggggtccaaacaattagtgctctacggatccaaaattgagg

SEQ ID NO: 131550 - DNA, 435 bp, Arabidopsis thaliana
  unsure (1)..(435): unsure at all n locations
aactcgtaccttgtttatgcggcggacattgtcagttattccacgatctctttcagcttctggttcatttcgtaatgacagtactccaaaagcagcacagagaaattctgaagattctggtgttacggttgatggatccccatctgcaaaggaattgacgttcgttgttcctgtattcctcgtttttctattcggcttttggagaggctgagtcaaagtctgtggagacactctcaccgtttcagcagaaagatggtcaaaagggactctttgttgatcgtggtgttggctcccctaggctantgaagtctcttagtgcaagctcttttttgattgataccaagcaaatcaagaattcaatgccagccgctgcaggagctgttgccgcagcagcggtagctgatcaaatgcttggaccgaaagaagatagacatc

SEQ ID NO: 131551 - DNA, 441 bp, Arabidopsis thaliana
  unsure (1)..(441): unsure at all n locations
gttcgagttcgaaacctngtttcccatcncccccggtcttgaancctctgttgtggcccagcccaacgancggtggcaaggatctccgtgtgcgtttgtgaccacttaagngcgattccgagaagcatgacccagaataagttggctcaggatatattgattttctgccgggagaagcttccggcgtatggggtcccaaagtcaggggtgttggggccgttaccaaagacagcaactggaaaaattcagaagcatattctgaggaccaaggccaaagagatgggaccagtaccaagaagcaggttttaggaagtgataaagctttaagaacaacattttgaaaataatgtgttgtatgtttttgcggaactttgcctggtgtgtaaactttcaaatgataaccctatcgttgttttctccaaaacctggggctcatactcg

SEQ ID NO: 131552 - DNA, 479 bp, Arabidopsis thaliana
  unsure (1)..(479): unsure at all n locations
cagncttgctcactctcatggtaaggngtgtncttgccaccnattttgggaacccnctcctggcgtganccgngttgatttagggaatcaaaggagatagctcccacttacagggtgatactacacaatgacaacttcaacaagagggaatatgtggttcaggtgttgatgaaggtaatacccggcatgactgtagacaacgcggttaacattatgcaagaagctcatatcaacggtttggcagttgtgattgtttgtgctcaggctgatgcagagcaacactgtatgcagctgcgcggtaacggccttctcagttctgttgaacctgatggtggaggctgctgaaactaattaaactcagtatagattttcccaccttccaggactctctatttagtcaaaaacatttgttgttttaatgtatataatatcagaaatttggtacaagactgttactatatgcaatgaaccttgcccct

SEQ ID NO: 131553 - DNA, 466 bp, Arabidopsis thaliana
gagtttttgggaactgagaagcatccactcgacaatggagactgcgatttgtgggagattagctctcgcaccatcctctctcttcaattctaaatcaggggacaaacatttagtctcaaaaggaccatgtgtgaatcgtagcattctcatgaccttgtctacatctgctgcattgggtaaaggaggtggtgtcttagacaaaccaattatagagaaaaccactcctggtcgtgaatccgagtttgatttaaggaaatcaaagaagatagctccaccttacagggtgatactacacaatgacaacttcaacaagagggaatatgtggttcaggtgttgatgaaggtattacccggcatgactgttgacaacgcggtttacattatgcaagaagctcatatcaacggttgggcagttgtgattgtttgtgctcaggctgatgcagagcaacactgtatgcagctgcgc

SEQ ID NO: 131554 - DNA, 424 bp, Arabidopsis thaliana
  unsure (1)..(424): unsure at all n locations
tggaaaacccgggccggcccacgcaaccaaaagccgcctttgaaggctatccatttatatctaacgatgaagagtctcaaaaagagaccgtctttcaagaaagttccgtctctatcatccctatcttcaaggagacaccaacctctacattcactttcttctcaagaaggtcttacctctccaattaattaaagattatatctatttgtgtatacactttgtttcttaatttgttttgcacatacgatagtttcaacatttataaatatgtatcattatcagcatctaatgattctatgattcaccattgttattttttgagaataaacatgatactctgtttctttccgttatattgttgccnnnnnnnnnnnnnnnnnnnnnnnnnnnnnnnnnnnnnnnnnnnnnnnnnnnnnnnnnnnnn

SEQ ID NO: 131555 - DNA, 348 bp, Arabidopsis thaliana
ctgatattatcaaaaacttactatctattttataaatcactaatatattaaaagtcaagggtaatcctatatgagggtggagctagataatatttttggaactcagttaaagtttaggtaataattaacatcaaagagttaatgtgcactcatttaatcaaaattaatcaacattaacaaatttaaatataatatatatatatataacttacatatatatttctaccggatttaaattcgagttttaataaaccggtgataatagtgaaaattactaggctacatggtccggtaaaatattaagttaaatacatatttctaatgtcgtatttcaaaaaagatcggttt

SEQ ID NO: 131556 - DNA, 364 bp, Arabidopsis thaliana
  unsure (1)..(364): unsure at all n locations
gttcagttagtctttggtttcttcacacagcatggatattcacaacaccaaacgtgacacgccgcacgggtcaattcaggaggagcgccggggaaaatggcttctccagacgtttcggagctcacaatattcaggtcaatggctccctcgctaagctcactctcgacaaatcctccggagctgggttggtgtcaaagaacaagtatcactatggtttcttcagggcaagactcaagcttcccgctggatttgcctctggggttgnggttgctttctatttatcaaacgcagagacttatccgaaaagccacgacgagatagacatataattgttgggtagaagtaggagagatgattggacgat

SEQ ID NO: 131557 - DNA, 594 bp, Arabidopsis thaliana
ctcacatggagatgataaaagggattcaaggtcacggatactatgatgaacttgttgtcccaatcatagagaacacagtatatgagaatgaactaacagattcacttaccaatgttatagaagcctatccaaaagcaacagcagtgttggtacgcaatcacggagtttacatggggggtgattcttggctccatgctaagacacaggctgaatgttaccattatctgttcgatgctgccattaagcttcatcaactgggtctggatgctgctaccccagaccacgggcctatccggagaaccatacattcacagatcaaggcttcaccatttctctcgtctcgtcgtctctcagaaatctttttagttgagagagctataatggggagaaaggctggaaatttgtacataaacccgaaaaagctcgggaatttggcgaaaccgtgtatgaaggaaatggtatcgttcttgaactgtatggctcttaacaatatcaaagatgataaatgtgagaaacagaagcaactcctgagtgtttgtatgcaaggccagtcggatcataagaacaagtcttggggtaacattaactaccatt

SEQ ID NO: 131558 - DNA, 255 bp, Arabidopsis thaliana
gaattttgatcgcccggcacatattcaggctatggctttttcaccagttattgatggaaagaggtgtatcatagctgaccagaggggatcaggcaagacactggcatatcttgtccctgttattcagcgtctcagggaagaagagcttcaaggacacagcaaatcgtctcctgggtgtcctcgtgtcattggtctggtaccaactgcagagttgtcttctcattttcttgctatcctgtattgcaacatttttag

SEQ ID NO: 131559 - DNA, 787 bp, Arabidopsis thaliana
cgacccacgcgtccgtcttctcgaattcagaaaaaagcccttgtccaatatctctctactcgtacaacaatggcgtcgatggctgcaaccaccaatttcaccaaatctatgctctttcctttctctcatgtttcaggaaatgcgagcttgaattcgcagagaagaacatggccaaagcagtacaagtctaaaaatggttacagggctcttcgagtgaatggattatttggaggtggaaacaaagataataacagtgaagatggacaatcaaaggcaggaatatttggtaatatgcagaatatgtatgagactgtgaagaaagctcaaatggttgttcaagtggaagctgtacgtgttcaaaaagagttagctgccgcagaatttgatggttattgtgcaggcgagcttgtcaaggttacgttatcaggtaaccagcaaccaatccgtaccgatattaccgaggcagcaatggaactaggttccgaaaaactatcacaacttgtcacagaagcatacaaggacgcacacgccaagagtgtggtggctatgaaagagagaatgagtgaccttgcgcagagcttaggcatgccaccgggtctcagcgaaggaatgaagtaagaagctgtttttgttgtttcatttcaactttcaggtatgagaggtcggctttttttgtttgtttgtatatcagtcaggcagaagcaaagagctttgtactcttactcttatggaatcatatataaaagatttgaaacttttggttttctgcaattttattcccaatgtt

SEQ ID NO: 131560 - DNA, 1132 bp, Arabidopsis thaliana
  unsure (1)..(1132): unsure at all n locations
cgaatcccggccgaccacgcgtccggacttttacaacgctttccaagaaagtaaattgttgcttgccttcgtgttcaagacttcgagcaccaatccagacctcatcgtcgttagcttcagaggaaccgaacctttcgaggctgccgattggtgcactgatctcgacctctcttggtacgagatgaagaacgttggcaaagtccacgccgggttctcaagagctttaggtctccaaaaagatggatggcccaaggaaaatattagtctactacaccaatatgcttactacaccatcagacagatgcttagagacaagcttggcagaaacaagaaccttaaatatattctaacaggtcacagccttggcggagcactagctgctcttttcccggcgattctggccattcacggtgaggatgagctgctagataagctagagggaatctatacgtttggacagccacgtgtaggagatgaggactttggtgagtttatgaagggtgtggtgaaaaagcatggaatagagtatgagagattcttctataacaatgatgttgtgcctagagggccctttgatgacaggtacgtgattctcatacaagcactatggaccttgcaattccttcaacagtctctacaaaggaaaggtaagagaagatgcaccaaatgcgaactacttcaacttgttgtggttaataccgcacctgttgactggtttgtgggagtttataaggagtttcatattacagttttggaaaggcgacgagtacaaagagaattggttaatgagatttgttagggttgtgggaatagtgttccctggtggctctaaccatttcccatttgattacgtcaactctactcgcctaggaggcttggttcgacctcctcctactactactcctgaggataaacttgccctcactgcttgaactctcattatttaataatcatatccactttatctgccctaatgacggttaaataattgcacttgagctttaatgtattctctgtgttatgtgtttttgtaaaaaaaaaaaaaaaaaggannnnnnnnnnnnnnnnnnnnnnnnnnnnnnnnnnnnnnnnnnnnnnnnnnnnnnnnnnnnnnnnnnnnnnnnnnnnnnnn

SEQ ID NO: 131561 - DNA, 674 bp, Arabidopsis thaliana
  unsure (1)..(674): unsure at all n locations
gccggccccttagacgttcgatggccgttcggggccggaattccgggtcgacccacgcgtccgatgatgagggcgaagtaatgaagtgcttacacattgggttactttgcgtgcaagaaaactcttcagacagaccagacatgtcctctgttgtcttcatgttaggtcataacgccattgatcttccatctccgaagcatcctgcatttacggcgggaaggaggagaaacaccaaaactggcggcagctcagataattggcccagcggagaaaccagcagtactattaacgacgttactctcaccgatgttcaaggtcgttaagaagtgtattcctcttctttataatctaagaagactataggtatcaatttatagtaatacttgttatatagaaaattatgtgtttaaagcgtatgcaaacttatttgtataaagtttacaaatacctaatgaaaagaaaagttagcctcnnaaaanaaaaaaaaaaaaaaaaaaaaaaaaaaaaaaaaaaaaaaaaaaaaaaaaaaaaaaaaaaaaaaaaaaaaaaaaaaaaaaaaaaaaaaaaaaaaaaaaaaaaaaaaaaaaaagggggggggccctttaaaagaacccaattttacttccgggggcggggaaggtaaaattttttttttggggcccccaaaataaaat

SEQ ID NO: 131562 - DNA, 361 bp, Arabidopsis thaliana
cacaaacacagagagattcatcatcgaatcataaagctctgttttcaagaagaaaatatgcatctgattaatgcggtggcggcggcgaggattttatccggaatcggacaatctaacggtaataacggaggagaagcgattccgtttggatcgtttgagtggatcacttacgccggaatatcttgtttcctcgtactcttcgccgggattatgtctggtcttactttgggacttatgtctcttggtcttgtcgagcttgagattcttcaacgtagtggtactcctaatgagaagaaacaagccgctgcgatttttccggttgttcagaaacagcatcagcttttagtgacactgcttctgt

SEQ ID NO: 131563 - DNA, 489 bp, Arabidopsis thaliana
atcgttaactttcaaaacatcaaaaggaagagctccctagcgattggaaatgtgactggtagcaaattcaagctggagagacaaggtgatgctattgttgggttccatggacgggtaggctcttgtattgatggtatcggggtgtattacgctccacttccaccttctcctcctcctccagagaaactccaaggccaaggtggtgacggtggagattcttgggacgatggtgctttcaaaaatgtgaagaagatatatgtaggacaaggcgatgttgggattgctgcagtcaaatttgagtacgagacttacactagtgaggtgattctggcagaaagacatggaaaggaaacattgctcggatacgaagagtttgaactggactatccgagtgagtacattacagctgtggaaggttgtcacgataaagtaattggatctgaaactggagttataaccatgcttaagttcaagaccaacaaacgtaac

SEQ ID NO: 131564 - DNA, 871 bp, Arabidopsis thaliana
gtttaatgttccttttgagttcaacttcatagccaaaaaatgggaaaccatcactcttgatgaacttatgatcaatccaggagagacaacggtcgtcaactgcattcatcggttacaatacactcctgatgaaactgtgtcattagactctccaagagacacggttctgaagctattcagagatatcaatcctgacctctttgtgtttgcagagattaacggaatgtacaactctcctttcttcatgacgaggttccgagaagcgctttttcattactcttcactctttgacatgtttgacaccacaatacacgcagaggatgagtacaaaaacaggtcactgttggagagagagttacttgtgagagacgcgatgagcgtgatttcctgcgagggtgcagagcggtttgcgaggcctgaaacctacaagcaatggcgagttaggattttgagagccgggtttaagccagcaactattagcaaacagatcatgaaggaggctaaggaaattgtgaggaaacgttaccatagagattttgtgatcgatagcgataacaattggatgcttcaaggatggaaaggaagagtcatctatgctttttcttgctggaaacctgctgagaagttcacaaacaataatttaaacatctgaaaaatgttacttctcaattacatcatttttgtttcccaatggttttgtagaatatgtttgatcccgtgagtggatgcaactcttttttcctgcaagtacatattgtattcaaatccttgtggaaatgataaattgtttaatcaaaaaaacaaaaaagggcaggccgctctagaggatccaagcttacgtacgcgtggatgcgacgtcaaagtcttctat

SEQ ID NO: 131565 - DNA, 599 bp, Arabidopsis thaliana
  unsure (1)..(599): unsure at all n locations
tccccaagcngttncttngnntcacccccttttttcgngtccgganccaccccttttcagcgggtccgaaccctttccatnccctcccctttgcattttgcccccccattccccccggggttgggtccaaaaccgggtcncttttggagagggagttcttgtgagagccccgatgagcgtgatttccngcgaggntncagaccggtttgcgaggcctgaacccttccaagcaatggcgagttaggattttgagagccgggtttaagcccagcaactatttagcaaaccagatccatgaaggaggctaaggaaattgtgaggaaacgttaccatagagattttgtgatcgatagcgataacaattggatgcttcaaggatggaaaggaagagtcatctatgctttttcttgctggaaacctgctgagaagttcacaaacaataatttaaacatctgaaaaatgttacttctcaattacatcattttttgtttcccaatggttttgtagaatatgtttgatcccgtgagtggatgcaactcttttttcctgcaagtacatattgtattcaaatccttgtggaaatgataaattgtttaatc

SEQ ID NO: 131566 - DNA, 627 bp, Arabidopsis thaliana
  unsure (1)..(627): unsure at all n locations
caaatattcaccacctaaaaagttcttncaaaatctcccttcttactcatttggattagtcctcaaagatgggtatccaattgatcggactctctcaggcaaagcaaaagcttcaaagaagcttatccgcgagaatcgcaagcctcttgcctacctcgggtcctaataagggcccaaagggtcatgtggccgtctatgtgggagagacttatcacaggaagagatttgtgatacctatatcgtatttaaaccacccattgttccaaggtttgttgaacctcgcggaagaagagttcgggttcgaccatcccatgggaggtctcaccatcccttgcactgaagattacttcaccgctctagcttctattctaagtggttcatgataagggagctcattgatcatcacaacattcattaagtttctttatacaaatctttgtgtttctcttaaaatgtatttaaggggggagagaaaataactcgagactgagaaactaagtgagtctctttcaatttttgatctaaaatgatcttgtgagttcttttaaccattccatttgtaaagaattcactatctgaaaaattaatctatgattctttttgtccattaaaaaaaaaaaaaaaaaa

SEQ ID NO: 131567 - DNA, 555 bp, Arabidopsis thaliana
  unsure (1)..(555): unsure at all n locations
atcnagacntgacccngtaacgacccttttcgacctgattgacgcgnctgtgaacnctgctagttgngggatgaccaacccctntgcaccgctacctcacatgaccagccatgattcccgtgctgaagaccccgatgactctcccattcatggaagagaagaatctctggttagaaaatcttctggtgttcgaggtggattccatggagggggtggtagtggagatcacatgatggatgatcttgatgagatgatattcggtaagaaaaacggctgtgattcttcgactaatccagatcatgacccaaaaaaggagcagtcctcatccaaaaacgacgatctcattcgattctgagacggatactttcaggcgacataataaatcttttataatgtatttggtgtttaattggtagtatgaatgaacaggttcaatgtaagtaatctgtgtttggagatctctttgacttgtgtgatggtttataaaggagatttgttatgatggcacatgtgatttgaaaggccccccgctctagaggatccaagcttaggtag

SEQ ID NO: 131568 - DNA, 510 bp, Arabidopsis thaliana
ctcctcgcctaaacatgatgctttacaggatgacttaacaacgacacttgtacaacaatgtggtcaatctcaaaccactgtccaaagaatcattgaaacagcaggtgaaaacgaagcccttcttttcgaagccttgaatgtgaacgacgagctagtgaaaacgctgtctaagtatgaggagatgaacaaaccctctgcaccgctaacctcacatgaaccagccatgattcccgttgctgaagagcccgatgactctccaattcatggaagagaagaatctctggttagaaaatcttctggtgttcgaggtggattccatggagggggtggtagtgggagatgacatgatggatgatcttgattgagatgatattcggtaagaaaaacggctgtgattcttcgactaatccagatcatgacccaaaaaaggagcagtcctcatccaaaaacgacgatctcattcgattctgagacggatactttcaggcgacataataaatcttttataat

SEQ ID NO: 131569 - DNA, 448 bp, Arabidopsis thaliana
acccacgcgtccgaaacgacacaccattcctacactaacacttatatcaccaacacattgtgttctactatacataaaattcagttcctaagtatttttgttttgttttgtgagatcgatggagagttacttgaggaaatggtgtttagtttctgtgtgggttttgcttttaggtttagggtttaaggtaaaagcagagcctcaagttccatgttacttcatctttggtgattctttggttgacaatggaaacaacaatcgtcttagatctattgcaagagccgattatttcccttacggcatcgatttcggcggccccaccggccgttttttccaacggcaggaaccaccgtcgcacggttctcacttggggctaacttgggatttgataactacattccggcggaataggactttttgagtgggccaaggggtaacttaaaggggg

SEQ ID NO: 131570 - DNA, 452 bp, Arabidopsis thaliana
  unsure (1)..(452): unsure at all n locations
cggaatnccggggccgccccagccgtccgaggaaaaagggaggcattacctaaaaaggggtggttctctcaacctctggttcatggggggccagaaggctggggctcgttcatcccagtccgctgccttaggttttctaagaatccgttccccaaaaggtgggtcgtacctggggctgggccgggctttaacagtgatcatgaagccgcaaatcgcccgttttttcagtttccaccttccctatgggaggaccgcttcctttccatttccgccaaccagccggaaattgttggcctggggggagatttcggggcccttaaggctaaagggggtgaaaggctggttttgtatggccgtaaaggaggggattcactggatccatctgctagtcagcctgggagccgcttaccatttcgggaaacagatcgaagaattcctgaaagttgatttcg

SEQ ID NO: 131571 - DNA, 460 bp, Arabidopsis thaliana
ccggggcggcccgaggcgtccgaactttaaaggttcaatatttcttcaactctatctgccctcttttgccactttattacatgtatgtatattagttcaatacttcgatctttttctcttacagattaactatttacatgtaaaaaaaatgatttgtctcttaacttttttgttgggatatactgtattcttgaattaagttgttgagataatgtttatctccgactccaaagtgggatctaattagttttcttcttcttcagttcttctacatatattagatggtggggaggatgagactaggaaagattgtggaaggcttgaagtccaagataaagactggtctaaggatgccgaagagatcatcattatcatcatcatcatattcatcttcatcatcatcgtcatcatcatcatcatcatcgtatgagaagatagagaagagtgagagtatgagaat

SEQ ID NO: 131572 - DNA, 443 bp, Arabidopsis thaliana
accggaccggaagggccgacccgagcgacccgagcggtcaaaaatactcgttggagaagtagccttacgtaccagttcattaaatcggctttccgaacaagctgctcgcaaccctgaggattttcacatcagagatcaaatacagaaattagaagatgaaatcagcgaaaagaaggttcaaatacgtgttctcgagcaacaaattattgagattttcggaatgactccctatgcctcagattctcttggaatgccccaggttctgtcgaagctcacgatgcaactaaatgagaaaatatttgaccatgagataaagtctgcagacaataggatacttcaggagcagctgcagatcactaaatcagaaaacgctgagatgcaagagacaatcattctactaagacaacaactagattcgttagccgagagacattcaacacagc

SEQ ID NO: 131573 - DNA, 432 bp, Arabidopsis thaliana
  unsure (1)..(432): unsure at all n locations
agaatntnaaccaacaaagcaaaacatgaaaggcacattcactaacttgcttgtgctccttctcattgcacttgtttgtgccaatgtcggtgctaggaaacttatctccgaagatacccaattcaaggatgaaaaatctttcctcggaggcggtggcagcggtgatggcttagggcttggccttggtggaggagctggtcttggtgggcttgggattggggctgggatcggcgcgggagccggactagggttaggtggaggcggtggtggactcggaggtggtggcggtggactcctcggtggaggcggctttgggggaagagccggtggcggactcggtggccttccttgaacgtattgacaagtgtgcgtgtgagagctgattctcagcttattactaattaatttaggtactttcattctcttaataaa

SEQ ID NO: 131574 - DNA, 516 bp, Arabidopsis thaliana
  unsure (1)..(516): unsure at all n locations
ggaccagatgggatcgtgaacagagaacaaagagtcgtgtggctcaagctgtagctgatatgatttaccgtgatcatcaatctcggattgaacaggaacagagaactaggatttctgagactgttgatactgagataaggcgttgggcaactggaaaagaaggaaacatgcgtgcgctgttatcttccttgcacatcgtactctggcccggatgtggttgggaggctgtttccataacagatttgatcacattcgccagcagtcaagaaagtctatagataggcaacactgtatgtccatcccgataaagttccagcagaaagggagccaccccttgaaccaaaagtattatcgcccgaaaanggtttttgaccatttttgaaggnaagctttgggaccaagttcaaccaagggggngnnccncttttagncccnnatanctggngannaaaggtggnccccctggnnaancaataattcggcccggganttcccccgngnctttcctgggttaaa

SEQ ID NO: 131575 - DNA, 704 bp, Arabidopsis thaliana
  unsure (1)..(704): unsure at all n locations
gcaaaacnccccgaaacttccgntnggcncggcnaacccccaatgggntttttaaacccccgnggaaacccttttttttgaannantnttaaatgtttcaaaaaattcccnaaagctnccctttctaacgggcgaattacgtnctttcaggccccagcttcaacaaaccccgattcgcttctacgttcgtacaaaacccggaccctaaagtgttttccggcgaaatcttatctcccgggaaaccgagaagttttaagctagctctcacgggactgcccgatgagttctacgatacagagtgggatctgctgatggtcgatgctcctaaaggttacttcgcagaagctccgggaagaatggcggcgattttctcggcggctgttatggctaggaaccggaagaaaccgggagttacgcacgtgttcttgcacgatgttaatcggagggtggagaagacttttgccgaggagtttttatgccggaagtatagagtcaacgccgccgggaggttatggcattttgctattcctccggcggctgcgaacgctacgattgactctggtgattataggttttgctaagattgcgacacgatttatcttcttatttcctcttttgcccttttattttactttgttgaggaattttatgacagcattgggttcacttattatctgttttagtgccggcagttttggataagc

SEQ ID NO: 131576 - DNA, 499 bp, Arabidopsis thaliana
  unsure (1)..(499): unsure at all n locations
ctggggtttcggttttcccctggggttttggtttgctgggtttncaagtttgtcaaaaccggaggcaagaacagggctatcgaatatgacattttcattgagtgctgtctccctgttaaggggctgccagacaagttcaaggagaaggacacagcatactcaggctcagcttctttcatctacgaaagcttcatgctctccgtcctccccttcctcatcgcataagttttttttacggtaacccgtttgcacatcttctgtttttttgtatgttctttgttgtgtgaatgctattgtcaatggaagcttttccggtttagttgaactcaagagtttataaaaaaaatgtgaaatgtatagtgagagatcttgtgttataaaataatcaaccaactcattatggttggatattaaaaaaaaaaaaaaaagggcggccgctctagaggatccaagcttacgtacgcgtgcatgcgacgtcaagctcttgtatagtgcacct

SEQ ID NO: 131577 - DNA, 649 bp, Arabidopsis thaliana
  unsure (1)..(649): unsure at all n locations
nnnnnnnnnnnnnnnnnnnnnnnnnnnnnnnnnnnnnnnnnnnnnnnnnnnnnnnnnnnnnnnnnnnnnnnnnnnccacgcgtccgtacggctgcgagacgacagaaggggcttggtgaatgcgtcattgaaacgccattatccgccgtgctaatctgaatctcctcccccgtcggaaaaaatggccactggtggaaaagtctccttcaaagtcactctgacttcggatcctaagcttcctttcaaagttttcagcgtaccagaaggagctccgttcacggcggttctgaaattcgcagcagaagagttcaaggttcctccacaaaccagcgccatcatcactaatgatgggatcgggatcaatcctcaacagagtgcaggaaacgtttttctgaagcacggatctgaactaagattgatcccgcgtgatagagttggagctgtgtttgtgatggatccatagatgatgtgtaagcaatgattaaaaactcagttccaaaaaaaacataataatatactgaaatgcttatgtatcaatttcggtgaataaatatgtaatcgccacatccttttcggattaagtgagttaattggtcaagttataaaaaaaaaaaaaaggcgaccgctcagaggaccaagctacgtacgc

SEQ ID NO: 131578 - DNA, 392 bp, Arabidopsis thaliana
  unsure (1)..(392): unsure at all n locations
aacccaatgccgtncnccggttttgttcctctcttgcatgctttgattgccgatgtactaatagagtcttagaggatcactagtactgtccttaatggttgcgtgcttttcttttttggtgttccttagcctctaagtgacttcagtgcagtgtccataggaaagcaacctttagattatttacacacagtcgggttccgctgtaatatctcagctgtcttttttatggtgtggtcattagcaacatacaagtagaaatcaagctccttgttaatgaatgtggtgttgtgaatgatgtcaggaaacgtttttctgaagcacggatctgaactaagattgatcccgcgtgatagagttggagctgtgtttagtgatggatccatagatgatgt

SEQ ID NO: 131579 - DNA, 536 bp, Arabidopsis thaliana
  unsure (1)..(536): unsure at all n locations
ggccactggtggaaaagtctccttcaaagtctctctgacttcggatcctaagcttcctttgagagttttcagcgccccagagggagctccgttcccgccgggtttctgaaatttcccaccagaagggttcaaggttcctccacaaaccagcgccatcatcactaatgatgggatcgggatcaatcctcaacagagtgcaggaaacgtttttctgaagcacggatctgaactaagattgatcccgcgtgatagagttggagctgtgtttgtgatggatccatagatgatgtgtaagcaatgattaaaaactcagttccaaaaaaaaacataataatatactgaaatgcttatgtacaacttcgttgaataaatatgtaattgtcacaattgaagtgagttgaatttggtcaagttatatgtctgttattattaataaaaaaaaaaaaaaaaaaaaaaannnnnnnnnnnnnnnnnnnnnnnnnnnnnnnnnnnnnnnnnnnnnnnnnnnnnnnnnnnnnnnntcgtcctaataaaat

SEQ ID NO: 131580 - DNA, 539 bp, Arabidopsis thaliana
  unsure (1)..(539): unsure at all n locations
gggncantccgncntgcccccaagnccctcggggaccccccnncggccaanccctcaggccttcggccggnttntccccgacttctttttggncccngacggggaatccaccgctggacccatattagattggctaacccagcgggtttagctcgttcaacccaacaatccactatcgcatcgaatccaggagattctggattcagacaggattaattaattcgcggaattttctgagtgtgttgactgagaaacgtgaggaaaaagaagttcttggtcgaattttctcagctcagaagtagaagcaagataagagaaaaacagagactccaaatctggcctctcttgctaatgcttcttgacgtcggtatattgttataaatcaataagtttgtaaccttggattttaagatcttatacctgtaataccaattattatttatatcgaatctataagtacttttggctgtttcgatagttttccctcttgtaaaaactattcttaattttgtgatatttgctgtttgtgcaagaagaac

SEQ ID NO: 131581 - DNA, 757 bp, Arabidopsis thaliana
  unsure (1)..(757): unsure at all n locations
gtgcagcaaacaagaaaggtatgccggttttttgtgacccagcagctctcatcgccaaagagtctgacccattagtcttcaccggatccatccgggttaaaaccggctacgagatccttagaatcactgctcacttgcaacagaacctgaacaaagtgaaagttccctttcttgtgatgcacggtactgacgacacagttaccgatcctagcgcctcaaagaagctctacgaggaagctgcctcgtcagacaaatcactcaagctctacgacgggttgttgcacgatcttctttttgaacccgaacgagaaatcatcgctggagccatattagattggctaaaccagcgggtttagctcgttcaaaccaacaatcactatcgcatcgaatcaagagattcttgattcagacaagaataattaattcgcggaattttctgagtgtgttgactgagaaacgtgaggaaaaagaagttcttggtcgaattttctcaactcagaagtagaaggaagataagagaaaaagagagactccaaatctggactctcttgctatgcttcttgacgtcggtatattgttataaatcaataattttgtaaccttggattttaatatcttatacctgtaataccaattattatttatatcgaaacctatatatgaaaaaaaaaaaaaaagnnnnnnnnnnnnnnnnnnnnnnnnnnnnnnnnnnnnnnnnnnnnnnnnnnnnnnnnnnnnnnnnnnnnnnnntctatcc

SEQ ID NO: 131582 - DNA, 535 bp, Arabidopsis thaliana
  unsure (1)..(535): unsure at all n locations
ggaaggagcaaaaaagccctaattttcggctggaggagcaagacgatgatgacgatgatgatatgaaggaacctcggatccgtgtgcgcgaagtttggccgcggaacgagatcctatagcactaagaggtctggccaatctaaagatagaactttctccaccatgtcctcttcattggttgaggcagcagcaggattgccggaaaagggtttgatggtgtgcaaatggctaggcacaggttcagcaggttatggaggatacaaagcctctgagtatttttttcctattgacaacgaagagtttagggaaaaccttgaggattgggaatctacgttgcaaagttgggagaaactgaaaaattatttggagggtatgcacaaaggaccctcttggcaatcaaacaagaactcattgacgaattccaatcttggtggggagaaaccttttaatcctttcatggatctagttgtgtcatgttcaaggcaaaaatcttattatccatggtttgcacnttgtcaaattatnccntntcgtt

SEQ ID NO: 131583 - DNA, 823 bp, Arabidopsis thaliana
cttcatcctcactaatgaattaataatacatttaaatataaaattattgaattcattatttgctcgattcggaaaatcgtaattgaattcagataatggaagctagaagactcgcgatcctctgttctcacctgaacccacctggtccgaacccgacccgagacccgactctcagggtctccgattgtagctctggttcttccggcgacgggaaagtggaatcatctactctccaaaacgactgcgttttctgcaagattatccgtggcgagtctccatgtctcaagttgtacgaggatgatatgtgtttgtgtattctggatactaatccactaagtcatgggcactctcttatcattccaaagttacattatccaaccttagaggaaactcctccctcagagcatgcaggttgttgctgccatgtgttctaaagtgcctcttatcagtaacgccatcgtgaaagctaccgggagtgactcatttaacttattggttaacaacggcgcagcagctggacaagtcatatttcacacacacattcacataatcccgcgtaaggaacgtgactgcttatgggcctccgagagcttacggagacactctctgaaacttgacaaggaagcatctcaactggtatcggggggtcgacgacacttgtgcagcctttctgaagaacaactggttcaaccctcggaaaagttcccttttaagaaacccattggtggaacctttagattccgaattccaaaccccaaggtatatttccggattggttcataaatcaggcctcaatttggaatttaatcctaaaaatccttgg

SEQ ID NO: 131584 - DNA, 453 bp, Arabidopsis thaliana
caaatctttttctcattcatcaaaagaaaaaaccaaagcaaaaaaaactcaaaacgtttttgaagataatgatgatgatgacgaagatgtttgttcagatcgctgtggtttgtctattggcgacgatggccgttgtgtccgcccacgagggtcaccaccaccatgctccggctccagcaccaggacccgcatctagctcaaccgttgtttcggccaccaatatgttcaccgtcttggctattgctgccgtggctctcgtcgttggttccaaccactaagttggttattacattcgtcgttttgtttcggtttctatgaaattgttctcttgacttttaatatattttgaatttttctcatttgtttttaactctctctatgttgatctgatttcttgaataaaataaaagtttattgaacgtgtgtttttaattacgaagatttggattacaa

SEQ ID NO: 131585 - DNA, 618 bp, Arabidopsis thaliana
  unsure (1)..(618): unsure at all n locations
atntttttttccgcgganncccgtggtgccccntnttcccttttggacccttggggggaatncttnaanccgggntttcaggcgccagggncccccattttagccccngggccgcccagaaccgtccggaaccgggccgaaagagncttttgatgagccaagtggaagcgatgaggatgagtctattagtggcgggtcagacagagaagataagctcgacgaggacgctcctctaatcgagacaattagatcggctgccagacggaaagcgctcaagggtgaacggtccaagggacactgacgacgggtaaaacatttatcaatcgacataatttatgtgtttaaaagtttgtttctagttgatacagtcaaggaaaccaacaaaactgctctttgttatagaaatccatcatttcaagtttagacattaccatgaaatatctatcattagcagaacaaaattgagggcatataatgaaaaaaagaaacaaacaaaacttgtgatatngattagatcatctactacccgnatttctcatcaaaggagaaataagaccctgactctctagaagagactggtgtntcctaatctcctgattaacctccctcttcaagtac

SEQ ID NO: 131586 - DNA, 523 bp, Arabidopsis thaliana
tcccttgccttcaccttcttggaaaacccttggaggagaaattgcttgaaaaaccgaggattttaccaagacgacctaggaagcagcaaatgtaaagacgcagggggcgtccaagaaaacgtccggaaacagagcgaaagagactgtttgatgagcaaagtggaagcgatgaggatgagtctattagtggcgggtcagacagagaagataagctcgacgaggacgctcctctaatcgagacaattagatcggctgccagacggaaagcgctcaagggtgaacggtccaagggactctggcgtcgggtaaaacagtttatccatcgtcatgatttatgtgtttaaaagtttgtttctagttgatacagtcaaggaaaccagcagacctgctcctttgttatagaaatccgtcttttcaagttggggcaaaaaaaaaaaacacaaccacaaagggcggcgcgctatagaggatccaagcttacgtacgcgtgcatgcgacgtcaagctcttctataggtcaccta

SEQ ID NO: 131587 - DNA, 467 bp, Arabidopsis thaliana
ggagacagagagatagagagagagataatgggcaaagaaaaagacaaaaacagaggagcttctccttcatcttacggcacgtttcaaggtgtccctacttatcctccaccgtcctatcctcatcctccgtcgcatcatccagtcatcggaattcctcagccgtctccacctcccggatcacctcatcacgacatttccgttcatcaatacattcaagaacatcaaaccgttgctggttaccctgtttctcaaggaagacctgcaagacaaaaccgtcttccttgttgtggtcttggcctcggttggttcttgttcatcattggtttcctccttggtgcaattccatggtatgtaggcgtattcattctagtatgtgctaggatcgatccacgagagaaaccaggatacgtagcttgtaccattgcagctgttgttgctacaattaccatagtttttggtgtcatggg

SEQ ID NO: 131588 - DNA, 742 bp, Arabidopsis thaliana
  unsure (1)..(742): unsure at all n locations
aaaagcatnttcttatcttggatctaatatttcaactgnnatcgattaagctccagaaagaggctcatcaagtcctgatgaacttcgaggaacccttgaaggactatgttcgttatgtacaatcgattaaggcaacaatagcagaacgaggcactgctttcaaacaacattgtgaattgtcagaaacaacaaagttaaaagaaataaatcttgacaaactcatgctcacacgttcagacaaagtaggagaagctgagatcgaatccagagagataaaagcagaaagtgaggaagccacgagaagatttgagaggatagtaaagagaatggaagatgagatagtaaggtttcaagagcagaagacggaagagatgggagtggcattccatcagtttgcgaaaggacaagctcgcttagcaaacagtgtcgcggatgcttggagatcccttcttcccaaacttgaagcttcttattctgtctaaatccaaaactaaacttacctgtgtctgtgtgtgttccttcatgagagggtttgtgtctagaggcagtttgtttttgtgagaaattctggtgtttttttgtcaacttcaagtttagttaacttggcttgtttccacttgtaaagaagatacatatgcgtcattattactctccccaacgttcatatggccatttttttttagaaaaaatataaaaggaaaaggannnnnnnnnnnnnnnnnnnnnnnnnnnnnnnnaatcg

SEQ ID NO: 131589 - DNA, 1013 bp, Arabidopsis thaliana
  unsure (1)..(1013): unsure at all n locations
atggaacagggacacagcaggttatattattctttattgtctcccgatgcttgctcttcaacttgcggttgtgttgtccgagtcacgcctaaatggtggtagtggctcttatgtaaagctgccacacgacttcacaagaacgtattcccgagttattattgatcacgacgaggtggccttatgcacatatcctctactgagtaccatccttcttggtgtgtttgcagccggcctaacagcttacttgttctggcttggaaggcagatactgaaacttgtcattaacaagcgtttacagaagagagtatacactttgatattctcggtctcgagtttccttccattaaggattgttatgctctgtttgtcggttctcacaagcagcagacaagattatattcgaagccccttctttcttggccttcttctccctcttctgcttttgcgtggtacccacctgcttgcttgtctacttcccggtttcagattccatggccctgagaggtctaagagacacagatgatgaggatacggctgtgaccgaagaacgcagtggtgctctgttacttgcaccaaactcttcacaaactgatgagggattgagcttaagaggtcggagagactcgggatcgtctacacaggagaggtatgtggaactcagcctatttctggaagctgagaactaaaatcgccaaaggctgtttctatttggcttttggcaatgtacagattcctggtgaaacaagcagagagagagggataaagagtttaagtatgagaatatgtttgcgcaaaaaaaggcataatttcagttttgtggcaaagacactttgactgtaaaggagggtttaagggggtttactcttgtgagggtttgttgtttgaaatgttttctgcttgatggatcatatttttgtacctttaaaaaaaaccaaaaaaagnnnnnnnnnnnnnnnnnnnnnnnnnnnnnnnnnnnnnnnnnnnnnnnnnnnnnnnnnnnnnnnnnnnannnn

SEQ ID NO: 131590 - DNA, 564 bp, Arabidopsis thaliana
  unsure (1)..(564): unsure at all n locations
cggaatnaaccgggcccgacccgacgcgtccgcaagaaacacacacacaaatagcaaatggctaacatgatctttctcgtgtgcgcaacttttgccttctgcgtcctcctcaccaacgcctccatctaccgcaccgtggtcgaattcgacgaagatgacactaccgaccaagtaggcccattccgccaaccacagaaatgccagagggagtttcagcaagagcaacacctaagagcttgccagcaatggatccgccagcaacttgcgggatcacccttcagcgaaaaccagtggggtcctcagcaggggccgtcgctacgcgagcaatgctgcaacgagctttaccaggaagaccaagtgtgcgtttgccctactttgaaacaagcagccaagtcagttagggtccagggacagcacggaccattccagtccacccgcatctaccagatcgctaagaacttgccaaacgtttgcaacatgaaacaaattggaacatgtcccttcattgccatccctttctttcctgcttactaaatcctagtggtatcacacgatgatcatcat

SEQ ID NO: 131591 - DNA, 604 bp, Arabidopsis thaliana
  unsure (1)..(604): unsure at all n locations
cggacacgtgggacgcgaacgagatcttttattgtactcaaggacaaacaaggattgaggtggttaactacaacggacggagcgttctggaccaacaagtgcaaaatggacagcttgtggtcattccacaaggattcacctatgttgtgcagtcccaccaaaacaacttcgaatggatttctttcaagacaaacgctaacgcgatggtcagcactttggccggtagaacctgggccttgagggcattgccactagaggtcataaccaacgctttccaaatttctctcgaggaagctagaaggatcaagttcaacacgcttgagaccactttgactcgtgcgcgcggtggacaaccccagttgatcgaggagatagtcgaggcttaagttaaaacgtttacttttactaataaagtagtgacatggttactattgtaatggtcagtttgtaatcatgtccactctaagtttttaacgtatgtgtaaaatatgtgtctaaagaacacgccggcacgtctcttgtatgtaacccttctcataaataaaaagggagtgtcgagttttnnaaaaaaaaannntaatnaaataaanattttatattattt

SEQ ID NO: 131592 - DNA, 560 bp, Arabidopsis thaliana
  unsure (1)..(560): unsure at all n locations
caagattattccgataatgcagtcactctccaccccacacaccatctctcttcttctccccagaacctctccgtctcgtctttctccctctcttcactcccttgctttccccactcgattacggtctctttcctattcttctcaaacgtcgatcctccccgatgccggcgatgatttcattgtcggtgactgtctcgtctacgaggacggcgtcttcgaagacccttaccttgataaggaggtcactcaggttgcgaagcaggagcgcaagaagaatcggcgtggcggggctaagagattagatgaatccgagattgagcccgagaacctcgtgccagaggaatggagggatattcaggcggaggtgaatctgacgaagaaggacaagcgcaaatagcgcaggagattgagttcggggttcgggtggagaagaagaggcaagggctaattccgctgaggaaagttgacttgatgacttctcacgaaaaggancaattggccantgagctgtatttcgnaaacggaattttcgaganttgangcaagtggaaaccgtnntc

SEQ ID NO: 131593 - DNA, 485 bp, Arabidopsis thaliana
cggacgcgtgggcggacgcgtgggcggacgcttgggctaccaccaatggcatacatctcccaatgtgtgtagtcgtgggtcactacatggaagtatccatgcctacacctgcaaacaccatatatgtttcttcattcgtctttcgaatctacaaaacttctcaaaccatataactagcaaagcttgaggttctgtaccttggcattctctggataagaccctcaccaaaatggttgtaagcaattgtaacttgcatcactttgtcccttgtgtatgaatcactatgccccagcaacataacctaaacaacacgcaaccgttactaaacccctaattctcaattccaataaaccctataaaatgtgaaactttagttatagagagtaaaaactctgtaaattaataactttagaaatataatattttattacttaataattaacaaaaagttattttatagaattgtagattttgatacatgtttt

SEQ ID NO: 131594 - DNA, 659 bp, Arabidopsis thaliana
  unsure (1)..(659): unsure at all n locations
ttnggccggccttgnccnggcgggtnccaagtgggcttggcccccccccccttnggtggcccnttttnncncaggcgggcccggncggaagtggcccaaatggcccccttgttcggggaccttcttagaccctcctgttaggaagaggaaccccgttgggatggagctcttaaggccgttcagaggcccaaaaaaaaccaagcattaaagctcaaagcttgatgaggtgggtgcaataagggttgctggctaaaaaagttgtagacattcccaattttgtattctgcactcgagtaggtgtcatggagactttagaagcacttttcaactcactgtagacagcttattaggttaaaagccccaactggtgaattcattccttgaagaagaaaggggaaatttgtgaaatgaagaagaagaatttagtatcataattgatttggtgtcagatttgtaacatttttcttggggtgttctattccatctcttttctgtctatatactcaatacaacacaaatcgttactattcatgtataataatttacttaccaattgatgttgttgaaaaagtaactgtcaataaaaaaaacaaagggcggccgctctagaggatccaagcttacgtacgcgtgcatggtacgtcatagtactctatagt

SEQ ID NO: 131595 - DNA, 486 bp, Arabidopsis thaliana
  unsure (1)..(486): unsure at all n locations
cataaggcaacggnngagaagatgnnnagcattcttcacatttcgagtatgggacttgttatcggcagggaggcgtctaccatgccactttgcaacacgtgcaacaacagagtgatgagaccccaatggtgtgggagatacttctatacatgtacatcctttactcaccagattggcattaccgaagtacaatgcccacttttntnttcctctacggtgctgcctttgccatagtccatgcttacctcaggtttggaattggtttcaaggtccactacgtgntactttgccttctatgcatccctcggatgtacaagtactacattnacacagagggcacagcagccaaaaggattnngaaaatggtatgttgctacgntcttagtgggnaggcatatnctggttctntgncccgngttttttgaaaaanggtatctcagtgggcctctgaatccttcagggggcaannttcctttggnattntgt

SEQ ID NO: 131596 - DNA, 398 bp, Arabidopsis thaliana
cggattgaaatttctggcggctctttcaaaggaaaattgtagatggtattcaaatacgttgaggaagaaagaaggtgacaaagaggaagacgaagaagaaagttgtagaaagtaatggtgttgtgggagttagctctaggaacagcttacttcttggggattaggcggacttaccggctcgcattgaagacccagcgtcggcttgttagccctaagcatccaaggattcgagattttatgcatcggaggacttatcaaatctttgatatggcacttagggtccacaagaacatacaacagagagacatggttattggtcggaatcttggaaactggattctccgggggcttgaccggatgaagccatcggctcaggttctactaccaaagaatacaga

SEQ ID NO: 131597 - DNA, 431 bp, Arabidopsis thaliana
ccgagctggtggaagatgttctggtttggacagaagaagaggtgtattgttgaaaaaaccgacccgctgttgaagaaattgggttagaggttattgagaagcttcgagttaacggtttgagagagtttctttataaagaaggaagaatcgtctctcttaatctcggatcagctcctactgtgcatctaatgttcagttctccgttaaccaaatccacggctgagaaattccgaagccatattatgcaagcgtttgaggcagttcttgagtcacctgtcacaatagagatcagatgcgagacaaataaagacccgagaaacaacgtgcatcatcatcatcatcacccaactgtgaaagacaaaagcctgccacaatctttagcactcattggccatgattacaacatcgatggaaggtgaagaagtgagata

SEQ ID NO: 131598 - DNA, 438 bp, Arabidopsis thaliana
  unsure (1)..(438): unsure at all n locations
caaagccgggagaagaagaaaatggcggtggcttctcttagtatttgcttctctgctcggccacatcttcttcttcgcaacttctctcctcgacccaaatttgttgctatggctgcaatgagtgaggatccaattcgtgaatggattcttacagaaggaaaagcaactcagataacaaagattggttctgttggtggtggatgcattaatcttgcaagtcattatcaaactgatgctggttctttcttcgttaaaactaacaggagtattggacctgcccatgtttgagggagaggctcttggtcttgaggctatgtatgaaaccagaacaatccgtgttccaaagcctcaccagcctggggaattgccaacaggtggatcttatatcatcatggagtttatagattttgcggacgcgtgcctccccccggcnnttcc

SEQ ID NO: 131599 - DNA, 470 bp, Arabidopsis thaliana
aacaggacgaccctgagtactacactgtacatcattatcaagggctttgtgctgggtataagggtggcctcatcagagacctccgctttgacaatagagtgggcgatggcgagtttgttgaaccacccaaaagttttggacaaagtaaaattagagatcgacgagataatcggacaagaccgtttgatcgaagaatcagacatagcaaaccttccttacctccaaaacgtagtatccgagacactccggctacatccagcagcgccggttcttgtgccaagatcaacagcagaagacatcaagatcggaggatacgatgtgccacgtgacacaatggtaatggtgaacgcgtgggcgatacatagagatccagatctttggaccgaacccggagaggtttaaccctgagaggttcaacggtgggagaaggagaaaaagatgatgttcgtatgctgatagcgtttggaagc

SEQ ID NO: 131600 - DNA, 1079 bp, Arabidopsis thaliana
cccggaattcctgggtcgacccacgcgtccgcgtcaaaccggttccaccaacggaactattatcttcggatgtgggtctaaacagtctggtcagctcggagagtcacaagctgcggttgatgggataatgggatttggacaatcaaattcatcgtttatatcgcagctagcttcacaaggaaaggtcaaaaggtcttttgcgcattgtctggataacaacaatggaggtggtatattcgccattggagaagtcgtgtcgccgaaagtaaagactacacctatgctctctaaatcagctcactatagtgtcaacctcaatgcaattgaagttggtaattcagttttagaactttcttcgaatgcttttgattcgggagatgacaaaggagttattattgatagtggtacaactctggtgtatcttcctgatgctgtttataacccgttactgaatgagatattggcttcacatccagagcttactttgcatacagttcaagagtcgtttacttgtttccattatacagacaaattagatcggttcccaactgtcacttttcagtttgacaagtctgtttcattggcggtttatcctcgggaatatctattccaagttcgagaagacacatggtgttttggctggcaaaatggtggattgcagactaaaggaggagcttcattaacaattcttggagacatggccctctctaacaagttagttgtctacgatatcgaaaaccaagtcattggatggaccaatcacaactgctcaggaggaatacaagtcaaggatgaagaaagtggagcaatctatactgttggtgctcacaacctctcatggtcgtcttctttagctattacaaaacttcttacacttgtttctctcttaattcctttcttctgtaacgttgctttatagtttcagataaaaaccctcttgggacaaagtttattccttctgttgtttatcattaaaggaactgattcccatttcttgaaaaaaaaaaaaaaaaagggcgaccgctctagaggatccaagcttacgtacgcgtgcgtgcgacgtcataaatcttctgata

SEQ ID NO: 131601 - DNA, 1419 bp, Arabidopsis thaliana
  unsure (1)..(1419): unsure at all n locations
tgcacgtaccggtccggaattcccgggtcgacccacgcgtccgcaaaagtttttgctttttcaaaaaattaaagaagaagaaacatctcgtttccatggctttgcgaggagatgagcatgagtttatgaacttaagagaatgggatcgaagagctcgattaatccgcgaaaacccgagttcaagaagattctcagcttcatacattggaagcttccgagaagatcaccacaagtcttcttttagaacaacaaacttcaacaacatctctagtactgcctcttctcctggctacactctcaaagaagagattgacccatcaacatattccttcaccaatgcactcaaagcattacaagcaaagacaatgtacaataacagggaatggttagcacaagaagggtttgcattgaattcgaagtggaacgaagcagagaaatatatctgcaatccattgtctggagaagtaccaatggagtgtttgtctgctaaaacattaagtgcaagatccttcagaaacttatcaaccatgtctgctcctcttcacttccctagtcccaatccattgatgaataatattgctcaaaacaaaccaaataataatcctaacgttagagtcattcacgaggatctttatgctcctgatcctgaacttcttgctctagcggaaaagaaagttgtggggatgaagcgagatgtgggcatacagagtacgacgtcggtggatcttagctccggtagccctagtccggcaaaaacgcctccgattatggaaaggtcgttaaaacgacacgtggaagctgatgattggccagtggatatcaatctcaaagtgaaaggtcaacaacaggatgtgaagttggaagagaaagaaaaagaagaagagaagcaagatatgagcaacgaaggagatgaagaagaagaagaagaagagaagcaagatatgagtgaagaagatgataaagaagaagaagacgaacaagaagaagaagagaagaccaagaagaagaagagaggacctggatgtttctcatgggtgagatcaagacaaagacaagcaagaaaatcaaagtatatcttccctatttgtgttcctcatcttgtcaaaggttgttgaaaaacctttaaaccgagagaatcaataaaggtttaaaggtttaaaccatcctttcaaaggttcctcttatttgtttctctttttcaatctattttatattatcaaaaacaaaatcatgatgatattatatttagttcttcctctttcatatagattcatcattcatgggagtgtcaaaagcttaaccatatgcttttgctccccttttctctaaaaaaaaaaaaaaaaagnnnnnnnnnnnnnnnnnnnnnnnnnnnnnnnnnnnnnnnnnnnnnnnnnnnnnnnnnnnnnnnnnnnnnnnnnn

SEQ ID NO: 131602 - DNA, 978 bp, Arabidopsis thaliana
  unsure (1)..(978): unsure at all n locations
acactatagaagaatttatgacgtgccatgcacgcgtccgtaagctcggaattcggctcgagagtttttgctttttcaaaaaattaaggaggaagaaacatctcgtttccatggctttgcgaggagatgagcatgagtttatgaacttaagagaatgggatcgaagagctcgattaatccgcgaaaacccgagttcaagaagattctcagcttcatacattggaagcttccgagaagatcaccacaagtcttcttttagaacaacaaacttcaacaacatctctagtactgcctcttctcctggctacactctcaaagaagagattgacccatcaacatattccttcaccaatgcactcaaagcattacaagcaaagacaatgtacaataacagggaatggttagcacaagaagggtttgcattgaattcgaagtggaacgtagcagagaaatatttctgcaatccattgtctggagaagtaccaatggagtgtttgtctgctaaaacattaagtgcaagatccttcagaaacttatcaaccatgtctgctcctcttcacttccctagtcccaatccattgatgaataatattgctcaaaacaaaccaaataataatcctaacgttagagtcattcacgaggatctttatgctcctgatcctgaacttcttgctctagcggaaaagaaagttgtggggatgaagcgagatgtgggcatacagagtacgacgtcggtggatcttagctccggtagccctagtccggcaaaaacggctccgattatggaaaggtcgttaaaacggcaacgtgggagcttgatgatttggccagtgggtatcaatntcaaagtgaaagggcaacaacaggntttgagtttggagggnangaaaaggtggtggggagcaagtttngcaccgaggggttttggnnngngngngggtgcagtttgtttagnggtttagggggggcggcnggggc

SEQ ID NO: 131603 - DNA, 528 bp, Arabidopsis thaliana
cgtggtgtgtggcgaatggtaaaacgacgaaggagaagcttcaggaaggtctcgactacgcttgtggcgaaggaggtgctgattgccgtccgattcaaccgggtgccacgtgttataatcctgaatcgttagaagctcacgcttcctacgcgttcaacagttactatcagaagaacgcacgtggagttggcacgtgtaattttggtggtgcagcgtacgtggtctcgcaacctcctaagtatgggaaatgcgagtttccaacagggcattgaaatggatatagagaagaagaggatcgtgcggatttatttacgttatttattttgatacattgttcttttgtcattcgagtatatgatttgcgtatatttatttttattattgtatatttggttggtttcatcggataaatagtcagattttctttcaaaaaaaaacaaagaaaaaaaaaaagggcggacgctctagaggatccaagcttacgtacgcgtgcgttcgacgtcataactcttctatagtgttacctaa

SEQ ID NO: 131604 - DNA, 443 bp, Arabidopsis thaliana
aaaatcctaattccacctccgccaccgccttgcccaagggtcttgatgaggatcagagctctattcctcatcctacagggaagcaaatgcccaatcagatgcacaatgtggtcgtcaacaccatggcggttagggcaaaccctccgaggaagtcgactagcaacggtgtgagccagagtaatggtgtgaagcaacctagcagtgtacagcagcaccagaattcgacttcgagcgcatccaagactcgagagctggaagactcagccaccaagtgtcagattaaggcgatggccgcgagagcgctgtggaagctggcgaaaggcaattccaccatctgcaaaagcatcacagagtccagagctcttctctgcttcgctgttctgattgagaagggcgacgaggaggtcagatacaactcagctatggcgttgatggagatcacc

SEQ ID NO: 131605 - DNA, 457 bp, Arabidopsis thaliana
gaatttatggcttaagatagtcttcaaagctacatacaaaactatattacaatttcgaagctgcccatggccatggcgttacagattatagcttcttcttcttcatcaccaacgattacaaaatctcaccttttctcttatcctcctctgcaatctcgttataaagcttcgaaacctaacctctcctcatggttttctcttctgggttcttctcggttctctccttacattggtttaaagcatttgggcatctcaatctcgccgaaatcttcaaacccagagaagaagagaagatgtaagagtatgatgattcgtgcgtctctgtttggtgttggagcacctgaggctttggttattggtgttgttgctttgttagtctttggtcctaaaggtcttgcttgggtagctcggaatcttggaaaaactctgcgtacatttcagccaacgattagagagc

SEQ ID NO: 131606 - DNA, 705 bp, Arabidopsis thaliana
gcggccgccctttttttttttttttcatgtaatctactttttatatttacgccaaaagaacacgaaatttacatgcgctgtaacaaaaaagttacccaatcatgaaagcaagaatcgaagagaaaaattatttaaaaagcaaaaagaaaacagtaagaaaaaggaaagggaataatggaacaaaaatgaaaaaaaattggaaggatgaaattaatcgaaagcagctcatccgattcccctgaggcgattatggtgtctcctccttctcactctcgctcttagtagtagtctttcttctccgatcgccgactaacctccggagctttcttcggcggtctctcctctctgttttctacttgaggtttctctcttctcttactttttttattctttgtgcatatctctcttctcttactttactcaccaaatttctaggaatactttttctcctgagatttgggcttttaatttagcttaattcttctgttaagtagaaatatatcatggcgaatctatgaaattatttcttctgttaagtagacattgaaatttgttacaatggcgaatcgtgttttttttttggtctgtctccattttttggtattgtctctaagaaaataagacgtttgtggtattcatttaaccctgcgattgtattttctgaactttggttactaacatatttaacttttgggaggcggtttg

SEQ ID NO: 131607 - DNA, 950 bp, Arabidopsis thaliana
aaggcacaaaagcttgagcctccacgggggggggggccgttttaaaactaggggatcccccggcctgcaggtatttcgcgtttgccctatccctgattcacctctaggtccagacgcgtatcgagagtatgaaaccttacttgttcaggattacaatgaacatactaagaaaagcgacaaaatatctaaagacaaaggggtttctaagttctcttctgcacttgaatcccttactatggagcctattgaaagcgaaaatgtagatatttcatcaggtggtgcacaaggtttggttgtctcagttcaccacttccccttgattatttgtcctttcactcctcgagcgtttgtcttaccttcccaaggatcagtcgcagaagcgtccttgtcccgtcaacatgaggattctcttagttttggtttgcctcccataagtactggatctatgtctgacactgatgatgttcctcctggtgcaactcttaccgcacattttctttaccagctggcccttaagatggagttgaagttggaaatattttcacttggtgaccaatcgaagaatgttgggaagattctaacagacatgtcaagtgtgtatgatgtagcgcgtcgtaagcgatctgctggcttggtacttgttgaccgcacacttgatcttatcactcccttgctgtcacggggattcacttttcggatcgtatcttttcatctttgccttcggccagaaagattttcttcacaagcacagcttaaacaaggggtcccaagcatcaatcgtccttctcttgatgttcaagtgccgcttggggaactgcttaatgaagaaccaagcaagattcgggattctggtctttctgaaagaattgaaacttttttacgtggctgggattcatatacctctgctccacaaaatgtatgtttgtttaatgaatgtgacaagaaaatta

SEQ ID NO: 131608 - DNA, 931 bp, Arabidopsis thaliana
aaaaccctggacccttattctgctactctcatttgtagttgttaaactaaaataacccatttgtgttttaaatctaaaatggctagaaatttcgagctttctttgattctctttgttctgtatctgtccactgcagcaatagtcatggctagaaaccttgaagaggaatcaagtggtgatacagagttcattaaagcctcttgtgagacgacgtcgtacccagaccgatgcttccagtctctgtcttcatatgcaagcgagatcaagaagcagccacgtaagcttgctgagaccgcgcttgccgttagcatagcccgagcaaagtcagccaaaacctatgtatcagagatgactgattataaaggaatcacaaagaggcagcacgaggctgtagcggactgtctagaggagatgggagacactgttgacaggttgagcaattcgctgaaggaactgaagcatctggaggaaggtgacagcggagaagacttttggttctgtctgagcaatgtccggacgtggacaagcgcagcactgacagatgagaccgcgtgtatggatgggtttggagggaaggccatggctggggagctgaaaagtttaatcagaacacacattgtgagtgttgcggaagagacgagcaatgccttggctttgatcaatgactttgcttccaagcattgaaatcatttcaaaggggtttagtctttgggacaagagtttttctcgtattcaacactgcttgtgtttttttttctctctttaaagtttctactttatcttaacttatcatttttcatattatgcataaattaatctgtattaaaattaaaatacttcataattcatttcaaaaaaaaaaaaaaaaaagggcggccgctctagaggatccaagcttacgtacgcgtgcatgcgacgtcagagctcgtct

SEQ ID NO: 131609 - DNA, 410 bp, Arabidopsis thaliana
cagacatcctaagaccggtgactggtacccatctttttacaaacctgttggagttctttactggcttcaacacagtgaaggggccaagcgtgtggattgggtcgttattcttgatgctgacatgatcattcgaggtcctatcatcccttgggtcctcggtgctgaaaggggaagaccctttgccgcccattacggctacttggtgggctgcgataacctccttgtgcggtggcacacaaagcatcctgtactctgtgtcaaagttggcggtcttctcgctatgcatatcgacgatctttgggtcttggcccctctctggctgtcaaagaccgaagacgttcgccaagatacagcttactggaccaccaatcttaccggagatatttacggtaaaggttggatcagtgaga

SEQ ID NO: 131610 - DNA, 707 bp, Arabidopsis thaliana
tctctcaaatctcaaatctcaaaatctcaatttcttcaacaatgtcatcgaagaacggagttgttcgtagctgtttaggatcaatggacgacatcaaaaaagtcttccaacgattcgacaaaaacggcgacgggaaaatctccgtcgacgagctaaaagaagtgatccgcgctctctcaccaacagcatcaccggaagaaacagtaacgatgatgaaacaattcgatctagacggtaacggattcatagatctggacgaattcgtcgcgcttttccaaatcggaattggaggaggaggtaataatcgaaacggcgtaagcagttttgaaaggaagcgttttgagttatatgatttagatggtaatggaaggatctcggcgaaagagcttcattcagtgatgaagaatttgggtgagaagtgctctgttcaagattgtaagaagatgattagtaaagttgatattgatggtgatggttgcgttaattttgatgagtttaagaagatgatgagtaatggtggtggtgcttgaggatttgaaagatttcgccggagattagattagtcgacggtgatgattcgtattagcagattaattttagtgacggcgattaaaaaccctacaagtatgtggtgattgatgaatattgattttaactatataaggttgttcctatttcctcagctctcttcaatgtcaatatgcttt

SEQ ID NO: 131611 - DNA, 510 bp, Arabidopsis thaliana
gtttgttatacaaaaaaaaaagagaagaagaagccagatgtctgagagttttataagtaacgaaaatgaaatcgaccgtcatgatgattttcctcattatctacctcctcatcgccgtgccttgcttcgctaaaggatcggagcaaacggattcagaggtgtacgagatcgattacaggggaccagagactcataactctagacctccaccggaaactatgcacggcaagccaccgtacatccaccataatacctccgccgctgggctcggtgctcatgtaggaggaaagaactagagagagagcgagaccctttccaaggagaagactcagaagttgaagaggaagattacgagagttgtgatatatatatgagtaattaatgatgttaattgatacaaatttatactttaattatttatcatatgaagatgatcatcgatgtgtgatcagtccagttagtgtgaatacccactactctcctgatggcatggccggctttaattattcc

SEQ ID NO: 131612 - DNA, 646 bp, Arabidopsis thaliana
  unsure (1)..(646): unsure at all n locations
cccctcacccgctatctacacagccagtgtgagggaaagtcagatgcccagtccgatatcccaccagcaatttcgggaaagaccccgtgtccaaatgtgctaaaccggttgactgttaagccagtttgtgccccagagacatctgtaagcacttggagaccttanagccaaccattgagccctttgtctacanaatgtatanccaaccaatacagagagagttgaaggaaagaaattgtaagctgtgtttaaaatatgtgtgtgtgtgtgttagtttgaacagagacatttgtgggttagagtagtttcagatagataagagagaagagtctgtagagttgtgatgagtctcgggcaattccgtggctcattaaaaacgttcaggccaccggtcaccaccgaccattttaaccggttatggagaccgggattggtgggtctgaatgaagtcagtttaaggtttggttttgatttgtctttgtaatcaactaaagagggttcaggtttaggagaaaggagatcctatggtgacccatttctttcaaacctattgtcgtttcactttctaaaaaaaaaaaaaagggcggccgctctagaggatccaagcttacgtacgcgtgcatgcgacgtcatagatctctatagt

SEQ ID NO: 131613 - DNA, 550 bp, Arabidopsis thaliana
  unsure (1)..(550): unsure at all n locations
gcaattcctgagtatgaaactgcagagcctcagaaagacacctcctatgcacttgatcttcaggcaacaacagagtacgggaattacaaagaggaatacgaaggagacatgtattggagaagtgagtgcattgatggggagatgtcatggtttaatgcaggtgtaagggttggtgttgggataggacttggtgtctgtgttggtcttgggattggtgtcggtcttctcgttcgtacttatcaatcaactaccagaaccttcaggaggaggcttctctagtttagtaatatatacatttgcaccttttttttttaccttgcaattttgaaagaattctctttttttgtatttgggtgtgatgtgaatcaaacactttggtgtgtggatatgatggtactatttgttttgctgtaaataaaggaatgagagtgtagtttcttttgtattaaaaaaaaaaaaaaaaaaaaggctttaaaggatcccagcttacggaagggggcatgcgacgtcaaagctcttctatannnnnnnnnnnnnnnnnnnnnaatcg

SEQ ID NO: 131614 - DNA, 576 bp, Arabidopsis thaliana
  unsure (1)..(576): unsure at all n locations
ggaatctctcatttgcctcctttatctttaagctcttatccttttgtctgctgcttctatgacccacatatgttggtcacttacaatcccccaatatttgctttggtgcaacaacagagtacgggaattacaaagaggaatacgaaggagacatgtattggagaagtgagtgcattgatggggagatgtcatggtttaatgcaggtgtaagggttggtgttgggataggacttggtgtctgtgttggtcttgggattggtgccggtcttctcgttcgtacttatcaatcaactaccagaaccttcaggaggaggcttctcctagtttagtaatacccccccttgcacctcttttttttaccttgcaattttgaaagaattctctttttttgtatttgggtgtgatgtgaatcaaccactttggggtggggttctgatggtactatttgttttgctgtaaataaaggaatgagagtgtagtttcttttgtaaaacaaaaaacaaagggcgcccgctctagaggatccaagcttacgtacgcgtgcatgcgacgtcaaaatnttntatagtgcaccta

SEQ ID NO: 131615 - DNA, 535 bp, Arabidopsis thaliana
  unsure (1)..(535): unsure at all n locations
caggattttcnagccctgagtccccngnaccntagccccnngcccaaggcngggaccgggggggatcccctnganatcccccgggaaataaataagggccagngangcttaccacccccccggggtttttacctaccagtatgggggagttccggcctgtaaattgggttatggnccattttagattccnccagcctaccaacctagtagaagagaagacnctggaaaagacttttaccccaaaaaaaaaggngctgaataataaaagaagcttgtttgttgtggcngcttctgagtttggcnatgagttttttttttttttctgcatttgttgcttatgtgaattttgtttggcttttgaaaagtctttttaggggtagagacggtattgtagagaggataacaaatctttttccgccttttacgggtttttttttccatgtggggtgagtataaggttgtgagaatgcagagttgtactcctttttctgcttttttttttttttaatcaataaaaatagtttatgttatccct

SEQ ID NO: 131616 - DNA, 679 bp, Arabidopsis thaliana
gcaaccacccaaaaacaatattacataacctatttctctacttcttcatacatttatagcaaatcctcttttgctttaaacccaccaaataactcagagcttttttgcattttttcccattctctattttgttttgtacttttggtctcactttaaaagatcataagttgaaagatttctgcagagaacaatatgttggaaggtcttgtctctcaagaaagcttgtccttaaactctatggacatgtctgtacttgaaaggcttaaatgggtacaacagcaacaacagcaactgcaacaagttgtgtcccatagcagtaataattcacctgaacttcttcagatacttcagttccatggaagcaacaatgatgagttgttggagagtagtttcagccaatttcaaatgcttggatctggttttggaccaaactataacatgggttttggtcctccacatgaatccatttcaagaacaagtagctgccatatggaacctgtggatacaatggaggttttgttgaagaccggtgaagaaaccagagccgttgccttgaagaacaagagaaaaccagaggttaagacatgggaagagcaaaagacagagaagaagatcaaagtagaggctgagacagagtcaagcatgaaaggaaaatcaaacatgggaaacactgaagcat

SEQ ID NO: 131617 - DNA, 468 bp, Arabidopsis thaliana
cacatttgtaacactaattctcaaatcctaaacatgtaaccttcatcaccaatttcactcactaggtcttctattgctagaaaagcgtcgcttttctccttacctcttcacactcttagccttcattcttttcgtctctgtcctctatggtgaagattttatgcgcatctttggacagctcgtgcctaacttcgtcctcccgccttctcgaacacccgaaaagaataagaaatcggagaagcttgcgtttgctattggttaaacagaggaaagctgtgacgttttcagcggcaaatgggtgagagatgaagtctcccgaccacttgtatgaggaatgggagtgtccgtacattcaacctcagcttacatgtcaagaacacggccgtcccgacaaagactaccagttttggcggtggcagcctaatcactgcgatcttccctcgttcaacgcgtcactgatgctggaga

SEQ ID NO: 131618 - DNA, 1499 bp, Arabidopsis thaliana
  unsure (1)..(1499): unsure at all n locations
atgannnnnnnnnnnnnnnnnnnnnnnnnnnnnnnnnnnnnnnnnnnnnnnnnnnnnnnnnnnnnnnnnnnnnnnnnnnnnnccacgcgtccggttttaattgaatattctctgttgcccttttttgaatctcttgttctgtctctctgataaaatctttgaaagaacaaacggagacagagagtgagagaaaatggcaatggttgctccaaaagaagggcttgtggttatggacaaggaatctgtttcttcagcttcatcggattctcatcttcgtctccaacctcactttcctgacttcactattcctgttaaagatttcttcaagtctagggaagcccgtgagtttcttagtggggctttagctggagctatgaccaaagctgttcttgctccacttgagactataaggacaagaatgattgttggtgttggatcgagaagcattccaggtagttttctggacgttgtacagaagcaagggtggcaaggtctttgggctcgcaatgaaatcaatatgattcgaatcattccaacgcaagcaattgagttagggacattcgagtgggtaaaacgtgcaatgacatcagctcaagtgaagttgaagaagattgaggacgcccagattgaaatccgtgattttagtttcagtccgtccatatcgggggtctctcctggtgctgtggctggtgcatctgctgggattgccagtacactcgtttgccatcctctcgaagtcctcaaggatagattgactgtgagccctgagatttatccaagcttaagccttgcaattccaagaatttttagagccgatggaatccgtggatttttacgctggcttaggaccaaccattggtcgggatgcttccttccagcacatgttattacttcatgtatgacaaaatgaagacctcatactgcaaatccaagaacaaaaaggctttaagccgtccagagatgcttgttcttggagctttagctggtctaacggcgagcaccataagcttccccttggaagtagcgcgcaagcggttgatggttggagctctgaagggagaatgcccaccaaacatggctgcagcaatagcagaagtagtgaagaaagaaggagtgatgggtctctacagaggatggggagcaagttgtttgaaagtcatgccatcttcaggcattacttgggtcttctatgaagcctggaaagatattttgcttgccgccaacaccaaaccactcatataatgacgaaattgtaacctaagttattattgtttctttaaagctaaagcctgtcatcacatttctaagttatgatttagggaatgtggtggcttggacatgagatgtttttttggcacctgggagtgttatgattcccatgagaagtagaagatgagttttttttaaaaaaaaaaaaaaaaagnnnnnnnnnnnnnnnnnnnnnnnnnnnnnnnnnnnnnnnnnnnnnnnnnnnnnnnnnnnnnnnnnnnnnnnnnnnn

SEQ ID NO: 131619 - DNA, 892 bp, Arabidopsis thaliana
gagcgaaaatgaaaagaatcagaaatggttttttgtaactgaagaggatatcaagagttgccaggtttccagaaccagactctgatagccgtcaaagctcctcatggcacaactttggaagtgcctgatccagatgaagcggctgaccacccacaaaggagatacaggatcattcttagaagtacaatgggacctattgacgtatacctcgtcagcgaatttgaagggaaattcgaagacacaaatgggagtggtgcagcaccaccagcatgcttgcctattgcttctagctcaggatctacagggcaccatgacatcgaagccttaactgttgacaacccagaaactgctattggggctcatgatcatcctcatcctcaacccggcgatacctctgatcttaattatttgcaagagcaagtaggaggaatgcttaagattactccctctgatgttgaaaatgatgagtcggactactggcttctctcaaatgctgagattagcatgacggatatttggaaaactgactctggtatcgattgggattatggaatagccgacgtgagtactccaccaccaggaatgggcgaaatagcaccaacagctgttgactcaaccccgagatgatcgaataccaagcacacttctcaacttctgatcccaaatgtgttacctcacaacactccctaaaatcatatacaaggagggagcaactacagaacgtgtatgaaccaatggcaggtgcgttccatacaatgtaccattagattatgattcatttatcgcctagagtgatgttgtagaggagcaccgaggaactaatgtaagtttaacagagaatgtacttcatcggctgcattggtacacatatttgattataatatttttgacc

SEQ ID NO: 131620 - DNA, 548 bp, Arabidopsis thaliana
  unsure (1)..(548): unsure at all n locations
attctccggttgagtatagatgtaaagcatgtttagtgacgcttatctgttaccgtgttcttatgttcaacagctatagtggcaatcatatttttgagagagttgcggttgctactgtctcagaaatcgacgttcctaggtttttttaccacccttacaagtggtggtgtgctagggttttacttgtacaagatggtggtcaagagagaaaagggaccaaccttagaagatggcggagaagatgaatcaagcgatgggtttgtaagaagtgaaggataaagaaaaatggggtaagaggaagaagtgttgtcgtcaacatcagcatcatatatgccaaactcttttgatatctctttttaagttgtgtacaatttttgcgatcaatccttctaatttccgttgtatttggattagtgagtcgtttattaatatcaacaaaccaataaaaacgagaaaaaaaaaaaaccaaaaaaggnnnnnnnnnnnnnnnnnnnnnnnnnnnnnnnnnnnnnnnnnnnnnnnnnnnnnnnnnnnnnnnnnnnnnnnnn

SEQ ID NO: 131621 - DNA, 1093 bp, Arabidopsis thaliana
  unsure (1)..(1093): unsure at all n locations
ctctcgtctctctctctgttaacaatggcgacgactagtttagtgaccggactaaaagtggtattaccggttatgttctgtctgatgctagcgactcttgtctacaccatcatcaccgatggccttcctttacctgatcgtcaagatgtcttcacaccatggttcgttacgacaattttggatttctacattaatcttgtacctatagcggtttggattgtgtataaggagtctacatggtctggttcaatactttggaccattttgctcatcatttttggcagcctcacgacatgtgtgtatctgtttctgcaacttctcaagctgacaaatcaagaagcttcagaagatcctatgtactatttgttacttcgagattcaatcaaggatggagttggtctgagagacaagaattcacttgttgtcacngcaagatttgtgtttggtgccttaggatgtgtgatgctaggagctttggtttacacttgcttcacttatggttctcctttccacatggagcttctatacccgtggatggtggttttattggttaacttctacattgatgttgctgtcttatcagtttgggttgtctataaagaaatctagtttgatcattcggaaattcctatggggttgctctcattgaataggtcttggcagcgcttggcacggagcgcagtcattgtcgtgcagctattccgtctgtctcctctcgacccgctctacctcgttctagtgaacaacagcaatcgggctggagatatgtacgagcgcactcattctgcggctttgcgcataatgtgaagctttgtcatttcatttttaacattttancacaaaagttcaaaaacatatttttatctacattttaagtttgnatggttcaaaagttttcctccggaaaaaactttcccctatgngacgncaattacttaanggaccttaaacttttttggggcacgccttggaaaaccncatatggggttgagactttttngngggcggggaatcctgaagcccggggggccccaaggncaaacnggcgcaccgggngnggcccancttggcccctaagggggggaatccgggc

SEQ ID NO: 131622 - DNA, 521 bp, Arabidopsis thaliana
  unsure (1)..(521): unsure at all n locations
nnnnnnnnnnnnnnnnnnnnnnnnnnnnnnnnnnnnnnngggcggccgccccgganctagaactagtccgactcgtggcccaaatttattccaaatgaggttttccggtaccgtatcaataagctagacccatacttcgagttgttgcatgccataaataaactcgaacgctcaaaaaatccgttggacaggcggattcacatctcttacaaccaacacagtcctcggttcttggagcagaagctatttgcttagctttacatccatcccaaggtatcatttctaatacgtctgtagggcatgctcggacacattgagtacatcctatacaagtatcataaatttttactgaatgtgacataggatcgatagttttttgaatgtcataaattttcaatctagtaaacttctaactgaatggtatattaaaatactagatgaagcaatgatttcctttaatagaatttttgtaatgaattttggctcaattcataaaaaatggggctaaaatactttgattt

SEQ ID NO: 131623 - DNA, 567 bp, Arabidopsis thaliana
agaagaagttctaagatgcaaatgcatatagtataccatttattgactttatttcccctatgcgggagaaataacattaatgaaccagcagatattggaaaaacaacaattattgttaaccaaggaaaatcattcgtggtaaagacaagatacaccaggttccaaagaacgcgtactcaaaaaaaaatatataatttttatttttttaccttttttgagtacgcgtcctggccaataaaaaaaataaaaggtattcccaaatttatccaaatgaggttttcggtaacgtaccaataagctagacccatacttcgagttgtttcatgccataaataaactcgaacgccccaaaaaatccgttggacaggcggattcacatctcttacaaccaacacagtcctcggttcttggagcagaagctatttgcttagctttacatccatcccaaggtatcatttctaatacgtctgtagggcatgctcggacacattgagttcatcctatacaagtatcataaatttttactgaatgtgacataagatccatagttttttgaatgtcataaat

SEQ ID NO: 131624 - DNA, 578 bp, Arabidopsis thaliana
ccactcccttttgggaaggctggaccccctccaggtcccggcccggatttcccggtccgccccacccttcctgccggttgcaagaggccaccagagggggttatttcgaacccttcaagattttcttctctctatctctctgtttctctctgtttctgagatgggtttgtttggaacgaagaagatcgggaagtatgagataggaagaacaatcggagaagggaatttcgcaaaagtgaaacttggttacgacacgaccaatggtacttacgtagctgtcaaaatcatagacaaggctttggttattcaaaagggtcttgagtctcaagtcaagagagagatacgaacgatgaagcttcttaaccatcccaacatcgtccaaatacacgaggtgattggaaccaagacaaagatctgtatagttatggaatacgtttcaggtggtcagctttcagacagacttggaagacagaaaatgaaagaatcagatgctagaaaacttttccaacaattgattgatgctgttgattattgtcataacagaggagtttatcatagagatcttaagccacaaaact

SEQ ID NO: 131625 - DNA, 469 bp, Arabidopsis thaliana
atgacattgttgagaaaaccggaaccagtgagcgtagttgcagaagaggaagacaagcctctttctgatgatttaactatggaggaaggagaacaggaaggtggaacatattcacagtatactcttttggagaagccagaagcgaggctccagcctgtcaatgtagaagaggaagttggagatagcggaggagtggaatcatctgagatagtaaacaactcaattcagaagccagaagcaaggccagagcttgagaacatagaaaagggaagttgcagatagcggagttttggaatcatcggagatagaaaataattcaattccaactgaaatgcagctcaatagcgagatgtcctctgaggagaaaactattaacagtgatccactcgagagaattccttcgaaaccaatttctcaaaccatcgtcgaagcttctttacaagggaaaccacaaagattagacccgtct

SEQ ID NO: 131626 - DNA, 488 bp, Arabidopsis thaliana
gcgtccgcgagtctcttgtttgttcttttgagattatttaacctgccccagcttcaagcagtcatcctctcaagaaggtaccgaagatggggaagtcttgaatatctagtcctctctatgtcaatatcacggttccacagctcaagctaggctcaagattctgagtgtcattacaactgtgtctgtgtctccaattatgggttgaatgcaatgaagaacccaaagggtacttacttagtcatcaaacaacttctgtaaaaaaacaaaaaaagtgagaaaacaaaaacacactttgttttctttgtatagatgcagaaaatgatctgtcttctgcttctggagattttatctccttattagtctctcttttctttcttcttttagcccttttagtttaatatagtaccacttagatttttttttctcggttatttttttccttgttgtacaaacccttttgcatatcgtcaagattccacattttcttc

SEQ ID NO: 131627 - DNA, 566 bp, Arabidopsis thaliana
atatcattgaagacattgtttctaattgccgtgacatctttaaaggatctgttaactacgcttggaccagtgttccaacttacccgagtggagtcattggattcatgctttgttcatctgaaggaccacaagtcgatttcaagaagccagtgagtctaatcgatactgatgaaagctctatcaaatcacactgtcccttgaagtattacaacgctgagattcactcagctgctttctgcttgccctcttttgctaagaaggtgattgattcgaaagccaactagaaaagagaagagaaatcatttgctttagagaaacttcatgtggaagtgataatatgatgatacaatgatcctttggaaaaaaataaagaagttttaatttttagaatgtaatgttctttcacctgcaatgttatgtgactgcactgagctatcaatctctttttaataagcattacacatataaacgatgcgtatcataagctttctttcgctgatggtgaaaaggagaatcttgataagagaaaaaagcttctttgtgggggcggccgttttagaggatcc

SEQ ID NO: 131628 - DNA, 490 bp, Arabidopsis thaliana
ctgtggttgagaaattgaatggcaataccgttgaagggcgtgagataaaggttaacattacagagaaacctatagcatcatcacctgatttatcagttcttcagtctgaggattcagcatttgtagatagcccttacaaagtgtatgttgggaatctagcaaagactgttacaaaagagatgcttgagaatttgttttctgagaaagggaaagtagtaagtgctaaggtttcaagagtacctggaacttccaaatcccccgggtttggattcggtacgttttcttctgaagaagatgtggaagcacccattgttgctcttaacaattcgttgctggaaggacagaagattcgggtgaataaggcttagcctattggatcataaagaatgtgaaaaggatcgctttgaagagtttttgtaatgcaaatcattagagcttaggggatcatcttggattcattttaagttgaaaatgaaaccatatcttttcc

SEQ ID NO: 131629 - DNA, 508 bp, Arabidopsis thaliana
ctcactgcacctgagatctaccatgactacaggtcaatcacaacgaagaacttcttagtatctgttagagagcatcttgagaagtgcggggatacatcagctcctatcatgagtggtgtgattgcttgcacgaagaaccatacactaaaggaactgatcttgatgttagacgcggagaagatccataggatatatgttgtggatgattttggtaaccttgaaggactcatcactcttagagacatcattgcaagacttgtccatgagccatccggctattttggagatttctttgatggtgttatgcctcttcccgaaaactaccgagtctgagagaaaaatggtatctttcttctgtaaattgtcttttgtttggtgataatgcttctgtctgtttgtgcttaagttctcgaaattgtgttattaacgtttaacagaaataagaaaagaagaaagagcctgtctttgagtgaatatgtctgaaatacaataactcttaagattaaaa

SEQ ID NO: 131630 - DNA, 607 bp, Arabidopsis thaliana
agtagcaagagcaggagtgtgtcacctgctagatccattccccgcgttcacggccccttagtcgttctcgctcgctatacagctctgtctcaagatctggctcactgctacgagctggggattggatctagatgggtcatctacaggccgtccgggactggatttacaaagctggattagcatgaactcgaacttctgcttttacggtctggtctggtctggtactccgcgcgtatcagctgtaggatctgatcgcaaagttttggactatgattactctgattcctcaatatatctatctctttgacaataggggattctgtgttgagctcttttctaggacagcatttaagctcccgggactagatgggagatggtcagcaaatttctttgttatgccacacttacatggggtttttggtctcgctgcaggtcccaatcaagatcaaaatcaagatcaagatcaagatcgaattctccagtttcacctgtgatatctggttgaaaatgaaaactggccactggctgtacccgaatcgtctcaagcttctcaggctccactgctaatagaatttgattccgatttgggattattatactggtcttc

SEQ ID NO: 131631 - DNA, 664 bp, Arabidopsis thaliana
ggtctcgcattagtgcaacttcagctgctgaagttgcaaagagaaatataatgggagttgagagcaacgtccaacctcttacttctccactgagcaaaatggtgttgccaccaactgcaaagggtaatgatggaactgcctctgatagcaaccctggtgatgttgcggctagtattggtagagctttttcaccatctattgtatctggttcgcagtggaggcctggtagtccctttcagagtcagaatgaaacggttcgtgggagaactgaaatagcaccagaccaaagagagaaattcttacagagattacagcaagtacagcaaggccatggtaacctcttaggcataccttctttatctggaggaaacgagaagcagttttcttcacaacagcaaaatcctcttttacagcagagctcttccatctctcctcatggaagcttgggaatcggagttcaggcaccaggttttaatgtcatgagttccccctccttacagcagcaatcaaatgccatgagtcaacaattgggtcagcaaccttctgttgcagatgtagaccatgtcagaaatgatgatcaatcccagcaaaacttacctgatgattcagcttccatagcagcttcaaaagctattcaaagtgaggatgacctctaaggtctatt

SEQ ID NO: 131632 - DNA, 649 bp, Arabidopsis thaliana
  unsure (1)..(649): unsure at all n locations
ttgnccnttgggggncangggccntttgnnaaannnagtttggggtggccccccattctttgggggaatttagccctgggttgttccaaagggntcnncanngttccttaaaccttnagaagtggtggttcaaattctctgtgggagnnttcctttgngggngnttgnatatnaaaggttcagcctttggccctaccttatgaggccaaagatggtgattggatnctcattggtgatgttccatgggagatgttcatatgtacgtgcaagagactaaggatcatgaagggatcagaagccaaaggtttaggctgtggtgtatgagatatatcttcaagaaatctaacagagacacaaaagaacttgaagaaaaatagagtttcttttggttcagagaaatctctgtctgtgcttgggttgtcgggtttctcgggcaagatctatgttcattggattgaatccaattcatagcctttatttacctcatcggtaaaattcaaatgtaaacatgcttaatggtcttaagcatatgaaactggaacctaattacattttgtttcagaaacagggcaaaaggttgtccttaaatctttggttatgtgtattacattaattaaagtgttatgatgattgaagtgtttttttttaa

SEQ ID NO: 131633 - DNA, 483 bp, Arabidopsis thaliana
ggttttttcgtttttgttaacttcgccgtgtagttgtggtggtgagattgtgagagatatggaggcggagaaaatggaattgaagctctacaacacgatgacgcaacagaaagaagttttgattccaatcactcctggcaaaatcggattatacgtctgtggtatcaccgcttacgatttcagccatatcggccatgctcgcgccgccgtttccttcgatgttctttacagatacttgaagcatttggattatgatgttacttttgtccgcaatttcactgatgttgatgacaagattattgatcgtgctaataagaatggagaagacccgttagatttgagtaatcggttttgcgatgaatatttggtagatatgggtgctctgcagtgcctccctcccacccaccagcctcgtgtcagcgaacatatggacaacatcattaagatgatagaaaagatcattgagaaagattgtgggtatgt

SEQ ID NO: 131634 - DNA, 880 bp, Arabidopsis thaliana
ccgagctggtcaattcggtagagttacagggtacgtggaaccttttccaccaggctctaaagagaaatttgagtttgaaaacatgattgttggacaagcaattccgtcgggttttattccagcaattgagaaaggtttcaaagaagctgcaaactcgggctcactaattggtcaccctgtagaaaatctcagaatagtattgacagatggagcttcacacgctgtagattccagtgaacttgcgtttaaaatggctgcaatatacgcattcagactgtgttacacagcagctagaccggtgattctagaacctgttatgctggtcgagttgaaagtaccaacagagtttcagggcactgttgctggtgacatcaacaagaggaaaggtataatcgttggaaacgatcaagagggtgatgattcagtaatcactgctaatgtgcctttgaacaacatgtttggctactccacttctctccggtccatgacacaaggaaaaggagaattcacgatggaatacaaagaacattctgctgtgtccaatgaagtccaggctcagctcgtcaatgcttatagcgccagcaaagctactgaataagcaaacccttcaatccaatatattatggtttgttttctcataatgttgacataatttatttatacggttcacacaaccatcaaaatcactcaacataaactgcctaatgggctatgtcagaaaatcacttatgtttattgggccattaggtaggtcacattttttggtatccaccagtcccaatcattgtgataaaaaaaaaaaaaaaaaaaaaagggcggccgctctagaggatccaagcttacgtacgcgtgcatgcgacgtcatagctctactgagtgt

SEQ ID NO: 131635 - DNA, 556 bp, Arabidopsis thaliana
  unsure (1)..(556): unsure at all n locations
tccgngctcgttaatgcccattcncatcagctnntntcagcactgccggtatctgncctgtatctggcgattgaagtcccacngngtttcaggcactgtgctggtgcatcaccagnggaagggtttaatcgttgggaaccgatcaagagggtgatgattcagtaatcactgctaatgtgcctttgaacaacatgtttggctactccacttctctccggtccatgacacaaggcaaaggagaattcacgatggaatacaaagaacattctgctgtgtccaatgaagtccaggctcagctcgtcaatgcttacagcgccagcaaagctactgaataagcaagcccttcaatccaatatattatggtttgttttctcataatgttcacttacaacatttatttatacggttcacacaaccatcaaaatcactcaacataaacatgcctgatgggctatgtcagaaaatcacttatgtttactgggccattagggtcgctaataaaaatagtggaacgattagctgtaaaaaaaaaaaaaaaaaaagggcggccgctcta

SEQ ID NO: 131636 - DNA, 528 bp, Arabidopsis thaliana
  unsure (1)..(528): unsure at all n locations
cagctcagagacagaagaggatgatcaagaaccgtgaatccgctgctaggtctcgagagaggaaacaggcttatcaggttgagttagagactttggctgccaagttagaggaggagaatgagcagcttttgaaggagattgaagagagcactaaagagagatacaagaagctcatggaggttctgattccggtcgatgagaaaccaaggccaccgtcgaggcccttaagcaggagccattccttggaatggtgaagtgtggtaaaaaaaacttttgtatgtaaaaaaaataaaaacatatgggcttgattactatattataatctatatagtaaagtgatggtgatatggttagtacttagttacctgtaatgtatctaagggatgtaatggataatacatagctttttgctgatttataagatatctatggacctaannaaaaaaaaaaaaaaaaaaaaaaanacccccnnnnnnnnnnnnnnnnnnnnnnnnnnnnnnnnnnnnnnnnnnnnnnnnnnnnnnnnnn

SEQ ID NO: 131637 - DNA, 801 bp, Arabidopsis thaliana
  unsure (1)..(801): unsure at all n locations
aatgannnnnnnnnnnnnnnnnnnnnnnnnnnnnnnnnnnnnnnnnnnnnnccaatttttaaacctttagctcacaaaaaaaccacgcgtccgcaaattataatccttgaatactttggctatggcggtgtttatgtttaatgatcaaaaagctctgttttttatgcaagcgtgggtataaaatccagttccttttccgattttttgttcttccttcttcttcacttcctttttttcttctccatttctcaaaaaggccactcctttgcttatctttctctctctctgcagctgaagaacagagaaaaagggttttttattgtctgacccaaaggacccagtttcaattcagctcttgttgttagaaattgaggtaaaagattcaaaatttgttcagaaaagtggcacagattctgaaaaattaatatctttcttctcactcttttagctcgattctaagcttaaatctggtttagggtttttggagtttgtactgataaagcatgatcctttttgtcttccgttgactgattctgttccttttctcaatatattgatttgggcttctctttgtcttcatcgaatcattggtcttcaaggtgaatgtgtttgtgtagtggcaagtcttgttggtttgtagtggttttgatcttggagattttctgattagtgagtggtgttcatcaagtattagaagaagatggatttaagtgcgaaagatgagttttcagcagagaagaggaatcctgataactatgattctgttaataatccgtctggagattggcgagttgattcata

SEQ ID NO: 131638 - DNA, 453 bp, Arabidopsis thaliana
ctctctttctttctctctctctctccatctccctctctttctcttgcttttgttgtcactcatctttgttctctattataggtgccattcaagaaaatcgaatataaaccctactacttcgatcgatgttcatatctgtctttatttcaaccaaccaacgaagataggataaaaacatatccacaaaggctagaaaccatgcgaaataaccattcccttcgtctccaattgtggttccgtacactatttactgttggtgtagtcactcttcttatgatccgtgcgtttgtattacaaaacaacaaggaggacgacaaaacaaaagagattactacagctgtgaacatgaacaactccgatgccaaggaaatacaacaagagcttgaagatggttcaaggaacgacgatcttagctacgtagcaagcaaaagaaaagtgcctcgtggacctgat

SEQ ID NO: 131639 - DNA, 744 bp, Arabidopsis thaliana
taaagatttcagccaagaaagttttctttatttttggtcggaccaaccaacttccctttttggtaggatggcttattttccctacagttcccaaaaggcccaatcttttcgacttggaggcgggggtttcaccgcgaaaattcctaccttcagccattcttaacgccggtgtggaggggtcttaggggatcaagtgcaaaatggaaaattgtggtggccccccatgctataaagagcgctcccattcatgggaattccaaagggcttgaatctctcctcttacccatcccttgaggcgaattaaagttgatctccatatgaacggtcatgatcattgcttgcaacatctaagcacatcacaaagcccaattcagtttctaacgagtggtggtgggtcaaaggcatggagaggctattacaattggacaacaccagaggatatgaaatttttctacgatggacaaggtttcatgtcagttaagatcactagatcagaattgagtgtcgttttttatgatgtctccggcaatagtttgcataagtgggacacatcgaaaatgttagactcggatttttatttcccattgtaattcacatgaaaatcagttaaagcacataaattctacatataaataaatatgattactatgagtggctaacaaaaaaaaaaaaaaaagggcggccgctctagaggatccaagcttacgtacgcgtgcatgcgacgtcaagcttgtctatagtgta

SEQ ID NO: 131640 - DNA, 830 bp, Arabidopsis thaliana
aagaaccttcacttttctctcccactctttcttttactactctcacacatatctctgtctatatatcactttacataaacgactattccacacacaaacacacatagccatggcctcttctttctcttcacaagccttcttcttgctcacattgtctatggttttaattcctttctctttagctcaagctcccatgatggctccttctggctcaatgtccatgccgcctatgtctagcggcggtggaagctcggttcctcctccagtgatgtctccgatgccaatgatgactccaccacctatgcctatgactccaccacccatgcccatgactccaccacctatgcctatggctccaccaccaatgcccatggcttcaccaccaatgatgccaatgactccatctacaagcccaagcccattaacagttccggatatgccttcgccgccgatgccatccggaatggaatcttcaccttctccaggacccatgccaccggcaatggcggcttcgccggattcaggagctttcaatgttagaaacaacgtcgtaacactttcatgcgttgttggagttgttgcagcccattttctcctcgtttgaaatgattattgaattggtcagcctcgatcgttttcttgtaatttaccttcatttttttccctcaaattattagtggtcatcattttataatatttgagtttgtgtttgatgtacgattcagacatttgtttgcattatgtgcttaataagtttatcgttgactctacttgaagagagactttgtatgtgatgtaaatttcttctatctatggaacattgcattcgt

SEQ ID NO: 131641 - DNA, 629 bp, Arabidopsis thaliana
  unsure (1)..(629): unsure at all n locations
gggngggggggtcttggagttggtgccttccgtagatctanggaggaagcaagaggaacggaagccgtcctcctcatttctgcaagagcagtggtggtgttgctcgtcacattcttcagcaactccagaccatgaacattgttgacctcgacaccaagggtggaaggaagatcacatcaagtggtcagagagatctcgaccaagtcgctggaaggatcgcagctgctgtctaaatcatagcgactgatggtcaactccaagtttaaggtttatgtttgagatttagtaatggaatgaagttgcatttgatgaaaaccagtagtagaattccctctcatttttgttttgatggagttttcgtttacaaattgcctctcctttttattctcagcgacttaatggccttatatatttgagttttcatcttttgacctcctttcccttccagaatcagctacataagaacataacggggacgaacatactaactgaaatcaagtctaagaaaagaaaacctacaaaaataaaaaaggggggggcgcttttaggggtcccaaatttacgatcccttccttgcccggtggtggtttttttatatggtgccctaaattaaattatttggcctgggt

SEQ ID NO: 131642 - DNA, 695 bp, Arabidopsis thaliana
  unsure (1)..(695): unsure at all n locations
ttaggtcacactatagaagagctatgacgtcgcatgcacgcgtacgtaagctcggaattcggctcgaggtttgtctattagagatggaatcaaagacgttctggatcgttactcttcttctctgtggaacaattcaattagcgatttgcagatcagaagagaaaagcacagagaagacgatgatgctaggaggcgttcatgatctccgaggaaatcagaacagtggagagatcgagagtctcgctcgatttgccattcaagaacataacaaacaacagaacaaaattcttgagttcaagaagattgtcaaagcaagggagcaggtagttgcaggaacgatgtaccacttaaccctagaagcaaaagaaggtgatcagactaagaattttgaagccaaagtgtgggtgaagccatggatgaacttcaaacagttgcaggagttcaaggaatcatcttcttgaatttcacttgttcaagttaatgattacaaatgctctgagagtaattaattatatgtgtgtaaaatactttgctatatgcgaaacctaaaaagttaatgtaatcaagaaacttgttcttatgtccaaaaaaaaaaggtgtatgtttgtttcctgtttattcttatgtttcaagttnnnnnnnnnnnnnnnnnnnnnnnnnnnnnnnnnnnnnnnnnnnnnnnnnnnnnnnnnnng

SEQ ID NO: 131643 - DNA, 510 bp, Arabidopsis thaliana
  unsure (1)..(510): unsure at all n locations
accaagtcctttaccatacacaacagcaacttccagtcatcacctcggttactgcattagccgctatttatcatactatcaagagtactcactcactcttgacccttttaaaacctttaccaaagctctttcgatgaagccgccaaagtctccagtaagagtttctttgagatgattaataaggagacaagaaaacatttgttaaactctgtcttgaaaaggtaaagatttagcacctgtttctttggattcgaggcttttttgggggtatgtttgttgcttttctttgttctcagaccttttttgaatgatgtaataaatgtttaccaaagttctgttgctacgttactctttttgctacaagttttcttcatgaaatttgtcaccttccatttcaggaaaagatgagttaaaatattgttttnnnnnnnnnnnnnnnnnnnnnnnnnnnnnnnnnnnnnnnnnnnnnnnnnnnnnnnnnnnnnnnnnnnnnnnnnnnnnnnnnnnnnn

SEQ ID NO: 131644 - DNA, 841 bp, Arabidopsis thaliana
  unsure (1)..(841): unsure at all n locations
anaggccancccntnggattttccctggggcccaancccccagngggcttgccnatggncaaggcnnttcaatgcnccggttccgttccantcngggngctttccccggattccgtccagctgtngtccacctttactccagttcttcactcaacctcncnccangaaagtgcctgggcttcgggaacaagagatgcagtgatggtagctacataaccgaagagaatgatctgcaagggctgattccgaacaatgcctacattggcgtagactaaaacatagagaagatgattcgatttccatgcgttgaagtgattagatatgccaggagtaggaaagagtcagtgagaagaaaagtttttagctttagaagagatgaaggaagagagcaatcaattggagggattaaaagttagatgagaattgattgtgtttgtattattttgtatttgtagtgtgaatgggcaaaaaactcttgaaacagaggaaaagtaagttgaggaagagcagaagattttgaagacattagagaatcattaggtgttgagtattacattaaatcttcctcttcttcttttgttctttcaattctttgtatttttattgcgaggattctccttttttttcttttttttttgtagttgatttgtttagctaaaggattctttttttttgtttttgttaaaatccaatgttataaattgttaattattaaatggttttcttaccaaaaaaaaaaaaaaaaaaaaaggnnnnnnnnnnnnnnnnnnnnnnnnnnnnnnnnnnnnnnnnnnnnnnnnnnnnnnnnnnnnnnnnnnnnnnnnnnnnnnnnnnnnnnnnn

SEQ ID NO: 131645 - DNA, 512 bp, Arabidopsis thaliana
gatagagtcaaagacaatgtgtgcggtggtgactcgcgcctcatcattagaataccgaaacagtttctctctgatcacaacaagatgatcaacaagaagaagaagaagaaggccaagattacttcttcctcttcttcgtccgggattgatcttgaagtcaatggaaacaacgtcgattcgtattcttcagagcaatatccgcttaggaaatgtatgcactgtgaggtcaccaagactccacagtggaggcttggtccaatgggtccaaagacactttgcaatgcgtgcggtgtacgttacaaatcagggaggcttttcccggagtaccgtccagctgctagtccaacatttactccagctcttcactcaaactcacacaagaaagtggctgaaatgagaaacaagagatgcagtgatggtagctacataaccgaagagaatgatctgcaagggctgattccgaacaatgcctacattggcgtagactaaaacatagagaagatgattcgatt

SEQ ID NO: 131646 - DNA, 290 bp, Arabidopsis thaliana
gtttttgttaacaatcattttgttcaagtcctgtaataaactaaggagcatgacataatcagaacaaatcaacaaggtaataataacgtatctttcatttcattccttaattagagtgaccaaacttgacactgttctatacagctttaatctgtttggttacccttgcggaatagatcaacgagtatgttccagattttgatcctcaaagcggaagcttcttccggtttaaaccacttcttgtgaatcattttcaaatcctgcaatgtcagcctttgaggagcctcttc

SEQ ID NO: 131647 - DNA, 559 bp, Arabidopsis thaliana
gcctgcagtaccgatctcgcagtttccggctagaccgcacccggaagatgacatggcaaaatatacagcgaagacgcttaatgatccccgaacgttgaataaaactgtgtatgttagacctaccgacaacattctcacacaaatggaactagttcagatatgggagaaactaaccgaaaaagagttggagaagacctatgtttcaggaaacgactttcttgctgacattgaagataaggagatatcacaccaagcgggactaggacacttttatcacatatactacgaaggttgtctcacagatcatgaagttggagacgacgaagaagctactaaactctatccggatgtgaagtacaaacgcatggatgaatatttgaaaattttcgtataatgttacatatatgtgaaacacatcgccatttccttatttttatgttttaccatggccttttgttttgtttgcttgaagatgttttccgaatttattttaaaatttaaatgtttcagttatggatatgtctggttatatatagatatacatataatctcaagggtc

SEQ ID NO: 131648 - DNA, 541 bp, Arabidopsis thaliana
gaaagaagcagaagtgtgacaagacgattctggattctggatacagctggaagagaattaaaagaaaaagaaaaacacttccaacgaagaagatcgatttgcttcgagtctctgaaagaagaagaaaaaataatggggcgtatggattatctagcgatgaagaccgacgacgtcgatacggtggcgttagtcaattccgatatggaagagctcaaggtcgctgcgaagaaactgtttagcgatgtttcgaagcttggtggattaggcttcggtgtttcttttctcaaattcctcgcttctttcgctgccatttacttgttaattttggatcgtaccaattggaaaaccaagatgcttacatcactcctaataccatacatcttccttagccttcctagtgtcattttcaacttttctcagtggagatgttgggaaatggattgctttccgttgcggttgttcttagacttttttttcccttagtattttcccaaatttggctttgagatgtccagtttttcttgatccttgctacttgtta

SEQ ID NO: 131649 - DNA, 506 bp, Arabidopsis thaliana
gtcttagcccatgaactaggccatctgaagtgtgatcacggcgtgtggctcacatttgcaaatattcttactcttggggcttatacagttcctgcttttgggcaaatgatagctcgaaccttggaagaacagttacttcgttggctacgttcagcagagctgacttgtgatcgcgcagcactactcgttcgcccaagatccaaaggttgttgtatctggtctgatgaaattagccggaggatgtccatcaatcgctgatcagctaaatgttgacgcatttctagaacaagcccgttcatatgacaaagcttcttcaagccccttgggatggtacataagaaatgctcagactagtcaactttcgcatccattgccggttcttcgtgcacgtgagattgatgagtggtccaggagtctcgagtacaaaagtctcctgaaacgggcaaatcgaaaaagcacattacagatggtttagtgacgttgttaaagatttaaaaggttggaag

SEQ ID NO: 131650 - DNA, 815 bp, Arabidopsis thaliana
  unsure (1)..(815): unsure at all n locations
acttcaaccgataaacatagtagcaaaggcagtatagcttgtctcatgtagtatggaggaagagtgcagaggagctcatcttggctggcccatataccctggaagcagtagcgatcttcacaggccactgaactgcacaatacatggtatcgagttgtgggatgagtgaggcaataggcccagttcatataaaagaaagaccaagctctgatatgcaatcacgcattgatgccgaggttgtgaagcttcttagagaagcatatgagagagtgaaatctctcttgaaacggcatgagaagcagctacacacgttagcaaacgcacttctagagtatgaaacgctaaccgcagaggacataaagcgtattctccttccaaagcaggaaggcgagaaatttgaagagcaacaacaagaagaaggagacttggtattggcctaatcacatcattcattaccataaacacacttctttgggtgaaaaagggagattcaaagctttgtacagagtaaatctcccatagcttctacaacaacaaccaaaagaaaaacatatgaaattattgatctcatgttacaaaattattgtagtttttatttcattagctcattagttttcgcttcgaccttgaaccttttgccctttttgacattctgttcaattctatgaagaaaaatgtaaaacaacattgaaaagaaagtaataattgttgtctttattcaaaaaaaaaaaaaaaaaaggctctagaggatccaagcttacgtacgcgtgcatgcgaggtcatagttcaaatataggtcnnnnnnnngtacctaa

SEQ ID NO: 131651 - DNA, 776 bp, Arabidopsis thaliana
  unsure (1)..(776): unsure at all n locations
ttaggtcaactatagaagagttatgacgtcgcacgcacgcgtacgtaagctcggaattcggctcgagcgatgtatgtatgggaggacgagttgcagaggagctcatctttggcttggaccatattaccactggagcgagtaccgatctggcacaggccactgatcttgcacaatacatggtatcgagctgtgggatgagtgaggcactaggaccagtccatataatagtttgaccaagctctgatatgcaatcacgcattgatgccgaggttgtgaagcttcttagagaagcatatgagagagtgaaatctctcttgaaacggcatgagaagcagctacacacgttagcaaacgcacttctagagtatgaaacgctaaccgcagaggacataaagcgtattctccttccaaagcaggaaggcgagaaatttgaagagcaacaacaagaagaaggagacttggtattggcctaatcacatcattcattaccataaacacacttctttgggtgaaaaagggagattcaaagctttgtacagagtaaatctcccatagcttctacaacaacaaccaaaagaaaaacatatgaaattattgatctcatgttacaaaattattgtagtttttatttcattagctcattagttttcgcttcgaccaaaaaaaaaaaaaaaaaggnnnnnnnnnnnnnnnnnnnnnnnnnnnnnnnnnnnnnnnnnnnnnnnnnnnnnnnnnnnnnnnnnnnnnnnnnnnnnnnnnnnnnnnnnnnnnnnnnn

SEQ ID NO: 131652 - DNA, 681 bp, Arabidopsis thaliana
aaagaaagtgagataataatccaaaaaaaaaatccatatttttgccaacgtttttagacgatcaaatggcttacactaaccaaatttcagcggttggttgtttttctagcggttgcgattgctccgctattagctgagccacagtcaacgatgtttccagagatgactcctgaatgtgccacggttatgcctgacctgctcgaaaagtgttttgcaaccggtagtgtgacgccaacagaagattgctgcaccgatctaaaatccgcaacctcaacgcaagtgacttgtctttgtgataactacatagcaaaccccgccgtttcaaacatcaccggaccttactccaaagcaatcacaactaaatgtggcgttttcgacaaatacccttggtgacggtactagtaaaggaggagaagaaaagaaaggaggaagcagcagtagcaatggtaaagacaatggcaagagtgagggaaatggaggaagagcgaactcggttgctgcatcaatggctatgtttggtttgcttgcaagtctcgtcttcgtaatgttttaatttagttatttgtattcataccaaattttatgtaatttttttcttcttcttcctttttccttgaaagaaaatccgtcaacccaaaacaattacgtacgtttttgaaaaaaaaacattttatctgcatt

SEQ ID NO: 131653 - DNA, 513 bp, Arabidopsis thaliana
taatcgttttgagttgaaataaatatagggtaaaactggtattttatatgggccgatacgtgtggccctgtatcttagcccacaaagttagttgacctgcttttctgatcatcttcctcccactctctttcatctttttgtaatcgatttgcaatttcaatttcgcaaagttggatcatgggcaatgtcataagcggtggaagccgcccggaaaatcatcgggaccgtacttcgccgccgtatccaaaccctaatgctcagtaccaaggcaattatccgtcgccgtaccaagattgtgctaggtatccgtatggagagatggcgtctccagtgccacacgtagagcatcaggaacgcagtgactataaggaacgacatcaatctgaagaaaagaaactttgagacttgagcctgatgaacagaaccctgggaagttttttgctctccttcacttttgacggctctgttcctggaagcatcactggaatgttctttggttaagaagggaaagac

SEQ ID NO: 131654 - DNA, 463 bp, Arabidopsis thaliana
cgtccgtgctgaacacaaagatgatctgatctcgttcgtgtggaatactcgtttaaccattagcttggacctcaataagaagaccacaattcttcaggaagaaaacgatgggcatgtgattgtagtccaagttttcagggctttgcatgctgtgtatgtcagtgtgagctgtattgcacctttgacaccgggagtgggtaggttatcatgccgtcttgcgaagatacccgttgagagcttactggagcaccgaggtatggtgaagaacatacaaaaagtgacgaatgaacattctgaagatggtttcatgttgatttcttcctatttgatctctggcaatggacaacttgtatcttctgatttggaacgttcattgccggatctttgctattcatgattatgttaagaatataggttaattaaattttgtcatgtactacttttttgatattgaatgtgcttc

SEQ ID NO: 131655 - DNA, 543 bp, Arabidopsis thaliana
  unsure (1)..(543): unsure at all n locations
acttacaatggctgcatcgttagcctctctttcctccttagctataagccggagcaccacggtcactgttcaaccgccatggcagccaccgccttcctcctccacaaatcatacctcttgcttcctctatcaagaaacatatcacgacgagcttctataggagaggaagttctctgaagaacatttatgccctcgagacctctgacggcgccattaacgtggaggtcgatgatgatgaggaagaagaagcgtgtgagcttgttaacggaacagaagtgtccgttgacggtgttgaaggttttcttttcaacggcggtgtagaacaataacgggaacttggattgcttctactctctgatgnctttggctttcaagattcaantacacgggatttcgtttancgtgtgnnttcaatgggtataacgtnttntcccggacttgtttcgtggggtccatggttggaaaaccgnccaaagnccggatncgnggattggganggggcatnnccntacccgtttaancaagnaatnntncttccaaaag

SEQ ID NO: 131656 - DNA, 611 bp, Arabidopsis thaliana
  unsure (1)..(611): unsure at all n locations
acnctttnntttccagggncngggccttggctgaggaccatggcggctttgcaccattttcttgcatctgttggctgcttcctgggtcagatacctcctccaggagcagctgtatgtgtactagcttcccagattgccaatcttggagagagcataataggtgcttcttttcaagacaaagaaggattcaaatggctaaacaatgatgtagtcaacgtgatcaacataagcttgggaagcattgtggcgattttgatgcaacagtttatactccagaactgggtcaagtaaaacctgccacgaaggtcatgtattctcagtgaggttagattctttttttatattgttaaacacagccttacgtattcagtggtgttataaattatactctgttgtgtacaactagtagtccaacatcaatgaggggaaaaaacttctgggaccattgtctagcaattattggatgatatttatgtgaattaaaaaaaaaaaggcnnnnnnnnnnnnnnnnnnnnnnnnnnnnnnnnnnnnnnnnnnnnnnnnnnnnnnnnnnnnnnnnnnnnnnnnnnnnnnnnnnnnnnnnnnnnnnnnnnnnnnnnnnnnnnnnnnnn

SEQ ID NO: 131657 - DNA, 302 bp, Arabidopsis thaliana
atttggaaagaattgttcatgagaatggtgggattcgggagaaggaacctttctttctatcaggaaccaattacaatgaggcattgtcaaggagttttcttgatgttggagatccgccagaaactgcacttcttagtgcaccaacctaagagcaatgaagatgattccatattttgatgatagagtttcttagcatatcttacttatctactatgtattatgtggcaaaacaaatgttataaaataaacatttatatttatatgccattagaaaatctttgaaacagatgacaaaaaaaaaa

SEQ ID NO: 131658 - DNA, 767 bp, Arabidopsis thaliana
ttttgattttccgggttgggttttttccaattccaaggaggaaaaggaaattaattgcgggataaagagaaccaagagcccaaaggcttgggggtaacaattttggttcgaagcactttgtatctccagatattcgcccctacggggttaggctacttagtgcaagggatatggctcaaataacagtcataggaaaggatcggatcgtgtacagtacagatagagatatgatggaacaaaactatgagacagacgaatgggacaggagattcaaagagttagaaaaatcggattgaaatgtgaaatctgggacttgtgaccttttgctgttatatgctaagttacgtagcagctcacacatcatccgcaacacagaattttcccaacaacgtaaaaacattcatggacgctggagttaaagcggatgacacaagccatggcacatactgtttagacattcttcctctctctgagacagaaaataactggtttatagaggtctcttaagctctagtggtaatagaccattttgtgatgctccgtaacacaacaagcttggtcttgtttaaatcatccaggagatccaagtattgcttgttcctgagagttactacaaatgcaacaatagattatgtacattaatttgtatatacgaaagtccaaattcttgctcataagaatgaataatcaatgtatctatccgcggccgcgcggccgcggattcgcgatcatgcaagactttatgcgataaccgttcgtaccttcgt

SEQ ID NO: 131659 - DNA, 525 bp, Arabidopsis thaliana
  unsure (1)..(525): unsure at all n locations
cgagaacaaaaacaatggcgaaattattcatcaagcaagcagagcaatatgcagcagcccgacccagttaccccaccaaactcttcgaatatatcgcatcgaaaacaccgtgccacgaccttgcctgggacgttggcgccggaagcggccaagcctcacgatcgctagccggaatctacaagaacgtgattgctacagacacgagctcaaagcaacttgaatttgctgcaaagcttcccaacgtccgttacgagatcactccaccgacgatgtcttcatcggagatcgagaagcttagtagcacctgtatcattcaggttggttttagtcacccgttggcttcaaggccccttcatttggttcgaccctttaacgnanttttttacaagcaaacggtggaananggtgcttcaaagaaancccaaccggggtnaatntgccgccccttggnngnttaaacccattncccgggannttnacggacgnccnttggccaaaggttttttnaangggttttttcgggtt

SEQ ID NO: 131660 - DNA, 576 bp, Arabidopsis thaliana
  unsure (1)..(576): unsure at all n locations
ggccgttaggatcatcaagaaatggcaatatgctgcagataaggttcctgatgatcttttcattaggacaacattggagagatcaaacaagaacgcagtacacgcttggttcactggactatatattggtccggtgaacaatctattggcgttgatggaagaaaagtttccggaactaggtcttgagaaagaaggttgtgaagagatgagttggattgagtctgtactctggtttgctgatttccctaaaggagaatctcttggtgttctcacgaatcgtgagcgtacatctctatctttcaaaggcaaagatgattttgtccaagaaccgatacccgaggctgcaattcaagagatatggaggcgattagaagcccccgaggctcggcttggaaagatcatattaactccatttggtgggaaaatgagtgaaatggcagagtacgaaccaccattcccacatccgagggaggggaacccctatgaggttcagtatgtggcttcctggagagaaggggggggccagaaccggaccgggacagttaaacatgtaatgggcctaacccgtnccggatt

SEQ ID NO: 131661 - DNA, 827 bp, Arabidopsis thaliana
  unsure (1)..(827): unsure at all n locations
gagaggtgcaaaaaagaactgcaagctgttggaaagcaatacccatttgaacctttgaagtttctaccaaaaacattgaggttaacgtttgaagaaggggttcaaatgcttaaggaagctggtgtggaggttgatccncttggcgatctaaacactgaatctgagagaaaactaggccagcttgtattggaaaagtacaacactgagttctatattctgcatcggtatcctaaggcagttaggcctttctacacaatgacttgtgccgataatcctctttacagcaactcttttgatgtcttcatcagaggtgaggagatcatatcaggagctcaacgtgtccatatcccagaagtcttggagcaacgtgcaggagaatgtggcattgatgtcaagacaatatccacatacattgattcattcaggtacggtgcgcctctacacggtggatttggagtggggctggagcgagtggtcatgcttttctgtgcactgaacaacattcggaaaacatccctcttccctcgtgaccctcaaaggctttcaccctaatatcttttcaactgaaagctatttagtgaataattgtccaactccacaaatttttctcatgaagcttttagagatttttacttcttgttgtctaactctcctccttttttataagtgaatcttggtttttgttttgtgatgtttatgtttcattcacactaatttgagtcttttaattgcttaaaaaaaaaaaaacacaagnnnnnnnnnnnnnnnnnnnnnnnnnnnnnnnnnnnnnnnnnnnnnnnnnnnnnnnnnnnnnnnnnnnnnnnnnn

SEQ ID NO: 131662 - DNA, 630 bp, Arabidopsis thaliana
  unsure (1)..(630): unsure at all n locations
cgcttacgtgacgttactacactcatcggaggtatacgtatgcggagcaatagccttagcacaaagcataaggcaatctggatcaaccaaggacatgattctcctccacgatgactctataaccaacatctctctcattggcctaagccttgctggctggaaactacggcgagtggagagaattcgtagtcctttttccaagaagcgttcttacaatgagtggaactacagtaagttacgtgtgtggcaagtgacagattacgacaaactagtgtttatagacgcagacttcatcatcgtcaagaatattgattaccttttctcctatcctcaactttctgccgctggcaataacaaagtcttgttcaactcaggagtcatggttctggagccatcagcttgtttattcgaggntttnatgcttaaatcattcaagntcgggtcatacaacgggggngcccaaggatttttgaacggatatttcgtgtggtggcatagggtatcnaaacggttaaatacggtgaatccttgggggtgaaanaggcntgttaagcnggaaatnttccggaaatttgggggntncctncttgggcctaaacntggggttttngggctcggttancgggggtc

SEQ ID NO: 131663 - DNA, 445 bp, Arabidopsis thaliana
  unsure (1)..(445): unsure at all n locations
atacaatgagggtgctaggtttacacttagcgctanaggagcaagattattgggtttcatggatttgctgacaagtatctcaactctcttggagcatattttatcaagattccttcaatccaatcagcaatcgaaggtgctaaaaccacaggaaaaggttttgatgatggtggtgactacgacggcataagaaaagtgtacgttacaactgatggctctgcaattaggcatgtaaggttcgactatgacaaagccggtcaagtgggaactcgtgagccccggggcgaagaccggaacacaacatgagtttacggtcaatcatccctatgaatatatcacaccctgtggagggaacctccgctcatacccaaccctttccaattgtgttggttcttacatcgttaactttcaaaacattaaaaggaagagcctctccagcgattgg

SEQ ID NO: 131664 - DNA, 427 bp, Arabidopsis thaliana
atttgggtcaaatgtttgagcttttcgttgagcttagcaatcgccttcgcgtcaatctgatggcgtatgattacatcggcggacggtcagtctactggacaggctagcgagtgtaatacatatgctgatatagaggcatcatataaatgcctcaaggaaaagtacggtgtaaaagacgatcaactgatagtatatggtcaatctgttggtagtggacctacggttgatctagcttcacgcacacctaacttaagaggcgtggttttacagtgtcctatcctgtctgggatgagggttttgtatcctgtgaaatgtacatattggtttgacatttacaagaatattgacaagatcggctcagttacctgtcctgtattagtaatccatggtactgcggatgaagtagttgattggtctcacggaaaac

SEQ ID NO: 131665 - DNA, 544 bp, Arabidopsis thaliana
acgaatggaactaaaaacttaatagtcatggatggaggtttggctggagcttatccgtcccagtctttatgatgcttatcagcacattgagttggtctctcctccaccggctgaagcagaggttaccaaattcgacgtagtgggtcctgtctgtgaatctgctgatttcctgggcaaagacagaggagcttcccactcctccacagggagctggtctggtggttcatgacgctggtgcatactgtatgagcatggcttccacttacaatctcaagatgcgtcctccggaatactgggttgaagaagatgggtcgatcactaagataaggcatgctgagacattcgatgaccatttgcgtttctttgaaggtctatgaactcttagatttactcatcattgttgcttttttgattgaattgtatgattattcggaatcaggaccataatgatattgctgttttagattttcacattaaaaaaaaaaaaacaaagggcggccgctctagaggatccaagcttacgtacgcgtgcatgctacgtcat

SEQ ID NO: 131666 - DNA, 415 bp, Arabidopsis thaliana
attcgatgtagtgggtcctgtttgtgaatctgctgatttcttgggcaaagacagagagcttcccactcctccacagggagctggtctggtggttcatgacgctggtgcatactgtatgagtatggcttccacttacaatctcaagatgcgtcccccggaatactgggttgaagaagatgggtcgatcactaagatcaggcatgctgagacattcgatgaccatttacgtttctttgaaggactatgaactccgagatttactcatcattgttgctattttagatgaattgtatgattacgtttctataatgctattgctgtcttggatttttccacattctgtgctatgatttaaagtcctcaataaagtgatcatatgaataagaaacaggtcacaagtcaagaccgaaaaaaa

SEQ ID NO: 131667 - DNA, 722 bp, Arabidopsis thaliana
gatctaacggtcgttcgtacgcgatgatatcttcgtctccaccgcgtaaaaggctggtcaaggatttcaatattgagattgctcctgaagatgatttttctcaacgggcctggatgctcaagtatccttcagcgattacctcgtttgcgcatattgcacgctcagcaaagaacaagaagatagctgtgtttctagattatgatggaacactttctccaatagtcgatgaccctgatcgcgccatcatgtctgatgcgatgcgtgctgctgtgaaagatgtcgccaagtacttcccaacagcaataattagtggtagaagccgtgacaaggtctaccaattggtaggactaaccgaactctattacgcgggtagtcacgggatggatataatgactcctgtaaatccaaatgggtctcctgaagaccctaattgtataaaaaccactggaccaacagggtgaggaggtaaacctctttcaagcctgctaaagggttcatacccgtcatttgaaggggttttttatatccccgttgagataactaaatgtatcaaaggtgcaaaagtagagaaccataagttttgtacttctgtacattaccgtaatgttgacgagaaggactggccccttgttgctcaacgcgttcatgaccacctgaaacaataccctcgtttgcgtataactcacggtagaaaggttttagaggtgcgtcctgtgatcgag

SEQ ID NO: 131668 - DNA, 543 bp, Arabidopsis thaliana
  unsure (1)..(543): unsure at all n locations
aagcttttcttcgtttatcatcaccatcaccatcatcatcatcatcatcatcgtcatcatcatcatcatcatcatgacgtatgagaacaatagtgtaccaagaattgtaatcaagaaagttctagcaaagcttcgagaaggaaggtgaaggagctgtcgttagaaatggcatcacaaagattgaccagaagttattggacccgttcgtgttgctagttgaattttccttttcactctcagctggattcccagatcattcctcacagaggttttgaaagtgttacatacatgctacagggaggtatcattcacaaagatcctaaaggtcataaaggtacanttcaagccggngatgttcagtggatgacagcaggangnggantcattcattccgaatttccggaaggnggaggtaaccaatggtttcaggtttggtcaattcccttcccctgaaaattgctgacccaaattaggncctntcgggttagcatcctggcngagnacgggtnggcaagnttgccgggtcatggtnaacccgctttt

SEQ ID NO: 131669 - DNA, 373 bp, Arabidopsis thaliana
aacaagcgtgaattcaccgcgccaccgccaccaccagctccggtaaaggaagagaaagttgaggagaagaaaacagaggaaacagaggaaaagaaggaagaagttaaaacagaggaaaaatctcttgaggctgaaaccaaagaagaggagaaatctgctgctccggccaccgtagagaccaagaaagaagaggtcctggccgctccggctccgatcgtcgcagagaccaagaaggaagagacaccagttgctcctgctccggtagagactaaaccggctgttccggtcgttgccgagacgacgagggaagatatgttaccagctgctccggtcaccacagagaccatggtggaagagaaagtcgttccagtag

SEQ ID NO: 131670 - DNA, 700 bp, Arabidopsis thaliana
  unsure (1)..(700): unsure at all n locations
caagaaaggtcaccgggcgccacaagtaatgatcgcgatgagacgccagagactgtggttagagaagtccacgcgctaactccagcgccggaggataattcccggacgatgacggcgacgctacctccaccgcctgctttccgaggctatttttctcctccaaggtcagcgacgacgatgagcgaaggagagaacttcacaactataagcagagagttcaacgctctagtcatcgccggatcctccatggagaacaacgaactaatgactcgtgacgtcacgcattgttaagatgagagacaagtctagttgatgagaatccacgaggacacggatcatgaagaggaaacgaatcctttagcaatcgtgccggaccagtatcctggttcgggtttggatcctggaagtgataatgggccgggtcagagtcgggttgggtcgacggtgcaaagagttaagagggaagaggtggaagcgaagataacggcgtggcagacggcaaaactggctaagattaataacaggtttaagagggaagacgccgttattaaccggttgggttttaatgaccaagtttacaaaggccacnttttggttgaaggaaaatttntgnggnaagctttnaggnggnanaacccaaacccgtttggggaaaaccgcaaacaatttttgnngnaaccccatgnggnaannccnggga

SEQ ID NO: 131671 - DNA, 640 bp, Arabidopsis thaliana
  unsure (1)..(640): unsure at all n locations
agaagctagatcttgagaagtgtcctgggattgacggtgggcttgtncacctgcgagctttaaccaagctagagtccttgaacataaagtggtgtaactgcataactgatgcagacatggagcctctttcagtacttacaaatctgaggagcttacagatttgctgcagtaagattaccgatatcggtattagctaccttaaagggctaaacaagcttaatttattgaacttggaggggtgccgtcatgttactgctgcatgcttggacacactcacagctcttgcagggttgattgtatttgaacctcaatagatgtaatttttcagacagcgggtgtgtatagtttttctgatttaattaatttgaaggtactaaacttggggcatgnaccaacattncaaattcatgcttgggccncctgaaaggttttgacaaaagttnggaagcttgaattttnggttcttgtagnatttggtgccgggggcctggaccattttcagggatgntttngttgaaccnctnggggtgcctganccnaggtnggagaattggcttcccattttttgncttaaaccttgggggtacctgcattcctttngcccannggtagaaatntggtanactncgcctnncnggnc

SEQ ID NO: 131672 - DNA, 795 bp, Arabidopsis thaliana
cttgctgaagaattgcttccatctgcaatattcaagcgagctcctgatcagagctttgagttgacaaatgcagcaatcgatttcctgaaaggaatgtatatgttgtttgatgacgaccaggataacaatctgagacctcaagagatcgaggatcttttttcaactgcacctgaaagtccatggaaggaagctccttatgaagatgctgcggaaaaaactgcccttggaggactatcatttgacgctttcctgtcaatgtggtcactgatgacactattagaaccggctcggagtgtggaggaattttgatttacattggattcccgggtgatcccatcgactgccattcgtgttactaggagaagacgtttagatcgcaaaaagcagcaatgtgaacgaaaagttttccagtgctttgtttttggacctaataatgctggaaaatctgcattgctgaattgctttcttggaaggtcatatactgataaccaggaatcaactactgatgagcgttatgcagtaaatatggtcgatgaatcgggtgctaagaaaactcttatcatgagggaaattccagaagatggagttcaagggctattttcatccaaggaatccttagctgcatgtgacatagctgtcttcgtgtatgacagttctgatgagtcgtcatggaagagagcgacccagttgcttgtagaagttgcaaattatggtgaggccactgtgtatgaggtcccttgcctcatggtttcagcaaaagacgatcttgattcatctcctattttcatacaagaa

SEQ ID NO: 131673 - DNA, 536 bp, Arabidopsis thaliana
gagaggtggtaaagttgggtttggtcctgacggtggagatctgtcttctttctttgttaaatctattgaagaagttccgtataacatctccattattcagatcagtagagttttaccgtcggagactgcggcggctccgactcctgctccggcggagatgaatcttaccggaataatgtcggctcatggatgcaaagtgtttgctgagactcttctcactaaccctggagcttcaaaaacctatcaggagagtttagaaggaggcatgacagtgttctgtccaggagatgatgcaatgaaaggtttcttgcccaaatacaagaacttgacagctccaaagaaagaagcatttctcgatttcctcgctgtcccgacatattactcaatggcgatgccaaatccaacaatggtccgatgaacacacttgcgacagatggagctaacaagtttgagcttactgtacagaacgatggggagaaggttaccctcaagacaaggatcaacactgtcaagatcgttgatactcttattgatga

SEQ ID NO: 131674 - DNA, 620 bp, Arabidopsis thaliana
  unsure (1)..(620): unsure at all n locations
tgcaggtcccggttcggatttcccgggtcgacccacgcgtccgatttgtctgaatcttcctctcctgatgatcactccaagtaacttcaaagaaacgctcagattcgacagttctatatatcaacaaacatcatctcaagctcttacctgatatctctgttttgatggatcaaagtcgggttttgcggtttataggccaagtggaaacctgtagagttgttcttctcatggttctggttgttgccttcgtttcaggccttcagtattttgagctctctccagtactactatctattgtttcacctggaaacagcactatttctgaattcagaaaatccaatgatacggctaaaagtgctgaaaatgaaacgtttcttgcatctcaagaagcatccaccgggcttaaaccgtataacaggactacagagggtattgaaggggttctgggcacaagtttctggatgattctcacaaaatagaagcttcttgggcaacggtggaggagcaatgaaccggaaggtctctggatccnnttnaaccaaggttccttaatccgaaggaaantnccccttngggggttnaaagccccttaattgnanttnattagggggtngccatnt

SEQ ID NO: 131675 - DNA, 542 bp, Arabidopsis thaliana
  unsure (1)..(542): unsure at all n locations
aatntngcactttcgnggggctgtgntgccactttgcnccatggtaatccccccatggcatttaggttccgntntagttntnagnccggggggtnttatggtganctggaanctgnggcttatcgggtgccctttanggaactccctgctatataatgtcaagtgaattggtcaggaggcaggtcactcactgcacaatttgtctgcaggacatcaaaacaggggaaatccacacgaagcttaccgaaatgtgatcatacgtttcatctggtatgtgttgataaatggctcatcagacacgggtcatgccccatttgcagacaggcagttaaagattaaaacacgactgttgccgagctgtgtacatagcaaaaacacattatccttatatgttgttgtaacttgtaagtctaaaacccctttcttctgtatttttcctcatttcatttagagcgatctcagcttgagccataggtttcgacttttccctgcctattgttgtagacatgaataagaatacctacagatgtattgaaaagaat

SEQ ID NO: 131676 - DNA, 585 bp, Arabidopsis thaliana
  unsure (1)..(585): unsure at all n locations
ctggcgtgtgctataaaagagcgcaaagcagtagagcaactagtatctcattgcccgaagaagtgatacaagggtgtggaaacggttgacttacgtataatagacgaatatttctgttacaaaatgcgttgtgaccgccctgtacaccctaccgcgtccgcccccaaccactctctctccgtctttctccccgccttgcaatacggaatgcctccggcttcgggaatggggcttggaattgacaggctggtgatcctgttgacgaactccgcgagtataagagacgtcattgcttttcctgttctgaaacttcagcagtaacactgaaacatgcaagtggtaatgcatgttgtagcttttatagcattcttgtgtatctttattggtgatttctccagcaggaagttggaggaagaatgtgtaacagacgtcattagatagcaaaacaagaagttattttattcttgatgagtgcctaaaacagaacacacaaaaaaaaaaaaaaaaagggcggccgctctagaggatccaagctacgtacgcgtgcagtgcgacgtcatagatctnctatagtgtcgtcctaaa

SEQ ID NO: 131677 - DNA, 657 bp, Arabidopsis thaliana
  unsure (1)..(657): unsure at all n locations
aaangttgccttcantngcggaatgaacccntcctgattgcttccccngggccagggcccggtggaagccaantaggccncttncccaaagggnccagaggctntcgggannncctgacccaacgcaaggaagatgatgatgatgatgagtcatacgaagtgacccttgacgaagactttctcactgccttggaatacggaatgcctccggcttcgggaatggggcttggaattgacaggctggtgatgctgttgacgaactccgcgagtataagagacgtcattgcttttcctgttctgaaacttcagcagtaacactgaaacatgcaagtggtaatgcatgttgtagcttttatagcattcttgtgtatctttattggtgatttctccagcaggaagttggaggaagaatgtgtaacagacgtcattagatagcaaaacaagaagttattttattcttgatgagtgcctaaaacagaacacacaaaaacttggatcattccattttatcccatttggcatgtggtaaacagtaagaaacaaataaagttttgatttaatctcttaaaaaaaaaaaaagccaaaannnnnnnnnnnnnnnnnnnnnnnnnnnnnnnnnnnnnnnnnnnnnnnnnnnnnnnnnnnnnnnnnnnnnnn

SEQ ID NO: 131678 - DNA, 635 bp, Arabidopsis thaliana
  unsure (1)..(635): unsure at all n locations
aactttncggcggttacccggttgattgggatttgtaatcagggccgtggnttnggcatctcggcggtgggtgaaaccaatgctcttctcgagagaaacaagattttgaatcgggaaactgctgttgccacggcagccatatatgactccatgtttgccacagaggacggcactatacccgctacttttcaggtgatttacatgacaggatggagagaacattcgtctcacccgcaggccaaacgaagaggttcagccaccgtatccttcacggatctccaaaagcaatttggcggacaatcttgatggaatgattgaagaagagaaacattcaataagcagagactttacaaatgacacttgagagagaaatcagtgacttaagctataaggtacttggaggaactcttgtagatttgtcggagtctttcactgggcgaaagcatcacaattaggacgcctgctttcgcccatgtatttcgtatcgaataatagctgatcagaaacatatttgtattttacaaaaatattacgaatacttaaaaaaaaaaaaaaaagatctcgnnnnnnnnnnnnnnnnnnnnnnnnnnnnnnnnnnnnnnnnnnnnnnnnnnnnnnnnnnnnnnnnnnnnnna

SEQ ID NO: 131679 - DNA, 484 bp, Arabidopsis thaliana
cagtcactcaaatcattctctcatggcagcttcttcctcaattccgccgtcaaccgccgtaacctccgtcgttcgcaaatctctcctcctctcaaccaccttctccttccccgcttcttcattgtctccctccacgaaactaccacaaagacacattcaaagattgctcctagcttcctcctccgcatccgcatccaccgttccttccgattccaaaccggcgaagaaagaaacagtctacttcgacggcggagctcattacggagatctattagccaatctcattctaggtctaaccatcctttggctcccactaaccttagctgcagtgtctcgagcttttaaccttcgttacaggttcactaacctccgcgtgacggttatttcgggactcaccggagatgatcggagcgatttctcgtacaaagtgataaaagacgttcaagttgtgccgaggttcatcggagaatggggagatatcatc

SEQ ID NO: 131680 - DNA, 476 bp, Arabidopsis thaliana
ggccttagatcagagctcaaaaacagtagccggaagagtagccatggtgcatccagttctcacaaacctggatcctccacagctcgtaaagcaccagcattgcagaaacggtccaaggagagacgcagccgtcttccacctgtgggacaacaaactatctccagctgcttacgagaattatcacgttgctactggtgatagattgtctagtctgagaactgagctctccatgcgaagaagtcgaagtgaaggaactctcggacctatctgatctctctctctccctctttcattgcctgcgatttccttagcgaggtaacgatgaagatgtgatagatacacactttcttccctttattcatcttcttcatctttgtgttttggtggtgtgcattacatacatcagaagctttgattcttatagcttctcaataatgtctgaaattggaaaccatggtatacattcttttcagcac

SEQ ID NO: 131681 - DNA, 496 bp, Arabidopsis thaliana
  unsure (1)..(496): unsure at all n locations
gcttcaaaagactatagaaagtagaaattgaaacaccaatcaagagttttgctttgtctctctttaatttttattctttgcatatatgaagtaatagacggtacctttctttctgttctcagggcatttgatgtacgtcacaaaccaatcaagcatctccttgtgagcttcttctgctgctttaaccgcctctggttcatcgatgttgtatctaactgtccatccgtgtgacactttcggctgtatcttcacggtaactattcacctcggggttggaagatagaatctcctcaaattgcntcaagagtgctggtggggggacatttgatcaatttcgagctccnaanantagcaattggagccttcccaccttnggaaancancaccattgccaaagaggggtgaagcacacagctggctgaaangnnctcctangcagtncnccanaactttgnccccaaaaaacccgggggcccaaggggggtngnctgggntt

SEQ ID NO: 131682 - DNA, 476 bp, Arabidopsis thaliana
gtcgaagcggctcgagctcgtcgatcttggctgatcagatggctggacaatggtatgcgagagcttgtggactgaagccgatggcgaaagaagaatggataaagaaagcgttggagacggtctacgacttcaatgtgatgagagtgagagatggaacacgtggtgctgtgaacgggatgttacctgatggacgagtagacacaagcacgatggtgtcgagggaggtttgggctgggacaacatactcggtcgcggcttgtatgattcaagacgggctggccgataaaggttttaggacagcaagtggaatctatgaggccgcttggtccgaccgtggtctaggctgcgcatttcagacaccagaggcatggaccaccaacgatgaatataggtcactttgctacatgaggcctttagctatttggggtatacaatgggcacacacaatgccaaaacctaacagagaacaagaagtt

SEQ ID NO: 131683 - DNA, 471 bp, Arabidopsis thaliana
cgagaatctttcttctgaattttcagacaatagccatggatatatattcttccataactcaagctgcagatctaaacaacaacaacagtaaccttcattttcaaacatttcatccttcctctacttctctcgaatcgctcttccttcatcatcagcaacaacaattacttcactttcccggaaactctccagacagtagtaacaatttctcttcaacttcaagtttcctccatagtgatcacaacatcgtcgatgagaccaagaagagaaaagctttgttacctactttgtcttcatcagagactagcgggcgtctccgataatacggaatgttattgccactgaaacagggttctttgaggaggagggtaaggagggttgaggaggaggaaggaagaagaagacgagaaagagagagaagttgttcatgtgagagccagaataggccaagccactgtttgccacagcttt

SEQ ID NO: 131684 - DNA, 819 bp, Arabidopsis thaliana
  unsure (1)..(819): unsure at all n locations
ccggcactaatacgactcctatagggaaagctggtacgcctgcaggtaccggtccggaattcccgtgtcgacccacgcgtccgcacggctgcgagaagacgacagaaggggagttctttgaggctgagaaagaggagaagaaggagatcccacagggaagaaattctaatccatggaatcatctccttcgttccttgacaatctcttcttcttcttcctcatacgtccgcttctggcgatctcattcgtcatctgcttcatcgctctttggtggtttctagcatggaagcttgtattaagccatgttcctctagtacaagagatctttggcttgaggaagaaaacctttataccaaaacctgaatctcgtggtcgaatcgccaaattctacaaaagtatcagttctcagaatcctgttccccaatgaaatcgcaagctccgaggtttatagaagcttcgatgatccgaaaaccgaacgagtaagaggatattcaatgtcacaatccagaaagattcaagttacagttttagtcactaaaagagttctgttatgttgttgactcttttatggtgggggatgtgtgcaatgtagtgtaacaacttgtgtagtgtgaagtatttcaagcccaaatcttgaatcactgtttccttgttgttgtgtgagagatgctttgattcatgaatctggtgataaaaaaatgatgttttccccctccaaaaaaaaaaaaaaaaagaaaaaaananannnnnnnnnnnnnnnnnnnnnnnnnnnnnnnnnnnnnnnnnnnnnnnnnnnnnnnnnnnnnnnnncgtcctaaa

SEQ ID NO: 131685 - DNA, 756 bp, Arabidopsis thaliana
  unsure (1)..(756): unsure at all n locations
cttccacgtaatcaaaaattacaaagagagagagagagagatctttgaaagcaagaaattctaatccatggaatcatctccttcgttccttgacaatctcttcttcttcttcctcatacgtccgcttctggcgatctcattcgtcatctgcttcatcgctctttggtggtttctagcatggaagcttgtattaagccatgttccnctagtacaagagatctttggcttnaggnagnaaaccctttataccaaaaccctgaaatctcgtgggcggatcggcaaaattctttcaaaagnatcagttctnaggatccctgttnccccaatggaattgncaagttccgagggtttataaggaggtttcggatggatccgaaaaaccgaacgggttaaggggggtttttcaatgtcaccaaatccaggaagattcaaggttcaagttttaggcactaaaagagttctgttatgttgttgactcttttatggtgggggatgtgtgcaatgtagtgtaacaacttgtgtagtgtgaagtatttcaagcccaaatcttgaatcactgtttccttgttgttgtgtgagagatgctttgattcatgaatctggtgataaaaaaatgatgttttcaccatcacatactacaagaaagaacatgaaccaaagtcatataaatcgtaaaacatgaatcataaactctccagccaaagaactttctcaccagccattgttgcaattttggtatcacattaataggtgaat

SEQ ID NO: 131686 - DNA, 517 bp, Arabidopsis thaliana
ggtacttgcactaatgtttctgtctttgaaactttcaattttgatcttccccatcatgggatgacggttgaaaacgttatgggcattgtatgttccgcatctgagcttgggaatacttggtgagactagccaactgtttggccgtgccctacacatgatcgatgtgaggagactatggataaaactgagactcaccaaaacaaggaacttccaagaaagagcaaagaacgcacttgcatcagtctcactaggaaaatcttcatcacaatcagcctaaaagggtgatttagaaatccttcactgtcaatgagcttagtttagattactttactttactgtctgtgagagatcctttgactgacatgtttctatacctttggagttccactgtctctgtatgtaaatcctgttttgcttcttttgtgaatattttttcttcttcttttgaatattcatgttcttggtccacttcgttgtgcttacgttttgtctatattgattatggatggtttggttt

SEQ ID NO: 131687 - DNA, 537 bp, Arabidopsis thaliana
acgcaacaatatttgttggcggcattgaccctgatgttattgatgaagacctcagacaacctttttcccagtttggagaggttgtttcagtgaagatcccagtagggaaaggatgtggatttgtccaatttgctgacaggaagagtgctgaagatgctatcgagagtttgaacgggacagtcatcggcaagaacactgtcagactctcctggggacgaagcccaaacaagcagtggagaggagactcagggcagcagtggaatggaggatactcacgaggacatggttacaacaatggaggaggatatgctaaccaccacgactccaacaactatcatggggagaattgaagagactcatcaagtgatcatcttcatcatggtttcacatatcaaagctaaaacctgtagtcgaaagaagaattttgttagatggatttgattttgatagacttgttgtttggaggagatttaaaaattttggttactggtttgtctcagactaatataaatggttgcaacttgttggatcaaaaaa

SEQ ID NO: 131688 - DNA, 528 bp, Arabidopsis thaliana
caattcttaacttcgatctctaacctgcaaaaacattcattacactcttcagatcctccttccctttagccgccaaagcaaaaccgtcatcgatctctcttcttttatacagtcaaaaattagattcagattcttcaagaactctgtttttctagtagcatggtgtgtttggtctcccgtacgggtcgtcaatcccaaagatacaacaagggacggcgtcaagtcgtcgggtgtattccatacagactcaagatttcgagtgatggcacaattagcgacgaatttgaggttcttgttatttcatcacaaaagggtcacgctctgatgttcccaaagggtggttgggagcttgatgaatctgtagaagaagctgcgtcaagagaatctctagaagaagctggagttgttggaaacgttgagagacaacttggaaaatgggatttcttaagcaaaagcaaaggaacattctatgaaggattcatgttcccaatgcttgtgaaagaagagcttgagctttgacctgaacaa

SEQ ID NO: 131689 - DNA, 785 bp, Arabidopsis thaliana
  unsure (1)..(785): unsure at all n locations
aggtgacactctagaagagctatgacgtcgcatcgccgcgtacgtaagctcggaattcggctcgagcggctcgagcgggtcgagcggctcgagctcgagccgctctcaaaccctaagagaagaaaaatttgctttgtttttgccaaattcaatcgatatatcaaagatgaagatgggaggttcaaagagaagagtatcgagcaaaggacttggagctgttcttaaagaacaaagagctaagctatacatcattcgaagatgtgtcgtcatgcttctttgttggcacgattgatcctcaatctgtcttcagatttcatcctcatcaatctttatgtataaaaggctttcgtgtgttggagggagaagagtcgtgatgtttggagcttaaccggcctggcggatcgggtttgattctacgcgagattgtggatgaatcggttaagagtttgacttgtttttgattagacctctctatatcgtttagcagattcttgttctttggagcaaatatggaaaattcaatgatttagtggaggagagggcaatattgtaaatatatttgacggtataatagagagagttgacaaaattttgtaatagcttttggctttgttctatgacatttgaaatattaaatgatttacaacagttaaatgcataaaaaaaaaaaaaaaaaaggnnnnnnnnnnnnnnnnnnnnnnnnnnnnnnnnnnnnnnnnnnnnnnnnnnnnnnnnnnnnnnnnnnnnnnnnnnnnnnnnnnnnnnnnnnngtagctggagatcat

SEQ ID NO: 131690 - DNA, 749 bp, Arabidopsis thaliana
agacagacagtgaggtcttaaagaagatcaatgtctcaccatctacggataaggtgtcatctggcatgatggagatgatgttgcgacccccgcgtccggtgaaatctgtagccatatcaattgaatatgataagggttttctgcatatagatgaatatcctcctgatgctaatcaaggattcgacattccatcggctttgataagcttccccgatcatcatgctagtttagatttccaagaagagctcagcaactcgcccttattatcaagtttaaaggaaaaatccttaggacgctcttacacagaagtattgctcgtacctttgacaacccctgattttagcatgccttacaacgtaatcacgatcacatgcaccatcttcgcattgtattttggatcattgctaaatgttctacgtagacgaattggtgaagaagaaaggtttctcaaaagccaagcaggaaagaaaacaggtgggcttaagcagttattatcgagaatcacagccaagattagagggagaccaattgaagcaccatcatcatcagaagctgaatcttcggtcttgtctagtaaacttatcttaaaaatcatattagttgcaggagctgctgcagcgtggcaatatttttccacggacgagtaggcttaaaacttttgaagaaataccagttgtaccatatgtatcaacaaggtaatttttttgggaccgtgtaagatttgctcttatatagtttcaaaattttgc

SEQ ID NO: 131691 - DNA, 660 bp, Arabidopsis thaliana
  unsure (1)..(660): unsure at all n locations
tccacctgcgctagctcccggactttctttcattggtttacctgcaatgggtctacaattctatatgtttgaagtccaaagcaaatgggttgctgcagtcttgtctggacgagttacacttccttcggtagatgaaatgatggacgatcttaagttgtcgtatgaaacacaagaagcgttaggtattcccaaaagatatacacataagttgggtaaatctcagtgtgagtacctcgattggttcgcagacctgtgtggattcccacatgttgaacattggagagatcaagaagtaactcgcggttaccagagacttggtaatcaaccagaaactttccgtgatgaatgggatgatgatgatctcatggaagaagcatacgaagattttcctagactaaatctgatcaattttcatccttctcgttttctcgaatccggaagatgaagtttgactacgattgtaattgtgtctacttgtttggatttaaagtacattgcattataaaaattaatgtgtgagtaaataggtttataaggggtggtgaagggccttctttgggctaggggttccaatgttgttccggtcccccgggaattagnctccatggggggnctaggaaccttttcgcttttttagggcccacnntgttaagggttnaa

SEQ ID NO: 131692 - DNA, 487 bp, Arabidopsis thaliana
gaaaaagagagaaaatgggattccgtgggaagtacttcttcccaattctcatgactctatcgttatttctaataatcagatacaactacatagtctccgatgatcctcctctccggcaagaactccccggtcgccgatcagcttcttccggagatgacatcacatataccgtcaagactccgtcaaagaagacaaagagactgtttcacacggcggtgacagccacggattccgtgtacagcacgtggcagtgtcgggtcatgtattattggtacaacaggttcagggacgaacccgggtcggatatgggcgggtatacccggatcttgcattcgggtcgacccgatggactcatggatgagatccctactttcgttgctgaccctcttccctccggggttgacaagggatatgttgttctaaataggccttgggcctttgttcaatggcttcaacaagcacatatagaggaagattacattctcat

SEQ ID NO: 131693 - DNA, 601 bp, Arabidopsis thaliana
ctatatttgatcttcttgaactctttctctcttctcacaaatggcgtctacgcaatatggttgtgaacatcaaggcggcatggagattatcaacgatgagcttatcttgtcgtttttggaagaagaatcgcccgtcgaaaatcatagtagcatcaacaaagaggaagaagagaaactaaaccgtgtgattaggtcgctagaagtggagatcaacatgagttctccaaccatagaagctaggaaaatgaatatgcaacagacgatatccggtcttgaagatgattttgggtggcttaacgactttgatattggtatgatttcgttgcaaaatgatgatgagatgatgaattggtgtacggaactttcttacatggatggtgtggtagatagtggtgttcttgagattgaaggtggtgattattattctcatattaactatgcactcacatttgaggaaccaactctttctctatggcaagagaataatgatgtagttatgtattgattgatttcgtgaagtcataatataacaaaggctgtttcgtaatccgttaacccccaaaaaaagaaggaataagaggctgtttcattaatctttaac

SEQ ID NO: 131694 - DNA, 412 bp, Arabidopsis thaliana
ccttgtatagctgccattggattcagtggtacacaagtttggagaaccgaaggatttatcactgctgaagaccttgcatccagggtagagaaagcgtggttaggacttcatatccaggaaacaactgcaagtatcttttcagcagcacttgcatcacagaactcagagacacctgtttctagtgcttcgagtgttgtcttgcctcccggaagtgttcctttagatgcagcgggtgcatcttcatcgacggcttctagtgttcaaccctcagagacaaagtcaaacggtaacatctgcatctacaacagaaaacaatgatggcacagctgcactttagggcaaagaatctgttgtacccactattttgtgtgatactactaaaaaccattccgttccctctgtttttggatct

SEQ ID NO: 131695 - DNA, 428 bp, Arabidopsis thaliana
atcgaaacagacacagatatcatcagaacgaagaacttcagccaaaatctgatttttctctgtttcacgacaagaaatcgaattaacgaaatctaatgaaaccttcaaaatcgcatcacaaggagaaaaccgctcgtcggagagaggagaaactagaggaatccgataatccaaaatacagagatcgtgctaaagaaagaagagagaatcaaaatcctgattatgatccatcagagcttagttctttccatgccgttgctcctcccggagctgtcgatatccgtgctgctgatgcacttaagatatctattgagaaccagcaaatatcttgggggtgatgttgaacatacccatttagttaagggtttggattatgctttgttgaataaagtacgaagcgaaatcgttaagaaacctgatggtgaaaa

SEQ ID NO: 131696 - DNA, 696 bp, Arabidopsis thaliana
gaagctaattgacaagtatgatctctacggtcaagttgcgtaccctaaacatcacaaacaatcagatgttccagacatatatcgcctagctgcaaagtcaaagggtgttttcatcaatccagctatcattgaaccatttggacttactctaattgaggctgcagctcatggtttacctatggttgctacaaaaaatggtggtcctgtagatattcaccgggtcctggataatggccttcttgtggatcctcatgatcagcagtctatttctgaagctcttcttaagcttgttgctgataagcacctatgggcaaagtgtcggcaaaacggggtttgaagaacattcaccaattctctttggccagagcactgcaaaacttatctatctcgcataaccagcttcaaaccaagacatccacagtggcaaagtgatgatggcggtgataattcagaacccgagtcacccagtgattctttgagggatatacaggatatatccttgaacttaaagttttcatttgatggaagtgggaatgataattacatgaaccaagaagggagctccatggataggaagagcaaaatcgaagctgctgtccaaaattggtctaaaggcaaagatagccgcaaaatgggatcactggagaggtagagggtaactctggaaattcccagcagtgccgagaaggaagttta

SEQ ID NO: 131697 - DNA, 549 bp, Arabidopsis thaliana
  unsure (1)..(549): unsure at all n locations
ctataaacaagacaagacctcgcaaagctcaaaccttttccttctttttttctatcaagttcctcacttctcggatccgggtcctaaatctgggtcaaccctttttacgatcatcggaaatggaccctccactagtgaacgattcctccttctctgcagctaatccttcttcttacactctctccgagatttggcctttccctgtaaacgacgccgttcgctctggtctccgtttagctgttaactccggtcgagtctttactcgctctgaacattccggcaataaagacgtctccgcggctgaggaatctacagtcaccgatctaactgctggctggggaagtagaaagactagagatttgaactctgaggatgattcttcaaagatggtttcttccagcagcagtggtaatgaattgaaagaatcaggggataagaaaagcaaaactgtgtggatctgaagtggaaatgnagatgngntcgatgagnacctgaagggngaaacaagttcnaggtggtggtngtancaaagnaaacggtncagnngat

SEQ ID NO: 131698 - DNA, 559 bp, Arabidopsis thaliana
cctcagaatgtgtttggagtgaatagccaagaaggtgcctcgatcaatgaccaagggttaagtggttgtgattttgatcagctacaatgcatggctaatcagaacttaaatgaaaatggaaacggatcattcagcaacgtcaatacatctgtctcgaataagagaaaaggtgggcatcgtgcatcaagagcagtttgaagcatcgatcaagcttgtactatctatttccaccagcatagatattgtattccaaataagttgtagagttcagctgcaggatcagcttcgctcaggttcctttgtatcctcatttttgttttttgttttctgactctctttcccttccattgtatttccttgttgagcttgacaaactagaaggatgatatattgttaatacaacaaactcaaatgttctgtgtgttaaaaaaaaaaaaaaaatagaaattaaaatatttaaaaaaatatataatataataaataaaaatataaaaattaaaaaatttaattatataattaaaaattaaatttaaatttataataaggggggggccgtttt

SEQ ID NO: 131699 - DNA, 549 bp, Arabidopsis thaliana
gagtggttgtgagaggtacacgtatgattctgaagctaaaaatgagattaatatatgaaggaccgactctctgaagcgaaaccgtagacgcgggaggctttttggaaaatggaggtggaggaagccaagatcttgctcggctttcctcctaattctcgtcccgatccttctcacgttaaagctgcttacaggaagaaagtatgggaatcacatcctgacttatttcctgatgatcagaagcttgttgccgagtctaagttcaaatcgatatctgaagcttattcttgcctagagtctggtaattctctctcagattgaacccttttccttgtttgtcagagaatctttggtctgcacaaacccaaatgagctagtaggtgctacttgtgggtgaactttcctgatgaatgcatacggtgaaatttttaaccactgcatgaggaactaaatcccgatagctttgacgaacgttaaagtgtttatttttcctatcttttgcctgtcttcatttttgcacgagatgttctgaaactgaatgtaggccagtgc

SEQ ID NO: 131700 - DNA, 788 bp, Arabidopsis thaliana
cactatacgactctcttagggaaagctggtacgcctgcaggtaccggtccggaattcccgggtcgacccacgcgtccgtacggctgcgagaagacgacagaaggggagacgcgggaagctttttggaaaatggaggtggaggaagccaagatcttgctcggctttcctcctaattctcgtcccgatccttctcaggttaaagctgcttacaggaagaaagtatgggaatcacatcctgacttatttcctgatgatcagaagcttgttgccgagtctaagttcaaatcgatatctgaagcttattcttgcctagagcctggtgatgttaaaggtcaatggtattacagagcaggtgtgtattcgagggtcgtcaagactggggttcctcggccatattcatctgccaaaaagaggtaaccgttggttgatcggtgcacctttccttttgattgtcttaggaaccatcggacttggtggaatcaaagctaacagggcatataatttgcaaaaacagacgttcccatctcacaattctttccttccttgattcaaagtctctttcaacacaacactttgaatcattggatatgtaacctttgtattgtacgaatgaatctacttggacctttgttaagaaacttgtatctcaggatcgatagctttatttaaaatttagcgattatagaaaaaaaaaaaaaaacaaaaacccccaaagcggccgctctagaggatccaagcttacgtacgcgtgcaggcgacgtcaagctacttctatagtgcgtcctaaa

SEQ ID NO: 131701 - DNA, 401 bp, Arabidopsis thaliana
  unsure (1)..(401): unsure at all n locations
gagacgcgggaagctttttggaaaatggaggtggaggaagccaagatctcgctcggctttcctcctaattctcgtcccgatccttctcaggttaaagctgcttacaggaagaaagtatgggaatcacatcctgacttatttcctgatgatcagaagcttgttgccgagtctaagttcaaatcgatatctgaagcttattcttgcctagagtctgatttgactcctttggagctattgttgttggaattggaagtatgagaataaaatctagctcatttgggtttacaagtctgcagaatcaggacacgtntactctgtttttatatacttcgatacattccataaccattatctctagtacaatatcaagctttgtaatttccaacattggtctctgtttg

SEQ ID NO: 131702 - DNA, 534 bp, Arabidopsis thaliana
  unsure (1)..(534): unsure at all n locations
aaattcttttgtctctctgtatcatccaaaattcccagatttattcacggagttagaagaagaagatgaggagagttttcggcgcgaaaaagaacacagagcctcctccgtccattcaggatgcctctgatcggataaataaaagaggagattcggtagaagataagataaagaagcttgatgttgagctctgcaaatacaaagaacagctcaaaaagaccagacctggtcctgctcaagaagctgtcaaagctcgtgctatgcgagttctcaagcagaagaaaatgtatgaaggacaacgcgacatgctctataatcagacattcaatctcgttcaagtttcattcgccgctgaaggactcaaaagatgctcaacaaacctatggcagcactaaaatcttgcggacaaaggaggttataagggattttggaaacccgtcaaggtncaaggtnttggttaattttccaanccggggttnttggcncttattgggtgttagtntcttaaatcnatgntccccttggtngggcnca

SEQ ID NO: 131703 - DNA, 549 bp, Arabidopsis thaliana
gctcaaagtgcaagtcttggtatgaaagactcatggggacctcttaaggctttggcggttgctagtgcaataaacggtgttggtgatgtggtcttatgcacctttctaggatatggtatagcaggtgcagcttgggcaactatggtgtcacaagttgttgctgcttatatgatgatggacgcattgaacaagaaaggatacagcgcattctcattctgtgttccttctccaagtgaacttttgacgatttttggactcgctgcccctgtctttataactatgatgtcaaaggttttgttctatacgctccttgtgtactttgctacatcaatgggtacaaatatcatagctgctcatcaggttatgcttcagatatataccatgagtacggtttggggggagcctctttctcaaactgcacagtcctttatgcctgagcttttattcggaatcaaatcggaatttgccctaaagctagggggcttctgaagtcactagttatcatcggagctacgctaggaatagtagtcggaaccattggcacagcag

SEQ ID NO: 131704 - DNA, 444 bp, Arabidopsis thaliana
  unsure (1)..(444): unsure at all n locations
cctacaaggggagganttagagaaaacagattggtcaaaagctcctttcaccgcttattacagaaactacaatgtcgagggatgtgtatgggttaatggaaaggcagggtgtcccgcaaattcccaatggttcactcaaaaactcgattcgaatggccagacaagaatgaaaggggtacagagtaaatacatggtttacaactattgctccgataaaaaaaggtttcctcgaggtgttcctccagagtgcagctaaatgattgattctttgattcataaataagttacttgacgttgtctttgtaactcaatggttcttcttatctataattttccaattcatttgctaccaaatatatgcgtgtttgtgtaagatcttttttacaatgaacaattaattcttccaatctattatatttatcattttttcttcttcttcttttc

SEQ ID NO: 131705 - DNA, 519 bp, Arabidopsis thaliana
acttcgcaactaaaactcaaaacaatcaaagaaaaaccctaaaagaaaatctctatatcgaagatgggagttttgaagagaagagtatcgagcagcagaggacttggtggtgttcttagagagcaaagagctaagctttacatcatcaaacgatgtgttgttatgctcctatgttggcaagattgatcttggttgattcaagtgttgatactttgatgcttaaccggatcaaagcgatgattgcaacttgcaagaagatacgaaggcggaaaccggcttgggttttgcttgcaagaggatatgaaagaggaaactggtttgagttttgcaagaagatagacaatcgtaggaggatggaagttgaacactttcgatatggatatatgtttagtttttggaggatatatatgtaaatatacgaataaaagtttgggatgaattttgtaatggcttttgccttataagttccatagaattctctgtgtaaattcaactatatatctcacacataatctaacc

SEQ ID NO: 131706 - DNA, 739 bp, Arabidopsis thaliana
tcttgctcctcaatagcgaaagcttacgtgtccgaagaaacgcgattatgtcaagactctgtttcggtacacgacgacggcgacgacggcgtcgggattctctcaatttgtgggatacttggtgagtcaatggcttgagaaaagcgggttttatgatgattctccagaaactcaacgagtttgaaacgagttcttgttcgtcttctcttcacttcccctgttcttttcgtactctttacgtggcccaatttattttccttaaaagtggtagaattgtttgattttgaccccaagaaaaaaaactttttttgtgtgctagacttggctctctttcaagttagttttggatcaaacacttgttgttgctgagaaggttccgtgaacaagaattctgtaacatgttctagtgccaaaaataaccagttcataaggttttatagtgcatgttaattaataaatgttgttaccttaaaaaaaaaaaaaaaaaaaaaaaaaaaaaaaaaaaaaaaaaaaaaaaaaaaaaaaaaaaaaaaaaaaaaaaaaaaaaaaaaaaaaaaaaaaaaaaaaaaaaaaaaaaaaaaaaaaataaaaaaaaaaaaggggggggccgttttaaaggatccaagtttacgtccccgtgcttgcaaggtattagttttttttttgggccccctaattcaaattcatgggccggggttttaaaacgtggggcctggaaaaaccctgggtttccccaatt

SEQ ID NO: 131707 - DNA, 790 bp, Arabidopsis thaliana
  unsure (1)..(790): unsure at all n locations
gcagctcggatatttctcaaaggtgcatgcctgatggccgtcagttgtgatctaataacaaaaccgattttcatggtgaaaaatgcgagtgcaatccaatgattggatccgtctatatttggaacttgcagttggtgtacgttatcagcagacttcagagagtgatctgtccaagttgcaggttctgaaagtggcaatagaaactaaggaagaagatgtgcagccaccgaataggagactcaagtccaaaagtctacatgtctacataacgtttaagggcttggccaaggctcctattggtgatgagattggtgagcatgttgaacgcaaagctatagttcgaagagtcattgatgagcgttcaggacacttgacgcttctcggtgggttttccaatgcgaaaaatgatttgaatcagtcctctgacgatgagcagccttttggaaagcgacgtcgcatatagctgagatgataaactaaagttatcgtgttaagtgcatttgtttctgtggggtgtttttgtaagtctactgtttctgaatacaatgaagttaatttatcttatgaatatactgtgactgtgtgcgcaaattaatagggagctatttttaacttcgcttagaacatcaagggacttgtatgtcactaaatccttttgactttttcatttttgctttgaagttcccttaattgaatcaaaaaaaaaaaaaaaagggcggccgctctagaggatccaagcttacgtacgcgtgcatgcgacgtcatagtntatctatagtgtcgtctcaat

SEQ ID NO: 131708 - DNA, 442 bp, Arabidopsis thaliana
ctagggttttgttatcaaagttttcgtttttttttggggcgtagaaagggtttatggtgatgaaacgaatatttcgtggactagagtttcagatctgggctcttcacccagaatttgaagaaacaacccttggctgtctgagtaaatcctttttcgcccactataatgaaagtttttgttttggtgttccctttgaattgcctatgatgataaaaacaattatcttagcggatttcagtgaggtttttttaaaatcaatgatctgaattgttacacacactgaggctttattagtttgatttgtttttgtttattggggaaatttggtttgcgatgatgataaaatagcacgaaggtgcgtgaagggcagtggacaaagcaatgaaaatttgttttgccgtgagctctctttaataaacgacttctccttccactgagcatt

SEQ ID NO: 131709 - DNA, 552 bp, Arabidopsis thaliana
  unsure (1)..(552): unsure at all n locations
gttttgttcgtcaaatataatcaattttaaatttcttctcttctcttcaaacgaatcgcctttttcgataatctctttgcatcgatttcatcatggctactcaaacggatctcgctcagcccaagcttgatatgaccaaggaggagaaagagaggttgaagtatttgcaattcgtgcaagctgctgctgtggaagctctgcttcgctttgctcttatttacgctaaggcaaaggacaagtctggtcctttgaaacctggtgttgaatctgttgaaggagctgtcaagactgtccgttggtcctgtctacgagaaataccacggcgtccctgttgaggtccttaaatacatggaccagaaggttgatatgtctgtgactgagcttgaccgtcgtgtcccaccagtcgtcaagcaagtgtctgcccaagccatctccggtgctcagatagcacccattgtggcacgggcgtggcccctgagggctcgtcgggctgggtttttttaacccgttttggatggtnaancggntnctcaaggacggccttntntaagg

SEQ ID NO: 131710 - DNA, 438 bp, Arabidopsis thaliana
gacgactggagcaaattccggacacaaagatctcaaattttgacgctttatcaaatttcttacttcacccataaaaatctgagtttttagacttcaacaggacagatctttctcctctttccagatcctaaaatcttcatctcctacagatctgcagaaatggcggttacgtactgattcagatacgggagaagaaaaagaagaaagctttctgctttaacttttcccattactgtaatggcggatcctctaaacggcaagtccttctttatctggttctcccttttattctccttcactctgcttttcatttcgccggtgtatgccaccgggtctccgggtatcggagatgtttctaccgatgttgctgtgtctgttagcgaaaccaatcgagaagctgttctattgcataatttagaggaactcgttaagaatctg

SEQ ID NO: 131711 - DNA, 919 bp, Arabidopsis thaliana
  unsure (1)..(919): unsure at all n locations
gggaaagctggtacgcctgaggtaccggtccggaattccgggtcgacccacgcgtccgtacggctggagaaganacagaagggtacggctggagaagaaacagaagggtcggctggagaaacnacagaagggtacggctgngagaagacgacagaaggggtccggctgngagaagaagacagaagggtcaggctgcggcaagacgacgatttggagaacgaaattaggtaaacgatggaggagatatttgctctgatagtctcaatgattctcatagttgcggtgattcctttgttcttttggaaacgtcggagagatgctagatcacgggaggaagttgctgaaccaccacaggttcaacctcgtgaaaacgtggcacgtgctggtggtggacggaggatgcgtaggagacctgcagcttctggtgctagctcctctacatccaatgttcaagaaaacggcagtgggagtgaagatgaagatgaagatgaagctggtggaactcaagccagagcatcaaagaagaaagagaagaagcgacaagagcgggaagcacaaagacaagctgaggaagctacacgcgagtcaaggaatacaaaacaagattggtatgcagaaatgcggaggaagaaggatgaagaacgcgaggcagaagagctgaagttggaagaagaagaaaaagcgcgacaagccaaagaagaagaggcagctgcgttagagtttgacaaatggaaaggggaatcttccagttgatgctgaaggtactacaggggaagtgcaaggtggggatcaagatttgctttcagaattttttgattccttaaggaccagaaattttntcccctttaagtnctcntccagattttcatctccgnccncagggttcattaacaggtccccnttttnggggcntttgcgg

SEQ ID NO: 131712 - DNA, 843 bp, Arabidopsis thaliana
  unsure (1)..(843): unsure at all n locations
cgataggttaatcagatctggtgtccagaaagcagggagtccgaaccaatacgaaaaatctggcaacgaacagtttgtgactgaactaagcaaatgggtcttccacgaaaggggccatctgaaggctggtaatcttgtacaccatagggttggagaaacagatgagccagctatatataggataaaggatgacctggaattttctgtagagatatatgagtggtcaggaaagagctgggagccgtatgttgctaacgatgtgcaggttcagttttacatgatgagcccgtatgtgttgaaaaccctgtcaacagacaagaagggtctgtttcatacatctttcaaggttcctgatgtctacggtgtattccagtttaaggttgaatatgaaaagctaggctacactacattatctctttcgaagcagattccggtgcggccttacagacacaatgagtatgagagatttatcccaactgcgtatccttattatggagcctgctttacgacgatggctggtttcttcgtcttcagcttcgtctacctctaccataagtagaatcccttaaatggtggccaagtcccataaagtaagccaaacctccatatttagatgagaaaaaacaactttcgaactagagaccaatatttttgggcagcaaggttttcatatgtttctagttttagccaaacagttgcaaccttctttttgtttcccagatatttctatgttaacgtaactttacacccaaaaaaaaaaaaaagagnnnnnnnnnnnnnnnnnnnnnnnnnnnnnnnnnnnnnnnnnnnnnnnnnnnnnnnnnnnnnnnnnaaaacgaaagc

SEQ ID NO: 131713 - DNA, 406 bp, Arabidopsis thaliana
ggccgggatttactgaaccaccggcgagtcttaatctccgagagccggtaaatcaatcctcttcctcaaatttctagggtttgctcttcgtcggttctttacgcagatttcttcacactggatggaagattggtgaaaccctagctccactgtgtgaggatcaaaacatttgtttaagatgttcatggaggaggcgacaagtaatggtaaaggtacagagcataatcagccaaatggtttggtggaaagggaagcattgaataattggagtgcaggatgtggtgctatggctaattctgcaaatgctagttccagagatagtaagaagatacaaacatatatgcggagaaaacttgggagatcttattctgctaataaatgttcggaaaatgatagaatttccatg

SEQ ID NO: 131714 - DNA, 542 bp, Arabidopsis thaliana
  unsure (1)..(542): unsure at all n locations
caacaagtcgagttcttgtcgatgaaactctctgtcataaatccagaacttgagtgtcatatcgatgatttatccgcaaaacagtttcaggcttacttcacaggtcctccagaaggtgactcgaagcagtcaatcatggcggattttcggtcttttccattacatcagcaaggatctttagattactcagtcataaactcagaccacaccacatctctcggcgctaaagatcatacatcatcaagctgggaaactcactcacagtgtctttacaacagcttgagaaccgattctgtttccaatttcttcagcctcaagtaaaaaaattagggatagcctcattaaaaaaatcgcggttttttgttggtgtcttatccatttatctatcttatctgaaatttgaccccggaaagacagaggaaccaatcccaaagatctttctcaatcttttatnttnaatacaaatntnggggtttanaaattttnccgggggntatttttttntntnggngnagggggaaaaccctttggggnaaaggaat

SEQ ID NO: 131715 - DNA, 454 bp, Arabidopsis thaliana
  unsure (1)..(454): unsure at all n locations
gccccnccccnnttnnggngaatagggccaacccatcaaggggggaacctccctctcagtgtctttccagccagctggggacccgattctgttcccaatttcttcagccctcaagtaaaaaaattagggatagccctccattaaaaaaaatcgccgggtttttgttgttgtcttatcccatttatctatcttatctgaaatttgaacccagaaagacagaggtaaccaatccaaagatctttctcaatctattatcttcatacaaatatagtgattttcatatattccaggggatatgtatatgtgtagaagaaagagaaaaaactcctgtggtcatagcaattcctttttttgtacattgtagaatcacactcttgtggtcgtaacaattatttccttcacaaattacaactacacttgtattaatggagatgccttttggcctggtatcaac

SEQ ID NO: 131716 - DNA, 417 bp, Arabidopsis thaliana
agactttacttccggcatcaccgttggtcattgaagctcataacatggagcttgtacccggttattctggttccaagagcctcagggttaagctagaatggagacagaaagaccttgaagattctgcattcccaaggtacaatgtgtatgcggagaatgtaaagtctactgatctaagaccgaggaaggttctagagaagccgagaagcgaaacagtgtttctcggagtcgctcacggaccatcctattacatagcagaacttggtggtagaactcagacggggaaaggagtccgctttgtgttcaagcctgtgctaaagatggttcatggggcaagctggatttttatttattttacaccatcataatcgtctcatttgatttatttttggtctggcgtcattcacattcataatt

SEQ ID NO: 131717 - DNA, 549 bp, Arabidopsis thaliana
  unsure (1)..(549): unsure at all n locations
attcgctgacaggaaacattgtggctttaaagaaagtgcggtgtgatgttaatgaacgggagagtttaaaatttatggctagagagattctgattttgaggagattggatcatcctaatgtcattaaattggaaggtttggttacttcgaggatgtcgagtagtttatacttggttttccgttatatggatcatgatttagctggtctcgccgctagcccggagataaaattcactgagcaacaggttaaatgctacatgaagcaactactttcagggctcgagcattgccataaccgaggagttctacaccgtgatattaaaggatcaaaccttcttatagatgacggtggagttcttagaataggtgatttcgggcttgcaacgttttttgatgcgagtaagaggcaagagatgacgaatcgggttgttactttatggtacagatcaccagagcttcttcatggtgttgttgagtacagtgtcggagttgatttgtggagtnctggttgcatttaagctgagttattngctgggtagagccgataat

SEQ ID NO: 131718 - DNA, 557 bp, Arabidopsis thaliana
  unsure (1)..(557): unsure at all n locations
gaagtgcagaaagaaggtgttccacacaattgtgttcatgatgcagaagctgcaatgaaacttgtacttgctatactagataatggagcagagacctccgttccactatctaaagagatgttggaagctgagaagtcaaagctctaccttcatagaatcccttgcaatgttccatatgaagagttaaatggagtcgtttccagggatatcccacatgaagttaagccgtcgaaaaaacaagaccgtcactactatagcgcgattgttgtttttaaaagtccagaagaagcaaatcaagcatttgaaaacattgctggagactttggaaaggattcgagggggttgtcacaaaaacagatctttctaggggccgggttcatcaggaccctgggttatatggtgcccctgtgtaaaacgacggccagccatagctggtttccggagtgagncnccccttaggaattcccggtccncatcagnccaagtncggngtcngaaaaacaatcncgccctgggacgggtaaacgggaccctggaannggtccancgggcggggg

SEQ ID NO: 131719 - DNA, 586 bp, Arabidopsis thaliana
  unsure (1)..(586): unsure at all n locations
gaaagtgcagaaagaaggtgttccacacaattgtgttcatgatgcagaagctgcaatgaaacttgtacttgctatactagataatggagcagagacctccgttccactatctaaagagatgttggaagctgagaggtcaaagctctaccttcatagaatcccttgcaatgttccatatgaagagttaaatggagtcgtttccagggatatcccacatgaagttaagccgtcgaaaaaacaagaccgtcactactatagcgcgattgttgtttttaaaagtccagaagaagcaaatcaagcatttgaaaacattgctggagacttttggaaaggattcgagggggttgccaacaaaaacagatctttctagagcccgcgttcatcagaaccctcgattatatgtccccgttcgtaaaatcggccgccaggcatttgcctggggcctgtggccgccctagaggtcccaaggctttcggacggcgtgcatgggacggncaataangncttccantaggggcncccgaaaatncaaagccacnngggncggcnggttttncancngtggtgnccgggggaaacccctggg

SEQ ID NO: 131720 - DNA, 453 bp, Arabidopsis thaliana
  unsure (1)..(453): unsure at all n locations
ccgttntttttnaagnccggggaccatccagccttngaaccnttgctgngccttggaaggttcgagggggttgtcacacaaaccgatctttctgggcccgagttcatcagaccctagattatatgttctcgttcgttaaaatggtcgaagatgatttggttggggaagtcatagcagaggagaataatgcgagttctaagaaacggaagagagaaaatcattctaaagggaccagagatagacgcaggtgtaaaccattgtccagacgaaaacagagaagcaatgtcaaacgaagaagataatatcaaggaaaatcaagaactcaaagcaaaatgataagatgataattggtccggattcttgaaaattgctttcactgtgactctagtttgtgtttggtcatcgttgatgcccttaatgaaccttggatagtattttgccaatttaaaggtt

SEQ ID NO: 131721 - DNA, 422 bp, Arabidopsis thaliana
ggaaaccgttccaaaagaatcattcattgaagctccagtttccatgcttgcttctggggaagacgaaccagtgactccacaagaaggcgattatgcagctaacacacaagaggaacgacatgtttctgcagaaacagaagagaaggtaggagaaacaaaaccaaaagaatcacaaaccaacagaaaagggaaataaccaatgaagttccaagcctggagaattcaaagattgaagaagaactacagaaaaaagatgaagaatctgagaacaccaaagatttgttttcagtagtaaaagaaactgaaccaacattgaaagaacctgcaaggaaatcactatctgaccacatccaaaaagagcctaaaacagaggaagatgagaatgatgatgaagatcatgaacataaagatgattaaacaag

SEQ ID NO: 131722 - DNA, 760 bp, Arabidopsis thaliana
  unsure (1)..(760): unsure at all n locations
aagtttggagcaggttgctcttcctgaaccacgtgatcaaaaggggggtgatgaagactatgcaccaggaactcaaaagaatgtttctggggaagtgatcaggtggaataacgtatctggccctgagaaaattgatgcaaaaaagtatatcgagcttctggaagcagagatcgaagaactcaaccgtcaagtggggagaaaatcagcgaatcagcagaatgaaatcttggagtatctaaaatctctcgaacctcaaaatctcaaggagcttacaagcactgcaggcgaagatgttgccgtagccatgaatacatttgtcaagaggcttctagctgtgtcagaccctaaccaaatgaagacgaatgtgacagagacaagcgcagcggaccttgcaaaattgttgtattggttaatggtagttggatatagcattcgcaatatcgaggttcggtttgatatggaacgcgtgcttggtactcaaccgaagcttgcagagctgcctcctggtgaaattatttgagcactgtaatgaataaaagcgggggcttttttttacccgaagaactcagatttcatttgtcaagtaatttttattgtaaaattgatggaactcacttttaagagaagacggtattggctgtttgcaattagatcacagattttgattcagactaaaaaaaaaaaaaaaaagnnnnnnnnnnnnnnnnnnnnnnnnnnnnnnnnnnnnnnnnnnnnnnnnnnnnnnnnnnnnnnnnnnnnn

SEQ ID NO: 131723 - DNA, 484 bp, Arabidopsis thaliana
  unsure (1)..(484): unsure at all n locations
ccaactgtatttggtcggcgaagtctatgctacttactatgcgatcaaccagatgcagcactacgcgacgcaatgcaagcgcagtgtgtgtatccggattggccaacagctttctacatgcagtctgtggcattagcgaagctgaacatgaacacagacgcagccgatatgttgaacgaagcagctcagctcgaagaaaagagacaacgaggcggcagaggatcttgattcttgagacacaaagtgttacatcttgttgtaaaatttgatgagcttcaagaattctttttaagaagaagagaaagaaaaaatacggttaaaaacttgttgctggattgtttgattggggatgtaatgtaaccatagggagagaaaacaattgaatgtttgtttgtatgcaatacatgttgtaagttttaatggtcaaatgtttcgaaaatccanaaaaaaaaaaaaaaattaaaatattataattaataaataa

SEQ ID NO: 131724 - DNA, 696 bp, Arabidopsis thaliana
  unsure (1)..(696): unsure at all n locations
nnnnnnnnnnnnnnnnnnnnnnnnnnnnnnnnnnnnnnnnnnnnnnnnnnnnnnnnnnnnnnnnnnnnnnnnnnnnnnnnnnccacgcgtccgtacggctgcgagaagacaacagaagggggagagagagagagagagatggtgacgaaggagcaagtcgaagcttcattgacttcgaaacttaagccaattcatttcgaagtcattgacatatctggaggttgtggttcgagttttgaagtggaggttgtctctgaacaattcgaagggaagagattgctggagaggcatcgtatggtgaatgctgcgctagaagaagaaatgaaagagattcatgctctctctattaagaaagctcagactccacaacaatggaagccaccatcacaagactctgcaaccttaaccaaagatgcctgaatctctgttttttaaaagccttgtgacaaagaacagagcatttactatgttgatactttgtggttactgtactccgattactgcttttgatgaagtgtaaacacttttttaaaacatatgcaattggttgcaaaatataacaaaaattgggtttttctcaatttagatggagaaannnnnnnnnnnnnnnnnnnnnnnnnnnnnnnnnnnnnnnnnnnnnnnnnnnnnnnnnnnnnnnnnnnnnnnnnnnnnnnnnnnnnnnnnnnnnnnnnnnnn

SEQ ID NO: 131725 - DNA, 934 bp, Arabidopsis thaliana
  unsure (1)..(934): unsure at all n locations
acgactcactttagggaaagctggcacgcctgcaggtaccggtccggaattcccgggtcgacccacgcgtccgtacggctgcgagaagacgacagaagggtacggctgcgagaagacgacagaagggtacggctgcgagaagacgacagaagggtacggctgcgagaagacgacagaagggtacggctgcgagaagacgacagaagggagagatgaagtgtcgagactcatccaagaacttgcagcagctgctgcttatggaaaatgggcttcagagatagctgcaagattgcaatctggtggcctctcttgcaaggtacttgacaaagaagcttttcagaagcaaatgttggagaaactcatttggatttgtgcatttatgcttgttggagctcgtcatccaggtgcaagtgttggcacggtggagaaagaatacagagatgaagtgtcgagactcatccaagaacttgcagcagctgctgccgcggaaaaaggactaacctttgaagagaacatggtggaaagactatgtgcttattcacgagctgtttctcatttcccaactgctgttaaagaatttaaatggaggaatggttggttttattcactctcagagaaggcgattgcggaagggcaaccggatccgtgtcccctccataccgaatggctgaaagagcttaaagtgatatagagccagtctttctcaattgtgagtatctggattaagtatcattcttacatattttaagtagatgatctgaaactagtgccaactgtgtacacgcctgagaagtgaaaaaaagatgtaattttttaataaagaaagagaatcagttcgcgccataataaaaaaaaaaaaaaaaaaaaaagagcggccgctctagaggatccaagcttacgtacgcgtgcatgcgacctcataactctnctatag

SEQ ID NO: 131726 - DNA, 476 bp, Arabidopsis thaliana
  unsure (1)..(476): unsure at all n locations
aaggatcggggtgcgtncgngcccctccaggaacttccgccgctctccncggaaaaggcctacctttggagagaacatggtggaaaggctatgtgcttattcacgagctgtttctcatttcccaactgctgttaaagaatttaaatggaggaatggttggttttattcactctcagagaaggcgattgcggaagggcaaccggatccgtgtcccctccataccgaatggctgaaagagcttaaagtgatatagagccagtctttctaaattgtgagtatctggattaagtatcattcttacatattttaagtagatgatctgaaactagtgtcaactgtgtacacgcctgagaagtgaaaaaaagatgtaattttttaataaagaaagagaatcagttcacgctttgtaaaatgtccagacttttatgtgtaaacttgtgcattttcaagaatcaaaacttttctgcttctagact

SEQ ID NO: 131727 - DNA, 597 bp, Arabidopsis thaliana
  unsure (1)..(597): unsure at all n locations
cttatttgcaaaaactgagaagaggcaaagttataatagtgaagagatcactgttgccttgctgctctggatccatttccgttcacagacggcatttcaggattttgtttggatcccgtaatcatttgtacaaaagcaagaggagttcatttgacagagtccaccctgacgaggtttctggtagaccaaggaaggaacttggcatttgagtttttcagatgcttcttttattctaccaaaggaacaattcacaatggcaacattataacaagctactttcccatctaattatccaagaaacatgtatggattatacagagcaaccaagatgtaacttctggtaccggaatttctatttctcgatcccgggacagtgacagatagtcccccagtatcagattctaaactgttctcattcaaaataagccatttagggtattacaaagaaaatatataataatattaccaagatttnggaggtataggagctttccnggagtggtgaaggntttccaaggtttaggngtggtgcctttttggaggaagaagnaaaggtccaatagggttgccgcctgcttncgngngnttctagcncgg

SEQ ID NO: 131728 - DNA, 514 bp, Arabidopsis thaliana
  unsure (1)..(514): unsure at all n locations
tcaagctttagaattgaagcaagaagtgtcggtttaaattagaacaaaacccgcatcttcgttaggaggcaggcaacctcaagatgttggtcgtcggaagtcgctagtaggcaaagtgttgatccgatgatcttatatattcgacaaagtcgctctctgtcttgacagaccgcttctggtccgaagcttttgatacctgagactgaatctatccattgcaggtcaacatgattattgctaagaacacagcatactcatgtctgtattaatatattgcccataagatagtattaatttatgtagtagttttcatgtttctgtctttgtatcctcctccttcacttgtgtcccatatttgagaacaaacaaagctgtataatcaggtttttcgtatagatgtttttttccgcttgcaaaaaaataaaaaacaaaagaaaaaagggcggccgctctagaaggatccaagcttacgtacgcgtgcatgcgacgtcatagttcttctatagttcacntt

SEQ ID NO: 131729 - DNA, 765 bp, Arabidopsis thaliana
  unsure (1)..(765): unsure at all n locations
cnatttgagaaaaaaaaaaacgatcacgaagatggcgaaagcaagctttattctactcggaactctcttcctcttcggagccatagcttcaattcaggcaaaagaagatctcaaggaggttactcacaaggtttacttcgatgtagagatcgacggcaaatccgctggtcgcgttgttataggactatttggcaaggcagttcctaaaactgcagaaaacttcagagctttgtgcacaggggagaaaggtgtagggaagagtgggaaacctctacactacaagggaagcaagttccatcgaatcattcccagctttatgatccagggaggtgacttcacgcatgggaacggtatgggtggagaatcaatctatggtcagaagtttgctgatgagaacttcaagcttgaagcacactggcccagggggtcctttcaatggcgaactcgggggaagacacaaatggttcgcagttttttatcacaacggtgacaacaagctggttagatggaaggcatgtggtgttttgggaagtggttcaagggatggatgtagtttataagnttnaagcttnagggcaaacaaagcgggactccttaagggcaaagtcgtaatttcagacagttggggaccttcccccnctnagnatngccttttaaagttnccnttccgggttagttntnatctaaacacgnccccaatttttcaaggcccnattgggtccctggccntaaaattcgtttnttncggaacanctttcctnnatc

SEQ ID NO: 131730 - DNA, 534 bp, Arabidopsis thaliana
  unsure (1)..(534): unsure at all n locations
ggaacggtatgggtggagaatcaatctatggtcagaagtttgctgatgagaacttcaagctgaagcacactggaccaggtgtactttcaatggcgaactcgggagaagacacaaatggttcgcagttttttatcacaacggtgacaacaagctggttagatggaaggcatgtggtgtttgggaaagtggtgcaaggaatggatgtagtttataagattgaagctgagggcaaacaaagcggaactcctaagagcaaagtcgtaattgcagacagtggagaacttcctctctaagaatagcattttaaagttactcttacgagttagttgtaatctaaacacgtcccaaatgctacaagaacagaatggtgtcactggactctgaaatttcgttttcttgcgtaacagacttttccatgaaaatagtactcggccgttcctgttaaaaaaaaaaaaaaaaaaaaaaaaaaaaaaaaaaagggcggcagctctagaggatccaagcttacgtacgcgtgcnnnnnnnnnnnngctg

SEQ ID NO: 131731 - DNA, 497 bp, Arabidopsis thaliana
gtccccaaaaagaaacctgatccagccatctacaacttagcagctgaaacccttggagttgatcccccaaaatgtgtagtggttgaagacagcgcgatcgggctagcagctgcaaaagctgcgggaatgacttgtatagttacaaagagtggatacacggctgatgaagatttcgagaacgcagatgcggttttcgactgcattggagaccctccagaagagagatttgatttggcattctgtggaagtcttctccggaacacagttcgttagttaaaaactacaaaccccattaagaaaattgtttctatatcaacattgttgtgtatagtcatttgaacagaacattcatgtaaaacccatatatataatataattcgattataaccttatgaaaaaaaaaaaaaaaaaaaaaaaaaaaaagcggccgctctagaggatccaagcttacgtacgcgtgcatgggacgtcatagcaattctatagtgcgtcctaaa

SEQ ID NO: 131732 - DNA, 727 bp, Arabidopsis thaliana
  unsure (1)..(727): unsure at all n locations
nnnnnnnnnnnnnnnnnnnnnnnnnnnnnnnnnnnnnnnnnnnnnnnnnnnnnnnnnnnnnnnnnnnccacgcgtccgtacggctggagaagacgacagaaggggataatggaaggagttcatagctggacttcacaagcagaagactgagcttttcatggttcttatcgagaaaaagctgcttccgcttcgacccggtgttgcaaagttggttgatcaagctttaacaaacggagtcaaagtagctgtgtgcagtacttcaaatgagaaggcggtttctgctatagtttcatgcttgcttggaccagaacgagcagagaaaatcaagatattcgcaggagacgtagtccccaaaagctgcgggaatgacttgtatagttacaaagagtggatacacggctgatgaagatttcgagaacgcagatgcggttttcgactgcattggagaccctccagaagagagatttgatttggcattctgtggaagtcttctccggaaacagttcgttagttaaaaactacaaaccgcattaagaaaattgtttctatatcaacattgttgtgtatagtcatttgaacagaacattcatgtaaaaccatatatataatataattcggttttcccnnnnnnnnnnnnnnnnnnnnnnnnnnnnnnnnnnnnnnnnnnnnnnnnnnnnnnnnnnnnnnnnnnnnnnnnnnnnnnnnnnnnnnnnnnnnnnnnnnnnnn

SEQ ID NO: 131733 - DNA, 576 bp, Arabidopsis thaliana
gagagagaatcaaaacaatggccactgtgaaaatctctctttccttggcttcgctatcaccatcttcttcttcttcttcaattcaatctaagttatcaccatctttcattcccaatgcggcacctgcaaaggcggtgaggttgcgattcaatggaaagtccctgagagcaaaaccaatggtatacagatcatctcgctccgttggagtcacctgctctgcttcatcttctctgacgactcttccctctgctcttctcttcgattgcgatggcgttcttgttgataccgagaaggacggtcacaggatctccttcaacgacactttcaaagagagagatttgaatgttacgtgggatgttgatttatacggcgagttacttaaaatcggtggtggtaaagaaaggatgactgcgtattttaacaaggttggttggccagagaaagctcctaaagatgaagcagagaggaaagagttcatagctggacttcacaagcagaagactgagcttttcatggttcttatcgagaaaaagctgcttccgcttcgacccggtgttgcaaagttggttgattaag

SEQ ID NO: 131734 - DNA, 1388 bp, Arabidopsis thaliana
  unsure (1)..(1388): unsure at all n locations
acaatattctcaaaaaggggggaagtgaaaagctgagtgatgaagctatcgaagatacgcttgagaaggttgtcaaattgcttgcatacataagtgacaaggatcttttcgctgagttctacaggaagaagctggcccgtagctcttatttgatcgcagtgctaatgatgatcatgagagaagtatcctgacaaagctcaagcaacaatgtggtggacagtttacttctaagatggagggcatggtgacggatttgacactggcaagagaaaaccaaaacagtttcgaggattatctaggcagtaaccctgctgcaaacccagggattgacttgaccgtcactgttcttaccactggtttctggccaagttacaaatcatttgacataaatctacccagtgaaatgatcaagtgtgttgaagtcttcaaagggttttatgaaacgaaaacgaaacacaggaagcttacgtggatctattcactgggaacttgtcacataaacgggaagtttgatcaaaaggccatcgagttaatagtgtctacttaccaggctgctgtgcttctactctttaacacaactgacaagttaagttacactgagatcttggctcaactgaacctaagccatgaagatccttggtagggttccttcattccttgccaatgtgctaggtacaaggtactcctttaggggccaaacaccaagactgtctcccagattgatgcctttgagttcaactccaaatcccccgagggtcggcgcagaatcaagatccctcttcccccagttgatgaaaggaagaaagtcgttgaagatgtcgataaagacagaagatatgcaattgatgctgccattgccaggatcatgaagagcaggaaagtattgggacatcaacaacttgtttctgagtgtgttgagcaacttagccgaatgttcaagcctgatatcaaagcgatcaagaagcgtatggaggatttaataaccagagattatttggagagggacaaggagaatcctaacatgtttaggtacttggcttagggcaaaaaaacaacaactatggaagtggttggctcatgaaaggaatctgcttgtatatttagaagtccatatggagactgtcctaaaacaaatttatcgcttcattttcgctatttttctcttttaaaaaatattcggtctgtgctttttttttgggatgcaaatttgccttgtggatttttgtttcttaaatattgaatggagatggagaaatggcctttnnnnnnnnnnnnnnnnnnnnnnnnnnnnnnnnnnnnnnnnnnnnnnnnnnnnnnnnnnnnnnnnnnnnnnnnnnnnnnnnnnnnnnnnnnnnnnnnnnnnnnnnnnnnnnnnnnnnnnnnnnnnn

SEQ ID NO: 131735 - DNA, 606 bp, Arabidopsis thaliana
  unsure (1)..(606): unsure at all n locations
tcccnggactgcccangctcactggcccnaacagcttncccggtntacccagcnggcgtcccaaggtccatgctgngatnagagatnggccatccnttnggnggancttcttggaggccccatagggttttgagaangaccccnccacgcancctaagccgtgcattatacncgtggaggccntgggttgatgcttggaaggattgcgagtttgcggatctttggcttaatgagatggaagagtaccaccaaagagaaccaagaaggaagctgataacgcaaagtagaaagaaagaagtaagaggtatgttgttacttacccaacacgagtagtgaacttcctttacatcgtgttggctttgtagagccagggatcattagtcttgtggagggctatggagttttttttaatttcattgaattcgttaaatcattcgcaaacactattagtacctatattgaggtcatatggtataataaccctattcgtttgtttatttgttgtgttttgtacctttgatggtattttatttgtataattgatatgtgaatttatgtagcatttctttttaattgatctataatgagcagtagctcaacatattt

SEQ ID NO: 131736 - DNA, 729 bp, Arabidopsis thaliana
ggccagtggacgagcttttcagtgtaatcccggaagatgggaggagaaaagtgtacgcagatgcgatcgcaagggaaagagcagaggaagaagctaaagttgcagctgacaaagctcgagaggcagcagaagcagcgaaagagtttgagaagcaaatgcaaaagctctctgagaaagaagcagaagctgcaagcttagctgaggatgcgcagcagaaagcagatgccgtgggagtcacagtggacggtttatttaacaaggcgaaagatatcagctcaggtctctcctggaataaactcggctctcagttcgcaactgcgattcagaacgcttcagagacgcctaaagtacaggttgctacggtcagaggacaagcaaaagcgagtaacttgccacccaagaaagcagtggtgaagcagagaccatcatctccgtttgcatccaaaccgaaagaagaacgtccgaagaacccggagaaagaggtgaggaaagtgttcggaggattgtttaagcaagagcccatctccatcgacggtgattgaaaaggccatatgcgatgtccttttgaagttccgtacagtttccttttttctctttccttctgtttcaagttaaaattctgtaatcgtatgacaaaattatacataaaaaaccatcattctctccttaaatccaatgatatcccacagggcggccgctctagaggatccaagcttacgtacgcgtgca

SEQ ID NO: 131737 - DNA, 634 bp, Arabidopsis thaliana
  unsure (1)..(634): unsure at all n locations
acccgcggtttaacaggcggnttntttnancgcgcattnccncgtgaccagtttccccgtcggtccgaggntntccaaaacgnnaangtcctnnccggcgcgggnttcncggtgcctgttccgagtgctcgtcaagttctccgatcaactcgttttctacggcaagaatatcgccggaaaactcagttacggatctgttaaagacgtccgtggaatccaagctaaagaagctttcctttggctaccaatcaccgccatggaatcggatccaagctctgccacggttgtgttctccgtcggatttgtgtccaagactttacctgcttccatgttcgaaaatgttccttcttgctcaagaaacctaaatcttcaagactcttgaatccacctgaaacgatctcaagattcaacattccctccaccctttatagttttgtatttcagaagtattttgcttggtttcgtagatataggttcgcaattggaaaagatactatcttaattattcgaatcagatttatgttatactgcccaaagagaagaaagatttaagttttctaaatcaaaaaaaaaaaaaaaaaaagggcggccgctctagaggatccaagcttacgtacgcgtgcatgcgacgtca

SEQ ID NO: 131738 - DNA, 458 bp, Arabidopsis thaliana
  unsure (1)..(458): unsure at all n locations
ggcttctnctttgcttgcactcttctcctgtctcttcctctctctcttatctctctcctcctccctaaatctccgccgtccgatcttctctcaatccaacgacctcgatctcttctcttctctaaatctcgaccgtccatctctcgccgccgatgacatccacgatcttctcccacgctacggattcccgaaaggtcttcttcccaacaacgtcaaatcgtacactatctccgacgacggcgatttcaccgttgacctgatttccagttgctacgtcaagttctccgatcaactcgttttctacggcaagaatatcgccggaaaactcagttacggatctgttaaagacgtccgtgggatccaagcttaaagaagcctttccttttggctaccaatcaaccgccaatggaattcgggtcccaaggttttgccaacggnttggtttttttcggncggng

SEQ ID NO: 131739 - DNA, 570 bp, Arabidopsis thaliana
atttgttaactccaactccaaagtgatcaaagagagaaagagatagagaatcgccatggcaaagatgtcagcactttctatcttcgccatctttatcatcctcgttctggttatctttgaaatacctgagatagaagcacatgatagcgagtgtctgaaagaatatgggggtgatgttgggtttggcttctgtgcgcctaagatatttccgacgatttgttatagaaattgccaaaaggacaagggggctaatggtggaaaatgcctctggggagagggcggtaaagtgaaatgcttatgcgacttctgcagcaatgaatcttttaatcagtttataagtcttacttgaaacttgcatgtgtcgtcgtttgtgtaataagcaaggctaatgatccaagaaataatgtaacaatgaataagtaaaataaagaaccgctaggctttttaggctttctcctattattggaaaaaaaaaaaataaaaaaaaaaaaaaaaaaaagggcggccgctttaaaggatatccagcttacggaagggtgccagccacgttaaaggtcctttaaaagtgcc

SEQ ID NO: 131740 - DNA, 662 bp, Arabidopsis thaliana
  unsure (1)..(662): unsure at all n locations
aaatangacccccacccttgccnatncatgattntcaagntaggaccngttttgngtcgnaggcaacttattttgctgtttggaggagggaagcttccaaattctgctcccttgtgcaccctcaaaggattatggaattcccctcggaaagatccgctgatctgctcgagccatatgttgatccaatagatgacacccaagcgcttgaccaaggtattggagacagccctgtgtcaaatctggaaatcggctttgatggactggtgtgggcataaaatattcgaaaaggcgtccgcagatggaaaccactgaaagctcatacagcttccccgaacatatgggaaagctttcagcttcatcctcattcataaggtcttgtgctgctcaaactcaaagtttagtgaattctttcttctttattcaaacctctatggattgagtttaatagaaagttggccatgagaatgctcggccattgtgttcagatgaatgtatactgctaaaagcattgccagaatctcgacaaaagtcaacaaattattcagtgtctgattttctatgagaaaatgaaatgcagcaatgtcttctgtgactgtnatatatatatatatatatatatatatatatatatcagtgaatcggtgcttcctttttttgaatcg

SEQ ID NO: 131741 - DNA, 492 bp, Arabidopsis thaliana
  unsure (1)..(492): unsure at all n locations
cacttagcattgcgtcaccctctccttgttctattccattgtcggtcacaaaggtctcgcctttaaagagaaagagacctacccacttaaatatccctgacctcaatcctcaacaaccgatttcaactgattacttccgtttcagagagggtgacgcaaaggtctcgcctttaaagagaaagagacctgcccacctaaatatccctgacctcaatcctcaacaaccgattcgaactgattacttcagtttcacagactttgctcaccaaaacggcaccgtaagcttcggtggcaatggtttgggtgtcgtctccagaaacggtaagaagaagtttatggaagatactcacagaattgttccttggttgggtgggtaactccaaaaagagtttctttgggagtttatgatggtcatgggggtgctaaagntgnagaatttgggggtgagaatttgganaaatttttggtgggatgatgggattggggnngggg

SEQ ID NO: 131742 - DNA, 515 bp, Arabidopsis thaliana
  unsure (1)..(515): unsure at all n locations
actgtcaaaccaaaaaaaattgaaaaccctaaattggttgaatgggaaaatcgatggtcagattcgcagaattcgccattagactctcttccgagaatccaaccagaccacacagaccttctccttctccacggaacaaagtcttcgtcaagaagacgacgagagacaccacgtcacacctcgattactccaatctggttaagctggagaaggcgggatcgcactcgggttcgaatcccgctccggcttcgggttcggttcctattaaccgggttcccctcgctcaggtcgtcgaggattgcgtcagacgctggttccaggatacgctcaaggaagccaaatctggtgacgttggtatgcaggtttttggttgggcaagatgtattgccagcggcttatgggatcccttaaagttgaaaacaatgggtcggcttggttaaaaagctttaagactagtctcacttgnaannngtnaaaccncaggntatnaangtnagtccatnaaaaanttggtc

SEQ ID NO: 131743 - DNA, 644 bp, Arabidopsis thaliana
  unsure (1)..(644): unsure at all n locations
gccattagactctnttccgagaatccaaccagaccacacagaccttctccttctccacggaacaaagtnttcgtnaagaagacgacgagagacaccacgtnacacctcgattactccaatctggttaagctggagaaggcgggatcgcactcgggttcgaatcccgctccggcttcgggttcggatcctattaaccgggttcccctcgctcaggtcgtcgaggattgcgtcagacgctggttccaggatacgctcaaggaagccaaatctggtgacgttggtatgcaggtcttggttggtcagatgtattgcagcggctatggaatccctaaagatgaaaacaagggtcgtgcttggattaacaaagcttcaagaactagatcatcaagcttggcaagtgagtgataagcctccagggtataatgcaagcgattcagattccaatgataagaaagattgatgatcatcttttgaatgtttgtattgccattgactttgatttgttagtttctctctcctttgtttaactctacttgatttattcaaatttgaagcttttgtatcatcccaatggtcaaaatgtgcccctcaagttatttattaccaggcagtgaagtaattcaactgtgagtctgttgtagctg

SEQ ID NO: 131744 - DNA, 703 bp, Arabidopsis thaliana
cggagttgcccaaaatgccggagttacctaagatgccggagattcagaaacccgagttgcccaagatgccggagattcagaagcctgagttgccgaaggtgccagaggttccaaagcccgaattgccaacggttccagaggttccaaagtctgaggctcctaagtttccagagattccaaagcctgaactgccgaagattccagaagttccaaaacctgaactgcccaaggttccagaaattacaaaacctgcagttccagagattccaaagccagagctaccgacgatgcctcaacttcccaagttgccggaattcccaaaagttcccggaactccttaagcgaagagaaggcccagctactttgaagcccatcccacaatcttaaagtaccgttttaccgttataccatttgtctatttgcagagatgcacttatgtctgtctacatcattgtttccttagtaaaaaccatgtcgtatggttggtctcatagtcatagttcttgtttttttttgggtaaagactatacacttatacttgtataattgtatcctgttatattttgtattgtttgtttccaaacagatttcgttgtatttgatatactttttaattgattatgttacttatttaaaaaaaaaaaaaaaagggcggccgctttaaaggattccaggttacgtacgcgtgcatgcgacgtcatag

SEQ ID NO: 131745 - DNA, 547 bp, Arabidopsis thaliana
tcttcatcttcatcttcctcctcgcggttccattttgaggagtctctttttgtttcttgaagatagactgggcgtcacggagcagctgagtatatgctacgagtgttgcattccggaggctgttctttcagatgattggcagtagctatattatgcttgaacggtgccataatgggcatctgtctaatgaagcgctgctgctcatggtttcttttgatctcgtttctctctgcactaacgaatgaaaatgaagcaattagtcctgatggtgaggcgcttttgagttttagaaatggagttttggcttctgatggtgttattggtctgtggagaccagaggatcctgatccatgtaactggaaaggagtgacctgtgatgcaaaaacaaaaagagttatagccttgagtcttacttatcacaaattaaggggacctttaccccctgagcttggaaagctggatcagttaaggcttttaatgcttcacaacaatgcgttatatcaatcaatacctgactcattgggaaattgcacggcattagagggaa

SEQ ID NO: 131746 - DNA, 603 bp, Arabidopsis thaliana
tctcttccagctgctggtagattctcagcaacaacattttggccagatatgaagaagtataacgctacatggtatactgctgtgccgaccattcatcagatcatattggaccgccacgcgagccaccctgagacggaatatcctaaactccggttcatcaggagttgcagtgcttctttggctccggtgatattgtccaggcttgaggaagcgtttggagcaccggtgctcgaggcctatgcaatgacagaggcaacacatttgatgagctcaaaccccttaccagaggaaggtccacacaagcctgggtctgttgggaaaccggtaggtcaagaaatggcgatccttaatgagaaaggcgagatccaagagccaaataacaaaggagaggtttgtataagaggtccaaatgtgaccaagggttacaagaataacccagaagccaacaaggcaggtttcgagtttgggtggttccacactggtgatatcggttactttgataccgatgggtatttgcatctggtgggtcggatcaaagagcttattaaccgtggaggtgagaagatatctccaattgaagtggatgcagtactcttaacgcat

SEQ ID NO: 131747 - DNA, 398 bp, Arabidopsis thaliana
cacggcaaaagaatcctggggatacaccatttaaatttctttttgacgagaactgtgcggactacaagtactatgtattcaggctggctgaagaggaaaaattaatttcacaaaccaaggattctggtgtacttcacagtggtgatgcaggctcgcgaacgtccacagcagcaatccctttgcaaaagccagcttatcaacaaacaggatatcagatccctgcctcagctctctatgatactcctgtggaacctggagcttcttctagatctgctcaggcatcaattacaagacccagcgacagtgactcctttagtgggccgaggggtgcagaccctctatcaatgatggagttttacatgaagaaggctgcccaagaagagaaaatgagacgtcct

SEQ ID NO: 131748 - DNA, 962 bp, Arabidopsis thaliana
  unsure (1)..(962): unsure at all n locations
cattagtttggccttctcaccaaccgctttcatttttttgaactatgaccttaaggtcccaaagtttgagttcatgtcacatgcaaaaccgtctttatttgagtacccaaaacccaccacggttcctacagccaataccgccgttaaacttccaaccgctgttctctcaacttcagttaaagccaaagctagggctaagaaagaagcagagcaaaaagctattgctgagaaaacatctggccctgaaaagcctgtcaatgaaagtggatctggaaaaggaaaagcatcaactgagaaggaaggagactctatgcaggtcgatagcccagcagcggtcgagaagaaagcacctgagcctgagccagcgtttgagattttagtgaacccagctcgagtagtcccagctcaagagaaatacataaagttacttgatgacagcagatatgtaccagtgaagctagcaccgtcaggtttcgttcttctcaaagacttgcgtgaacacgagccaaaggttctctctctgaccgacgcaccaacttcaacagcttctcctgcaactggtacagcagcggctgcacaaggaaccccggcctcagctatggccgtagatgatgagccacaacctccacaagcctttgaatacgcttcatgattttatttcatttaaaattagtgggaatttgttgttggttttattggtttctgttgaaagacaaaaggcagagagaaaaacagatctttgaactttgagataactgcttcttgtcatttgcaactggtttcatgttcaactacgatcttgtattaggtacttctctttttaagtattatctaaataattaagggtcatttaagggctaaaaaaaaaaaaaaaaaaaaggccgccgcttctagaggatccaagcttacgtacggcgtccatgcgacgtcaaagctctctatagnnnnnnnnnggaaatcat

SEQ ID NO: 131749 - DNA, 629 bp, Arabidopsis thaliana
  unsure (1)..(629): unsure at all n locations
tttttacntgncgccaccnntggtgctggncngacaangaacaangtggatccccctgggctgcaggaatttctggcacgaaaaaagattaatgaaatggctttgctctcggcgatgaagttgcagggacgtccaccaccgatctcgtccaatctcaacccaaattccaaacctgcaggttcggattccgtttccttaaacgcctccgaacctggctccgaacggaagcctcggaaattcagctcacagctaaaccgctggaacagagcacgaaccttaaggtctggcgcgaagctggacagtacgattactaatggatcaaacaatacgaccggtccgatgcgtccgatcgaaagttcgagtcgcactgatgtttcgacattggacagcgacgtgtcatcatcaagtaacggagttagccgaggcggatatgacggcggcgaagtcgatttacatagcccctgacggaactggattgacggggaaacgcgttaacggtgctttggnnaattgnnaattcttggnaaccgnggttcccggaaaaaaatcnttcaagggttaaatngggaantatngggctaaacaaacnggaaaaaggcatggactacctntnggcacatgggaaacat

SEQ ID NO: 131750 - DNA, 869 bp, Arabidopsis thaliana
  unsure (1)..(869): unsure at all n locations
taggtaccactatagaagagttatgacgtcgcatgcacgcgtacgtaagctcggaattcggctcgagaaaaaaaaaaaggaaaaaagaataaagaaatggctttgctctcggcgatgaagttgcagggacgtccaccaccgatctcgtccaatctcaacccaaattccaaacctgcaggttcggattccgtttccttaaacgcctccgaacctggctccgaacggaagcctcggaaattcagctcacagctaaaccgctggaacagagcacgaaccttaaggtctggcgcgaagctggacagtacgattactaatggatcaaacaatacgaccggtccgatgcgtccgatcgaaagttcgagtcgcactgatgtttcgacattggacagcgacgtgtcatcatcaagtaacggagttagcgaggcggatatgacggcggcgaagtcgatttacatagtctctgacggaactggatggacggcggaacacgccgttaacgctgctttgggacaattcgactattgcttggtcgaccgtggttgtcccgttaatacacatctcttctcagggattgaagatggggagaagttaatggagatcataaagcaagcggcaagagaaggagcaatggtaatctacactttagctgatccatcaatggcagaagcaaccattgagagcttgcaagcttatcggaaaatcccatcattagacattcttgggccattcacagagtaatttcctctacttagggactaanccttccggnttttacgnggatacaaactattttnacgnggttcttnaaagtcgggtttcnttcctttaaaaggggggnccttcccgnattttaaanttaatttnttttc

SEQ ID NO: 131751 - DNA, 668 bp, Arabidopsis thaliana
attataagaaaattggcgctaagctcaaggagttagttccttgtgtgcttctgtctttcgatgatgagcaaatactcatgtggagaggacgagaatggaagtcgcggtttgtagacaatcctctaattccaagcctttctgagaccaacacaacgaacgaacttgatccctcagacaaacctagtgaagaacaaactgtggctaatccaagtacaacgatctcaagccccaaaatgatctcgctctggcaacgagcgttggaatcgtcgaaggctgtgattcttgaagagcttgacctcggtccagacgatctattgaagaaggtggaagagttagaaggccacttcactggctgcagaacacacttacacagctatggtcttgtcaaatactgatggtgcagcagaggattacgtggatgaaaaggaccggtccgaagagtattatagtgacatagacgatgactttgatgacgagtgttccgatgatgagtcgctagatccggttggtccagtgggatctttacccgttgacaagatagttaggaagttgagggaaagactaaaatagagcaaaagtgttactgtattctcatcattgttttgtgtaaatgttgtaaacatacatactaaaaacccaagtgccataacgaagtacttctagagaaa

SEQ ID NO: 131752 - DNA, 461 bp, Arabidopsis thaliana
ctcttgatcatggttcgggccgagatcgaaaccggagctctctttccgttctgttaaagaggctgttactcttttcggcgagagaattcttctcggagataattacatcagcaagtccgtagagagaagcagttgcaaaagcattcaagatgagctggttgaagcaaaggagaatctgaagaaagctgaggaagagaacaaggttttcgctcagcttatcgatagccttacacaagagcttgataccactaaagaaaagcctatccactcactcagaaatttcccagaacaccctcaagtcgaagatgacctcaagtttatagaggaatccacggttaacgaaccggacaacataaccgagatcaagatgaaccggtttgatcgaaatgaagtgtatggtgatcgtctagagaagaggcgttcggtgaagtttgctaacccaccattgttaacgaaggtca

SEQ ID NO: 131753 - DNA, 460 bp, Arabidopsis thaliana
  unsure (1)..(460): unsure at all n locations
cacttnacaacgaatctatgtaatganatgaacaaatttaaaacaaaactacatttatgaatcttgaaggtgttttggttcatgttctttctaaaaacaatctcgngtgtcaagcccaaacccatcgatcttcctctatctcnacaaccttggatctcttaaacaatttcaccaaatggtttcacactaagcaaatcgttagccgagtacttatccgtcttcccagatatcganacgtgtaanacacacaaccctccgggctttaaagtccgttcgatctccccaacgaacttctccgggtaaagcgcgtgatcgaacacgtttgagaattcgaaatcgaatgtctcttcgtcgaacgntgcgcgtggaagtcacctttcaccacgagaggtggtcgcggaaccngatctattccgacgggangtgtgggctnccctggaantncagnccnggaccanna

SEQ ID NO: 131754 - DNA, 458 bp, Arabidopsis thaliana
ggtaatggcattggaccaacatcaccttcttcttcctcttcatcaacagctgaagatttcttctttaattcaatcatctctttgaacttcttcaactcttcttcatcaagttctagctcagtgttcttcaccgtttcgtctacttgcatcttcgaatcttcctcagtaccatcgctgtcactccctgacttcgtcttctctcccttgcttcgttttgaactagaatccgaagatttctttcgcctcttgctcttttgcttggtatcttcttcctccccagacgaagaagcactcatctcagctttactatcttcatcgctgctctcatcagagtcactgtatttcgtctttctcctatgccttagcttttccctaccactacggttgcttctacccctactccctcttagcaaaactcttcctccttcactctctgttttcctttttcctatctcttt

SEQ ID NO: 131755 - DNA, 1240 bp, Arabidopsis thaliana
  unsure (1)..(1240): unsure at all n locations
nnnnnnnnnnnnnnnnnnnnnnnnnnnnnnnnnnnnnnnnnnnnnnnnnnnnnnnnnnngtagattccacgacctctctctctctctctcttcgaaatattcgaagtagagacaaccaatggagacggaaaggaggatcataacgagctgttctgccatgacggctctgttcttgttcatgacggctctaatggcgtcgtcctctatcgcagcaacaccgacacaatcgtttgaagataatttcaacattatgtggtctgaaaatcacttcacgacttccgatgatggagagatctggaatctttccttagataacgacaccggatgtggatttcagacaaagcacatgtatagattcggatggtttagtatgaagctaaagctcgtcggaggcgactccgccggctgtcgtcaccgcttactacatgtgttcggagaatggggcaggaccggagagagacggggtagatttcgaatttctaggggaccgaaccggacagccttacatttttcagacccatgtgtataagaacggaaccgggaatcgggagatgcgacattccctctggttcgacccgaccaaggattatcacacctactcaattctttggaataaccaccagcttgtgttcttcgtggatagggtaccaattcgagtatacaagaacagtgataaggtaccaaacaacgacttcttcccgaaccagaagccgatgtacttgttctccagcatttggaacgctgacgattgggctacacgtggtggtctggagaagactgactggaaaaaagctccattcgtctcttcttacaaggacttcgccgtcgaaggctgccgttggaaggatccattccctgcatgcgtctctaccacaacagagaattggtgggatcagtacgacgcgtggcatttgtccaagacacagaagatggattatgcgtgggtgcagcgtaatctcgtcgtatacgattattgcaaagacagtgagaggttccctactcttccttgggagtgttccattagcccttgggcttaaaatcaattttgttttgagtgtattaaagtggaaatggtttatgtaataattttactctcttttttttggcatttcttattttgttatggactatatcctctgtttatttgcggccgtaattattaatttagtcggatatnnnnnnnnnnnnnnnnnnnnnnnnnnnnnnnnnnnnnnnnnnnnnnnnnnnnnnnnnnnnnnnn

SEQ ID NO: 131756 - DNA, 668 bp, Arabidopsis thaliana
  unsure (1)..(668): unsure at all n locations
tggnggtccncccgnccaagggnttaccaccccnnncaaaatttctttgggaanaaccaaccanncttttgtggccccccgggggaaaaggggtcccaaaatncgnggnatnncaagaaccagttnatnaggntccaaacaaacgncnttcttcccgaaaccagaaacccgatgtacttggtcnccaagcattttggaacgctgacgaattgggctacacgtggtggtctggagaagcctgcctggaaaaaagctccattcgtctcttcttacaaggacttcgccgtcgaaggctcccgttggaaggatccattccctgcatgcgtctctaccccaacagagaattggtgggatcagttcgacgcgtggcatttgtccaagacacagaagatggattatgcgtgggtgcagcgtaatctcgtcgtatacgattattgcaaagacagtgagaggttccctactcttccttgggagtgttccattagcccttgggcttaaaatcaattttgttttgagtgtattaaagtggaaatggtttatgtaataattttactctcttttttttggcatttcttattttaaaaaaaaaaaaaaaaaaaaagnnnnnnnnnnnnnnnnnnnnnnnnnnnnnnnnnnnnnnnnnnnnnnnnnnnnnnnnnnnnnnnnnn

SEQ ID NO: 131757 - DNA, 662 bp, Arabidopsis thaliana
gataattgacaggaagaagaatatctttaaactctcacaaggagagtatgttgcggtggagaacatagaaaacatatacggtgaagtacaagctgttgattccgtgtgggtgtacggtaacagctttgagtccttcctaatagctatcgccaacccaaaccagcatatccttgaacgctgggctgcagaaaacggtgtgagtggtgactatgacgctctctgtcaaaatgaaaaggcaaaggaattcattctcggagaacttgttaaaatggccaaagagaaaaagatgaaagggttcgagatcatcaaggcgattcatcttgacccagtgccatttgacatggaacgagatcttcttacgccgaccttcaaaaagaaaaggcctcagttgctgaaatactaccagagtgtgatcgacgaaatgtacaagaccataaatgcaaaatttgcttccagagggtagattcctcctcactctcggtccttgggtctctcattttgcatgacgaaggactttgttaataggctcttctctcatctgtgtacaatatttgaatatttcatagcatcagatcagtccagagctgctacactgtttttcttttctatctttttttggaaatttacttttatgtactatacttgaatgctatctctttgcc

SEQ ID NO: 131758 - DNA, 561 bp, Arabidopsis thaliana
tttttcccccaagccctccgcgttgacactggagttgtggggaagccttttaagctctggttcagtccatggacggtttagctaatccaacaacaattggtctttgttcacaaagtctaacgggccccgtctcacatatgctttacattggctattctctgcttatggcaaatgcaatcatgctcgccactggaaccattggcttcctcccctccttttacttcgtccactaatctcttttcctctgtcacaatcgattgatcccttgacgacaaaatctcagcccgtgatctctgctttctcttaaagcaattccaggtgttgttatttttttgtcagtactagacttgtagagtccactatattttacatgtttttttttttttcctggacctatattctccttatatgttttttttcttacatctccgcctcattatgtttttgttttgaacttttgagtagaaaataaacaaatttgcctttctgcttaaaaaaaaaaaaaaagggcggccgctctagaggatccaagcttacgtacgcgtgcatgcggcgtcatag

SEQ ID NO: 131759 - DNA, 588 bp, Arabidopsis thaliana
  unsure (1)..(588): unsure at all n locations
ggnaatggaanctccccgtcctgngtacccttannggaattggncnaacccaccgaattggtcccaaagggaatccacccaccttcgaaatgctgagaccatcttctttctgggagcctccagggcccttcaggcaagcggattccgaaacccagccaggagccagtaaaaggaaaagaccggtgcctgagcagcagtatcgagatggtattgtcgatgggatttagctacgcacaggccatggaagcttatagcatttttggggatgacgttgactctatggtctgttatgtactggagacgagctgtggcggcaacaaccgacgcaaaggcaaagccacggaatagagaatgtaacatgaattgctctgtattaatagtatatgatataccaattcgtatccctatcaatggtgggcgattacccttatcagaataatgaaaaataaacttgtgcatccatgacatgatgtatgcaaatgtttgttgtttatgtacttagttgtaaaagttgaataataagagaggaaaaaaggcgcccgcgaattcgatatcaagcttatcgataccgtcgacatcgaggggggg

SEQ ID NO: 131760 - DNA, 544 bp, Arabidopsis thaliana
  unsure (1)..(544): unsure at all n locations
gtttgtggcagagaggttacacatcgatggcaacatctttgcttctcagacattcctcagctgtcttcttctctcagtcttccttcttcaccaagaacaaatcttttcgctcctttacttccatcaaaatggaaaaaggtgaagcagagaatgcagtgaagacaaagaaggtgtttgtcgcaggagcaactggacaaaccgggaagaggattgtggagcagttgttgtcccgtggctttgccgtcaaagctggtgttcgtgatgtagagaaagcaaaaacatctttcaaagacgacccgtctcttcagatagttagagcagacgtgacagaaggtcctgataagctagctgaagttataggtgatgattctcaagctgtgatttgtgctactgggtttcgtcccggatttgatatattcactccttggaaagtcgataatttcgggccagtgaatcttgtggttgcttgcccgtaaacaaggagttggaaaagtttttcccttgaaagccccnntttgggnnaattgggntttccctngggnca

SEQ ID NO: 131761 - DNA, 588 bp, Arabidopsis thaliana
  unsure (1)..(588): unsure at all n locations
gcaanaaggaccccnggctnaagatccccncccgcaaangcnatcaccagcggctcccaccgggtgccaaacatggctgattgttcgccggttgcgactagtggtaggacagctgccaagccgggaggaacatgttggtcagggcttaagactgtggttaggacaggcccagaatgtctatgtgaggctttcaagaacagcggttctcttggtttaactcttgatctttctaaaagctggcttctcttcccttctgtttgtaaagttgctgctcctccttctgctcgttgtggcctttctgtctctggagatcctcctgctactgcccctggtttatctcctacggccggagcaggagcacccgcgttgtccagtggtgcaaatgcggcaactccagtttcgtccccgaggagttccgatgcgtccttgctctctgtatcttttgcatttgtcatcttcatggcactcatttcttctttctattgagtcttaaaatttaattgcttcttgttgagttatttttgtttgctatgtagctgaagagtttggtgttactgatcatatttacctttcatgtgtcaattttaa

SEQ ID NO: 131762 - DNA, 548 bp, Arabidopsis thaliana
  unsure (1)..(548): unsure at all n locations
cggtggtggcactaatgtccggcgagagagctcatgcagcagtggactgctcatcgttgatactaaacatggctgattgtttgtcgtttgtgactagtggtagtacagttgtcaagccggaaggaacatgttgttcagggcttaagactgtggttaggacaggaccagaatgtctatgtgaggctttcaagaacagtggttctcttggtttaactcttgatctttctaaagctgcttctcttccttctgtttgtaaagttgctgctcctccttctgctcgttgtggcctttctgtctctggagatcctcctgctactgcccctgggtttatcctcctacggccggagcaggagcacccgcgtttgtccagtggtgcaaatgcggcaacttccagtttcgtcccccgaggaggttccgatgcgtccttgctctctgtaatcttttggcatttgtcatcttcatggcactcaatttcttccttccaatgaggcttaaaattnaattgcctncttgttgagnaaattttggtttcaatnaagcnaaggggc

SEQ ID NO: 131763 - DNA, 579 bp, Arabidopsis thaliana
ggaggaacaaatgcccaaaggctttgaccaaacgcaagccgtgcagaaagctccagaacgcacaccggctgctggtggaatgcttgtggtaatagtgcattcggctgaggatgttgacagaatgcaccataccagtccttacgtgcacatctatttcataggagaagcgagaacagcaaagcacgttacgaagatcagagacccaaggtggaatgaggagttcacctttatgctcgaggagcctccagtccgtgagaacctgcacgttgaagtgctgagcacctcttccaggatacgtctattgcatcccaaggaaacactggggtatgtggatattccagtggtggacgtggtgagcaacaaaaggatgaatcagaagtttcaccttattgattctaagaacggaaagatccaaatcgagctcgagtggcgaactgcctctcgatttctgagttgattcgagaacaaacaaagagataattggtttgatgttgttaaaaactatgtgttgttgtacaaaatgggctttaactcttaaaaaccaacattcagatttgcagagccttcttttatttggaa

SEQ ID NO: 131764 - DNA, 614 bp, Arabidopsis thaliana
aaaagctgaccttgtgtagcctctgctcagtttttacattgatgaaggtaaaggtgaggcattgaccaaggaactatcacaattgctggagaaacgtggcgttaagtgtttacttgttatctttttgtgggtcttttgtttcttgaagccaaattgtttgtgatgttggtaatgttcttttatcttttcagttggatgtcaagataatttacagttggggaaagaatgtcgatgttataccgcgtggtgcaggaaaaggagaagcgcttgagtatcttctcaagaagctgcaggctgaaggaatattcccggtcaatactcttgcgtgtggtgactctgaacatgatgctgaactatttagcattcctgatgttcacggtgttatggtgagcaattcccaagaagagctattgaagtggcgttctgaaaatgcgttgaacaaccttaaggttatacattcaaccgagaggtgtgctgatgggattattcaagccatcggacattttaatcttggtcccgatctatctccaagagatgtttcggaattcttggatcgtaagatggacaatgtgaattctggtcacgaggttgtgagattctacttgttctacgag

SEQ ID NO: 131765 - DNA, 582 bp, Arabidopsis thaliana
  unsure (1)..(582): unsure at all n locations
gnacnnctgtttgngccccnaaatgcgggatgtcccnaacnccgagtgtccntnngcttnttnccaccaaccgcccgtcatccggaatntttgtgcagtagatatggcatgggtggcccccatcaaaagcaaaggtcgagaaattaaatgtcagaaaattgagcggtgggaccggctccctctttcaaaagtacctgaggagaagacggagttgtctaaaaacaatgcagaaacacctgcagtttctgaaaatgttgagagtcggattgaagcagccagagaacgctttcttgctcgtaaaggacagaaataaatttgatgtctcaaacataaatacaagattcaactagccctataaagaatagaaaagagaagctttctgtagaagatttgttattagagacaattttcaaattttgtatgttctgttttttttttttttttggctcaacttaaacttttctttattctcattccgacatgagttttaaatttttaacccaatttggtatgttncttnagcggcncggcgaattgcgatgatgcaagcttgatgcgatgactcgttcgtaccttcgtagg

SEQ ID NO: 131766 - DNA, 437 bp, Arabidopsis thaliana
acgatcactttcaccagcttcctgttgccccccagtctcatcaccattccccatcgttttcactacccgctgctcatgtgggtgatggtgaagctgactcttcagcagcacgaggcctaccttatgcgcatccatttctttttagtcaccggtctaatcaaaggtcctcaccagcaattaacagttaccaaggaagcagcacccatatgcgtgaacagcatcatgcttataatcatcagaggcaacaacatcatgccaatggtcccactctcgcatcacctctcatctccatgacaagaaggggattaccgccggcgtcacctcccccaccaatgccagatcagaacgttggattcttcatttatccaggtggacaccatgaaccagaaaccgatcaaattcatgcatgggagagagaatgggttccaccatttcct

SEQ ID NO: 131767 - DNA, 451 bp, Arabidopsis thaliana
ggggatatatctccacacactagttctgatgatgataatggggaccatgatagtcttgagaaaaaatctagtaggagtaagaatattgcttatggaaaatgtgatgtcaagccacccaggcttcagagtggcgttcttaggaccaattgcattgattgccttgaccgtacaaatgtagcacaatatgcatacggttgggctgctcttgggcagcagcttcatgtattagggattagagatgttcccgccatagaacttgatgatcccttggctatttcgttaatggggttgtatgagagaatgggtgacacactagctcatcagtatggcggatccgcagcccacaacaaggtattcagtgagagaagaggcctgtggagagcagcaactcagtcacaggagttcttgagaactctacaacgattttataaccacccatatatggatgcag

SEQ ID NO: 131768 - DNA, 771 bp, Arabidopsis thaliana
  unsure (1)..(771): unsure at all n locations
nnnnnnnnnnnnnnnnnnnnnnnnnnnnnnnnnnnnnnnnnnnnnnnncccatctccacctcctctctcttattcaccccgcgtccggaaaattcgagctaagtgtttttataatatatacattctctgatatgggtttctctagagcaaaacgtgtcactgatccacttgcagaagaggttagggctcgtctcgttggatgcagctttagcagcggcagcgaacataccggcgacggaattgaagactacgaagacgacgactcgccttgtctctctgatctagtacaagggttcttggaagatgaagttgatacagttgatgatgagtcatgctggtgtgatcaagattctggttccgactcggattctgactcggaacttggcgagctccctgactttgccgacgatatcgccaagcttctgaggaactctctcagggaagattcatacggacgaacggtgctggtacatgtggcgagagcgatggaaatgttgtcgtctctcggatctcagcccgaacagcgtgccgttttccagcgtaaggtcatgtctcttcttagagaactcggccacaatgcggccatctgcaaaactaaatggaaatcctccggcggactcaccgccggtaaccatgagttcatcgacgtcgtgtatacaccttccgcctcgtctcagtccgtccgtttcatcgtcgatttagatttctcgtcgcgtttcaaatcgcgaggccaacttcacagtacgcgcgtgtgcttcaatcgctttcggc

SEQ ID NO: 131769 - DNA, 433 bp, Arabidopsis thaliana
atatattctctgtctttttttgtggcaaaagtaaatggcgagaagacaactcttttaccatcgaatgttcttggttttagctcggctctatctcatgatctcatggaagcctctcctaatcactgcaagacctgagaaatcaacagactttgaaaccaagggacaggaattgaatcgtcagattagccatctgggacgtattgaaaatgatcctgagagaagaaaagggacaaggaggatgatgaccgttgaggatattaacgattatccaggatccggtgctaacaaccgccacactcctcactgttctgattgctaattccattttcctgtaatctagcttctataaaatggtaataatcaaatcacttttatatgatatgtatcaagatttaaaaatcatgggggagtcttaataattgaatcttattct

SEQ ID NO: 131770 - DNA, 595 bp, Arabidopsis thaliana
  unsure (1)..(595): unsure at all n locations
tcgtgctcaaaagccctaaaatcccaattgagaaaatttagacgctcaaggttttgtttacatcttgtccggtggctcgaagcaaattcaacttctgcgtactgtgtctctgttgaatcatggatccagcgcccgaacccgttacttacgtctgcggagatttggtcaagagaacactttgaagtctggggatgttacgtctgcggagattgtggtcaagagaacactttgaagtctggggatgtgatccaatgcagagagtgtgggtaccgtattccnctacaagaagcgtacccgtagagttgttcaatacgaagctcgctgagaactactactcctgaaggtggttcatagtctgttaagatgggttgagactttttggcactgtttgtgatatatatatcgacatggtgattgctacattgccagttcgatttgatttggtcacagtgtgactgtgtaatgactttaccgttttgatagatgtaattcttggaataactaagttcacattgctataatccttgattggctataatctctcgttgttttgctacctttgttctttagtgtactctgcatttagttaaaaaaa

SEQ ID NO: 131771 - DNA, 442 bp, Arabidopsis thaliana
  unsure (1)..(442): unsure at all n locations
agaaaatttagacgctcaaggttttgtttacatcttgtccggtggctcgaagcaaattcaacttctgcgtactgtgtctttgttgaatcatggatccagcgcccgaacccgttacttacgtctgcggagattgtggtcaagagaacactttgaagtctggggatgtgatccaatgcagagagtgtgggtaccgtattctctacaagaagcgtacccgtagagttgttcaatacgaagctcgctgagaactactactcctgaaggtggttcatagtcttgttaagatgggttgagactttttggcacttgtttgtgatatatatatcgncatggtgattgctacattgccagttcgatttgatttgggcacagtgtgactgtgtaatgacttanccgttttgatagntgaaatccttgggataactaaggtcacaattgcttt

SEQ ID NO: 131772 - DNA, 591 bp, Arabidopsis thaliana
cgcctgcggtaccggtctcggattcccgggtcgacccacgcgtccggaaagcatcactctttttcgtcttctctcgaaaatggcggacaatggtaaagtcacgatcaatctctgctaaccttatttgatttccctgtttcctcattttctttcgggcgacattgatttgacgcagattctctagatcagtttttggctgccgccattgatgccgctaaaaaagctggacagatcattcgtaaagggttttacgagactaaacatgttgaacacaaaagccaggtggatttggtgacagagactgataaaggatgtgaagaacttgtgtttaatcatctcaagcagctctttcccaatcacaagttcataggagaagaaactacagctgcatttggtgtgacagaactaactgacgaaccaacttggattgttgatcctcttgatggaacaaccaatttcgttcacgggttccctttcgtgtgtgtttccattggacttacgattgggaaagtccctgttgttggagttgtttataatcctataatggatgagctatttaccgttgtacaagggaaagggagcttcttgaat

SEQ ID NO: 131773 - DNA, 385 bp, Arabidopsis thaliana
aagaaaaccaggcagagtttcttcagttagtaaatgagccctatgagggttctgacggggagggggacatgttcgatcaacccgagcaagaaatgccacatgccattaacgttaccccagcagaacaagaagcgattcaacggctcgaggcaatgggatttgatagagccttagtaatagaagcgttcctcgcatgtgaccgaaatgaagaattggcagctaactatctattggagaactcaggtgactttgaagactgagttcacaaaacgttatctcttcttcgaaaaagttttggctcttttcttacgttgaattacatatcttccgtgaattaatgtgtgggatttgatctctctttctctgcgacttaatttgtcctttt

SEQ ID NO: 131774 - DNA, 654 bp, Arabidopsis thaliana
  unsure (1)..(654): unsure at all n locations
gatgaagtacagatgaatgctccataaaccctactcttcttcttttacctccagcttcgattataccattccttgtttgtgaaggcattttagttggtaaggatgataactggatacagcacgccaagtgacatgttctaatgagctctcgggcattcaagtcatcatcatatagagctgcagcaggacagactcaacattatcttgctcgaagttcattgcctgtcgtaaagaactcgtggggatcaccaccttcacctttcaatgagcttccgagagtgtcaagaggtgtgcctctgtcatatctctcagcctcgtcttctctgcttctgaatggagaacaaggtagtctatctggtacattacctgtgttacctgtccgcaggaaaaactcttttgactccacgggcgtcaaaagatgtaccttcctagcttccgattttcccccgatggcccagaagccacaattggtggtgggagactttgggtttcctgcctttacctaatgccccttgaattgaaactttggggtgaaggcccggtcccgtttaccaattttcacccagtcctagnaggntttgnattnttacccncccnttttttggggcannggaggttcnaaggtggtccnaanggtancttttttanggttct

SEQ ID NO: 131775 - DNA, 587 bp, Arabidopsis thaliana
  unsure (1)..(587): unsure at all n locations
agctcntatacgactcactatatgggaaagctggttccccctgcaggtcccggcccgaatttcccggtccgaccaccccgtccgcctttttttttgatatatcttcgccatttctcgtcgaaattagggattttgttcattaaatcttcctgatttggaaggtattttcattgtctgcttgaaaaaaattcaatctttgtcggttcattatgagtaattggagaagacaaaaacccagaaacaacaacagcaataattatagtcgtcaacgagggacgacgatgacgcaatcatcatcaaagccacctcttgctaattgcaagatctctgttccagcgtgggagaaggatttttgtgctgtgattggttcagttccatggtggaaagttgtagaggccaagcggtttatgcacatatacgatagagtggtccaatgggacgactcagctggtgaagacgcattcaagaacgctaaatctcgtttctgggcagagataaatggtttaacttgtgacttatctttgcctgatcctgatgtttacattgatgatgttgattgggatgctgaagttgacaatgagttgata

SEQ ID NO: 131776 - DNA, 833 bp, Arabidopsis thaliana
tggccgtttgcggtaccggtccggaattcccgggtcgacccacgcgtccgaacaaaagaaaaaacaaaaaagaagagaaaaatggagaattctcagagtcagggtaaaaacaagaagaagaggctaacacaagatcaagttagacaactggagaagtgcttcactatgaacaagaagcttgagccagatctgaaacttcaactgtcgaaccagcttggtctacctcaaagacaagtcgctgtctggttccaaaacaagcgagccaggttcaagactcagtctcttgaggtccaacactgcactcttcagtccaagcacgaagcagctctctccgacaaggcaaagttagagcatcaagtgcagtttctccaagatgagctgaagagagcaaggaatcagcttgctctgttcacaaatcaagattctcctgttgataattctaatcttggttcttgtgatgaagatcatgatgatcaagtggtggtattcgacgagctttacgcttgctttgttagcaatggacatggatcttcatcaacctcatgggtctgattctgtttcgacgcagacaagattccaatatatatagtcttgtctctgttttgtttcgtttgatctgtttctctttgtctgaatagatttaaaatttgtaattaaagtcattcagacattcactaatacaaagagatgattttcttcaaaaaaaaaaaaaaaaaaggggcgggccgctttaagaaggaacccaagctttaccgtaccgcgttgccatgtgcgaacgtcaattaagcttctttcctaataagggggccaacccttaaaaatttcaaatttca

SEQ ID NO: 131777 - DNA, 808 bp, Arabidopsis thaliana
  unsure (1)..(808): unsure at all n locations
agttatgcaagatttcaggttagagttcttgagtgcagtgataggtttagggagatcttcatcaagagggatgttcatagattcttgctacagtcactgccaaaccgagacacaaacttcatggttctggcaagattctccaattctaaaccgaacgacaatagcaaaagctgttggagattgggtttatgacagaacattgtttcagaagatagattgtccttacccttgtaaccctacttgccaccacagggttttcactcctctagatgctcctccaatttaagtgattctaccatatacagtatagatttattattattttgaaaagaaaatttgcttataaatgattcatttgttagatacatatagtgaaatattcctagggtttagctatagaagatgaaaaagaaaaagagtgtgattaattcttgagtgttgagaataagcaataggagtaattttcttcagcacttgtcttgtgtgctgtttaaattgctctgtttctcttctattctgatgtaaaatgcaaattgttacctttatcctatcaaataaagtataattcttttctcaaaaaaaaaaaaaaaaaaagaaaaaaaaaaaaaaaaaaaaaaaaaaaaaaaaaaaaaaaaaaaaaaaaaaaaaaaaaagggnggacaatataaataatccaaaacttactaacccgttcaagcgatccaataagctttttaaaaatgccacttaatttcaattcatttgccggtctttaacaatttacaacactttaaaaaccctgctttcacccaacttaattctcttgata

SEQ ID NO: 131778 - DNA, 795 bp, Arabidopsis thaliana
  unsure (1)..(795): unsure at all n locations
gcctacctaaaacgaaattgaaattaatgaaatataaaaaaggaggatgtgaaagacccgtatataacgtgatataaaattttatctactcttctctttcacttccatcatatttattttgatttattataatttctatttattattagtattcctcctaaggtacgaatactaaaaaataccttgctaacaactactatgttttataatcatacacaaatttatgaaaaattttttggatctagagtatataaattcgaatttttttataaatacaaaattttactgttattgttatatagaaaagaataatcctgtatataaatataatatataattctgaataaaaaaaaatatatatatattattatattataataatattatattattatgaataatttcttcatcataaaaaaataaaaaattaaaggccataaaaaaaatggatctaaaaagtataaaaagatttgagattaccttaactggaactggcttagttttcattcattgtatgaactaatgaaccaagaggttaagcttttttatttatttattttttctattcttttgactatatgaaaaattcataatcatattgacaacagtgtatggaccaaatataattctctcatagataaatggatctatttatccctgacgcacacacgactgtatttttttctttattctgattgtatctacatatttgcagtacgttcttttttttttgggggggggttgntaactcaacggtagagtacttcgcttttaagtgcgagtagcattctttac

SEQ ID NO: 131779 - DNA, 579 bp, Arabidopsis thaliana
  unsure (1)..(579): unsure at all n locations
ncnngacccacgcgnntccgctcngtctctctacttctctatcatctctatctctatctctcttctccttcttcttcagtttcgatcattcttgaatctgattcttctcgagaaaaaagcgtttcaatttcagaaatttcgactacgattgttgctttgttcaattagaagaggcgaaaaaggatggcgacggttaatgggtacacagggaatactccggcggcgactacaccggcagccaccggatcaaagcaatctgctcctccgactaagaccgtcgatagccactccgttctaaaaaggctgcaatctgaactaatgggattgatgatgggagctgatccggggatatctgcgtttccagaggaaggcaacatattttgctggaaagggccaatttcaggaaggaaagatactgtgttcgaaggaactgagtacagactctcactcaactttctctaacggttaatcccttttaagtctcccaaagntaaagtttggnncatgctgntttccccccanttgnggncctttttggnaanaatttctttnggcattcctcagggtaaatgggcanct

SEQ ID NO: 131780 - DNA, 755 bp, Arabidopsis thaliana
  unsure (1)..(755): unsure at all n locations
aaacaaccccccccggnaatttccgggtcgacccacgcgtccggaaatatattgctttgggtgggaaagatggagatgtatctgttgctgaagttaagacaatggaaatctaccactactgtaagaggctgcatcttggtcaatccattgcttcacttgagttctgccccagtgaaagggttatgctgacaacttctagcgaatggggagagatggtgaccaaactcactgtaccaaaggagtggaaagagtggcagatatatgcactgctgttttgcttgttcatggcatcagtgatagctgcatacgtattcttcgagaactcagattcgttttggaagttaccaatgggaaaagatcaaaaaagaccaaagattagtctatttggaggttcctcctccacgccttctgaggatcatagtaggtggaacttggacctatagaaagattatgtaactttcctctgctttttcttctttcttccttatcttgttgcagcgtttttttttgtttttttcctttcttctgattttgctctgacaaatacctgttgattaattgatttatttacagacaatttctggccgctccaaaaaaaaaaaaaaaaaaaaggggggttggtttttagaaggattccaagttttacttttcggtgttggnttgggggaaggggggtgaggttttttttttttaagtgggccacccctaaaacttcaaaaatctcactctgcgccccgttttgtctttttttacta

SEQ ID NO: 131781 - DNA, 562 bp, Arabidopsis thaliana
  unsure (1)..(562): unsure at all n locations
gaaatatattgctttgggtgggaaagatggagatgtatcttttgctgaagttaagacaatggaaatctaccactacagtaagaggctgcatcttggtcaatccattgcttcacttgagttctgccccagtgaaagggttatgctgacaacttctagcgaatggggagagatggtgaccaaactcactgtaccaaaggagtggaaagagtggcagatatatgcactgctgttttgcttgtncatggcatcagtgatagctgcatacgtattcttcgagaactcagattcgtttttggaagttacccatggggaaagatccaaaaaaggcccaaaggtttaggccttttttggggggttccccctccacggccttctggggggtccatagtagggggggccctggccctagaaaggttatgtaactttcccctgcttttcctctttccttnctaaacttgtttcaagggnttttttttgttttttccccccccccctnattttctnttanaaaaanccctgtgggtnaattggntttttncaagannaananctnttgnnntta

SEQ ID NO: 131782 - DNA, 679 bp, Arabidopsis thaliana
  unsure (1)..(679): unsure at all n locations
ctttgatacagatatttgagatacgagcgcacgttagctaagaccaccgcgtaagccaccgtctcgtcttgaaacgcaccgtattcatgacttcgtcggagccactcgacctggttgtcaccgtcgtctctgccaagcacctgaagaatgtcaactggcgtaacggtgacctgaaaccctacgttgttctgtatcttgaccaagaccaccctctctccacccgctccgatgattcctcctccatcaaaccggtgtggaacgagcggattactcttcctctcacccgatctgtccacgaatcggtcctcaacatcgaggtttttcattccaattcttcggatctgggcggaaaccctcgtcggatcggttaggtttcctctagctcgtttgattgactcggacgggtcaatgattccggaacttgatcaaactcgcttcgagcttggttcgtccatcgggtcgaccacaaggggaagattcggttttgaagctcgcggtcaaaaggcaaggccaatcccttcacccgaagaattcttnggnanggccctaaatttaaccnctaggtactattttnncccnnaagggaacnctttttattcccctaggnttcttntcttnttctcntaagaacggtnaccgttaatttttagggnnntaaggngttttaagaaccgttcgg

SEQ ID NO: 131783 - DNA, 358 bp, Arabidopsis thaliana
  unsure (1)..(358): unsure at all n locations
gaaaaccctcgtcggatcggttaggtttcctctagctcgtttgattgactcggacgggtcaatgattccggaattgatcaactcgctcgagctggttcgtccatcgggtcgaccacaggggaagattcgtttgaagctcgcgatcaaagacagaccaatccctccaccgcagcatcctccgccacgtcctcaatctcaaccactagattactattctgcccctcaaggaaaccattattactncccttaggccttcttctccttcttcttctcaaggaaccgttaacggttcaatctcctaaggggtgcntacagggaatttttaaaagtcaccggtttccggtttcttaagggttta

SEQ ID NO: 131784 - DNA, 564 bp, Arabidopsis thaliana
  unsure (1)..(564): unsure at all n locations
ccacttggatctttcttacttactccattatctttttctctctctttccctcatctcattaatggcgagctctacatctttagcgatagttcttcatcaatcttccaatcatgacgaactcttcatgaagcaaactcttcaattctcagaaaccctcaaggatttaaagaatctgcggaaacagttatactcagcagctgagtacttcgaaacatcttatggcaaagcagaacacaaagaaacagtgatagagacgttgaaagagtatgcagcaaaggcagtagtgaacacagtggatcatcttggttctgtctctgacaaattcaactcttttctctctgataactcaactcatttctccaccactcatcttcgtttatcttctcttgaacaaaggatgagactatgcagagattacatggggaagagtggcactcatcagcatttgcttctaatttcaatatcctngncntcataagncgttacttcttcctcaacaagganggaggcaccaagttctntgcaggggggatggcctacaaccgggttnacggggtncttntt

SEQ ID NO: 131785 - DNA, 521 bp, Arabidopsis thaliana
  unsure (1)..(521): unsure at all n locations
ctcactattctgggcaacancatggagtgtattccccaaaatncccatggngtcccattgtcccttttaactacacaggcactccacctaacaatactatggttagtaacgggacaaacttgatggttctaccttataacaccagtgtggagttggtgatgcaagacactagcattcttggcgcagaaagccatcctcttcatcttcatgggttcaacttctttgttgttggccaagggtttgggaatttcgacccgaacaaaggatcctaggaacttcaaccttgttgaccccaatagggagggaccacaagtcgggtgtgccatcttgggtggattgggctgctatttcgattccttgtcagattaaccccaggaggtgtgggtcatgccctctctcttggaagtgcataccagttggggtctgaggatggcttggcttgttcttgatggagataaacctgatccaaaaacttttttcctcctcctggatacttgcccaattcttgaaaatttttcccc

SEQ ID NO: 131786 - DNA, 439 bp, Arabidopsis thaliana
ggcagcatcatcagtactactctcgtgcttcaatttccatcatcaaccaaaccttctccatggctgcaactactcatctaaccattcactcctcagattcaacttttcaaccccaaaacctctcctgatctcctcacggagctgctcacgacgattcagagtcttgtcagagaccatcaccgtcaaattggaagaggaggagaaggatgatggtgcaagtgctgttcttgatcctcctgccgccgttaacactaagctctacttcggtaacttgccttacaatgttgacagtgcaactctggctcaaatcattcaagatttcgctaaccctgagctcggtgaggttctttacaacagagataccggacagagtcgtggattcgccttcgttaccatgagcaatgtcgaagattgcaacatcatcatcgataacctcgat

SEQ ID NO: 131787 - DNA, 706 bp, Arabidopsis thaliana
  unsure (1)..(706): unsure at all n locations
gaagatgtttgcagcttcttgtctcgcatcgtgttgngctgcttgtgcctgcgatgcttgccgtactgtggtttctgggatcagcagacgttctgctagaattgcttactgtggtctctttgcactttccttaatcgtttcatggattctccgtgaagttgctgctcctctcatggagaagctcccttggattaaccattttcacaagacacctgatcgtgaatggtttgagactgatgctgtgttgcgtgtcagcttagggaatttcttgtttttctctattctatcggttatgatgatcggtgtgaaaaatcagaaagacccttcgtggatggtatacaccatggggggttggatgatgaaaataatctgttggtgcattttagtcatctttatgttcttccttccaaatgaaatcatcagtttctatgagtcgatgtcaaagtttggtgctggattttccctgcttgttcaagttgtacttcttttggattttgttcatggatggaatgacacatgggttggctacgncgggcagttctgggatgctgcttttccccgtggttccccttgtatggtaacttggcaacattcggcttctctggggttctnttccactgggttantccatctnggcangattntgggctcaanaccttnttcatatcatgactttganatttggattcggctttgccattntagg

SEQ ID NO: 131788 - DNA, 530 bp, Arabidopsis thaliana
ttaggtgcactatagaagagctatgacgtcgcatgcacgcgtacgtaagctcggaattcggctcgagatcaagtcatggagatttactttttatctagaggctcctctgttggatactggcgtggcgacattcggtacctgatggatgatgttcaagctcttaaacctactgtgttttgcggtgttccacgagtttacgacaaactatatgccggtataatgcaaaaaatatcagctagtggcttgatacgcaagaaactgtttgattttgcttataactacaaattgggaaatatgagaaaaggattctctcaagaagaagcttctcctcgtctagacagacttatgttcgataagataaaagaagcattaggaggaagagctcatatgttgttatcaggagcagcgcctctacctcgtcatgtagaggagttcttgagaatcattcctgcctctaatctctctcaagggtatggattgactgagagttgtgggggaagcttcacgaccttagccggagtattttctat

SEQ ID NO: 131789 - DNA, 498 bp, Arabidopsis thaliana
gagtcttggtgaagtgataaaagcaggagcaacaactctcaacatacctgatactgttggtataactttgcctagtgagtttggtcaactgattactgatttaaaggccaatactccggggattgttaatgttgtcatctcaacacattgtcagaatgatcttggactctctacggccaacactttatctggggcacatgcaggtgcgaggcagatggaagtgacgatcaatggaattggtgaaagagctggaaacgcttcactggaagaggttgtgatggccataaaatgccgtggagatcatgtatttaggaggtctatttaccggaattgatactcggcacattgttatgacaagcaagatggtagaggagtacactgggatgcagacacaacctcataaggctattgtaggagcgaatgcctttgcgcatgatagtggaattcaccaggatggaatgctgtaacacaagggtacatatgaaattatttgtcccg

SEQ ID NO: 131790 - DNA, 650 bp, Arabidopsis thaliana
  unsure (1)..(650): unsure at all n locations
gaactctgtttcttcccgcactacgtcgttccttccatgcgaacaccgctctttgtcatcaatgccgcttttgattcttggcagatcaagaacgttttggctccaactgctgttgataagggaaaagagtggaagaattgtaagcttgatcttaagaaatgtagtgccgctcagctcaaaaccgtccaagggtttagagatcagatgatgcgagcattgtcaccggttcacagtacaccgtctagaggattgttcttagactcgtgtcacgctcattgccaaggaggaagcgccgcctcttggtccggtgacaaaggtccccaagtcgccaatacgagaattgcgaaagcagtcggaaactggttttatggccggagtgcatttcagaagatagattgtccgtcgccgacttgtaatcctacttgtcctgctatctctactgaagactagaatcatctctaaatgttcaattttttttaatttgaaattgaaagagctcgcaaacattttggatttgttttccaaatcggatcaataataatcactgcaatttgaataaaaaaaaaaaaaataatttgtattnnnnnnnnnnnnnnnnnnnnnnnnnnnnnnnnnnnnnnnnnnnnnnnnnnnnnnnnnnnnnnnnnnnn

SEQ ID NO: 131791 - DNA, 566 bp, Arabidopsis thaliana
  unsure (1)..(566): unsure at all n locations
cggacgcgtgggttacctgctggagatgttctataatctgcattagcgggagggcttgcctctgctctctccacttccttaatgcatccgattgacacaatcaagacgtgtgcaagcatcaaccttgtcatttcctgaagtaatagccaagcttccagagattggtgtccggggagtgtataggggttctattccagcaattcttggacaattttcaagccatggcctgcggacaggaatattcgaagcaagcaaacttgtgttgatcaattttgctcccaatctcccagaaattcaggttcaatcgattgcatcattctgcagcacactattaggcacagctgtgcgggattccatgtgaggtgctgaagcaacggttgcaggctggcatgtttaacaatgtaggggaagccattntcgggacgtggaagcaagatggtccaagtggctttttccgtgggacaggcgcaactttttnncgcgaagttccactatacgntgttggcatnggnctgtntgcagggtcccanaaagatggtggcggcaagttcttgggaagagaactt

SEQ ID NO: 131792 - DNA, 643 bp, Arabidopsis thaliana
  unsure (1)..(643): unsure at all n locations
actagattgcttgaaccgtgcgctttttcaggctgaatctcgatttcctaaggatggttgagcaagaaatggaagaaagaccggatttagtatccgttggatcttgtgttttggtcactctcctggttgggaaggatctatacgtccttaatcttggtgatagcagagctgttctagcgacctacaatggtaataagaagctgcaagctgttcagctcacagaggatcatacagttgataacgaagtcgaagaagctagactcttaagtgagcatcttgatgatcctaagatcgttattggtgggaaaatcaaaggaaagcttaaagttactcgtgctctcggagttggttacttgaagaaggagaaactaaatgatgcactcatggggatcctccgcgttccgtaaccttttgagcccgccttatggttccagtgggacccatccgatgagagttcacaagataaccgggatccaggttcactttggtaanagttgncaagcggatngggtttggtttgaattcccttccagncaacgaaggaanccganttgggggcggnccantncccttcggttncaaggnaaaccctcctgggggntcccancnaaagtttcctnncttaancgccttggaagcnaaa

SEQ ID NO: 131793 - DNA, 1279 bp, Arabidopsis thaliana
  unsure (1)..(1279): unsure at all n locations
atgggagacatgttctcgcaagctacgcccaactccttgacgtcatcatcatctcatccagatctcacacctttaacaggagcaattgagattgttcctccgcctcagaaaaagtttgagccaaaatcatcagtctgggcagacacgttgagcagggggcttgttaactttaacatatctggatctaaaacaaatccattggcagacataggagttgacttcgaggcgatcaacaggagagagaaacggctggagaaacaaacaaacacaccagcaacatcgactatcaatatgggtaaagccatgggatcaggcactggcttagggcgttctggtgcaactgctatgagaccctccacctaatccaaatgacaggctctggcatgcccatgggcggaggatgggtgttggtagctacggaggtatgaaccagaaccaacccatgggtatgggtatgggggccggaatgaaccaaaaccaaccgatgggtatgggaatgggacccggcatgaacatgaacatgaacatgggaggatatggccaaggctatccgatgcaaccacaaaacccagggatggtacctagcccaaacatgcctggcaataactacaatccgatgatgggtcaaggtggttacaaccctcaacaatcctatggtggtggataccggtaagatcaagccaaacatgatgcacttgacttcattcgtgtaatcaagaatacgctcgcctgtgctttttctttactctgggatatgtaatatcagtcgataaaagtactcaggttacattattcatccaggcaacacggctccacgaattttcttctctgtttgttcttgccttactcgtcactcatcattcatttttatttttttctggtttggaccaaattgagagcttgttgtgaaatttgtaccagtgtgagagtggcaaaccttgctcgggtctgccctttttttgttatatgcatataatttgatatatacacattcacttctatttctttattttgaagatgtgtaatacatttctcattcacggaacaaataaaatctttacagccgaaaaaaaataaaaaaaaaaaaaaaaaaaaaaaatataaaaaaaattattaaaaaaattaaaaaaaaaaaaaaaaaaaaaaatataaaaaaattatattaaaataaaattattataaantttaattttttttaaatatataaaaaatatattatatattattttttatttattattatgtgtggtggttttataaagaataaaaattttttttt

SEQ ID NO: 131794 - DNA, 740 bp, Arabidopsis thaliana
aataggtttgacagggattcaaccccagtcccggtttttagtaaccgagaggcatcagaaagagtcaatgatcgagccaattcgatccttaaccggttgatgacatctaggggagttagatcagagcagaaccaggctagtgctgcagcagcagccattgtcgcagcatcagaggatattgatctaaatccaaacattgctcctgatcttgaaggagaaagcaacacgagattccatcctctcttgatcaggagacagttacagtcgcaccgagttgcaaggatctcgactttcacttctgcgttgagttcagctgagaggcttgtggatgcgtattttaggactcatccgttggggaggaaccaccaagagcaaaaccatcatgctcctgttgtggttgatgatagagactcattctcaagcattgcagctgttataaactctgagagtcaagtggatactgcagttgagatcgattctatggctctttcgacatcgtcctcgaggagaaggaatgagaatggttcgagggtttctgatgtagacagtgcagattctcgtccgcctaggagaaggagatttacttgagaaacataaataagaaaagctttcaacctggaagctgacgatgatgatgattaagaagaagataagaagaagattgtgtaactttatttttcttgtgttgctgtgttgtagtttgtttttgtaaatatccccacagggatggttttttttaa

SEQ ID NO: 131795 - DNA, 574 bp, Arabidopsis thaliana
cggacgcgtggtgtttcatcttctgcagatggcttgaaagtaaaagagggtgggggagacccttttgtgtttgcggatgccttgaaatcactaatcaggctattacgacttgcacagccattgggaaaaggccttctgcagaggcttctcttaaatctatgtgctcacagttttacaagggcttacctggttcaacttttactggatatgattaggccggagatggaaacatcaccgagcgagttggcaataactaatccgcaaagactctatggctgtcaatcaaatgttgtttatggtcgatctcagctattgaatggtcttcctcctttagtgttccgccgggtgcttgaggttttgacgtacttggctacaaatcattctgctgttgctgacatgttgttttactttgattcgtcacttctatcccagttgtcaagccgaaaaggtaaagagaaagttactcatgtgacagattcccgagatctggagataccttttgttgtcttcctaaaactgcttaatcgggctcagcttctgcagagtacatctcaactaaggctggtcatgggct

SEQ ID NO: 131796 - DNA, 631 bp, Arabidopsis thaliana
  unsure (1)..(631): unsure at all n locations
cctnaaaggncaaantggnccncgggtggcnttnaacngngccccgggtcaggatccgccncggttaaaaagcctgcntntgttctcggncttggcggctttngggtancatttcagaggttgggggaaggatcgatatgccccggattatgccaggagctatgcaggtatgtcgtgatccggccttacaggtacgttagggttatgccgtctggccaaagcttcagtccaatgccaatccatattccgtttcacggatgggtttttcccgcatatgccaagaggtcatcaagccaacctaaactatgggcatccgcttaaccctgctttgagtccctttactcataacgtggcttcatatacaccgtggccaaactcacccgttatgaactatgcacagccgttgaacggctcagacacaaatctttacaggtatccttctgcaagtaatccctgacagcaagagtagtgtttgagtacttcaatgtctgtaatgaaaagcagattctatagatattagcctttaggagctccctgttctgttccgaacaatggctacttctttcttatataacaaacaagacatctacttttttatatctctgaattatattattatcgaactttgaat

SEQ ID NO: 131797 - DNA, 732 bp, Arabidopsis thaliana
cggagattggccctcgagtgcagtggcgacgactgttgctgaaggagtagcttgcaaaagcgcgtgtgaagcgtttggaacgccggagtactgctgtagcggcgcgttttggtacgccggacacgtgtaagccaagcgagtactcacagtttttcaaaaacgcgtgcccgagagcttatagttacgcttacgacgacggaactagtaccttcacttgtggcggagctgattacgtcatcactttctgtccttctcctaacccaagtttgaagagtgcaccgaagggagtccaacccggagctgttagctactctaaggcatctccaaacgcgtcgccaactctttctgccgtggtttcagattggcgttttgcctgtcgcgtcttgggtgatgcaacgcgttttgtgattcatgtacggctgcgtttgaagtttttaataacatcaatctcaatcattcggccagagagaaaagatcattggagagcagcttttagttagtcgaggagtgatttattctaggtgatcatttgtgggcgccccccttatttgagggtggcttgggtctagtattactattagtttctacgtaattttttagacaaatggtcagtctttatggtgtctctgtaagatatataacagttttgcttgcccccctcaaagaaaaaaaaaaaaaaaaaaaccaagagcgcccgctctaaaggatccaagcttacgtacgcgtgcatgc

SEQ ID NO: 131798 - DNA, 807 bp, Arabidopsis thaliana
  unsure (1)..(807): unsure at all n locations
tgttttgagatgatacgaagaacttggaggcccattagccccgaccctttatattttatcaatgcagcacttgtgactctctgtcatagagaagtttgtggaaaccttagccagttcaaccccagctgttttgttcaatcttgagctagatacttgcggtctggcgtagggcatattggctttcccgctaaagatctgcactcccggtttctatctcaattcattcccgtcttttatatccgaaccagagagttttcaaagacagtggcagtggcaccatttgtgttgaactacaacggagcactttttcgacaatatcctgggccatggcaggtgatgcttaagcaaactgatggttcatttgcgtgtgttgcagaaagccctactcgtttcacgctgggtgaaacgaaggaagagctgttacaggttctgggactacaagaagagaaaggaagctcactcgagttcctgcgcaggggatacaagtcggcaacttggtgggaagaggatgtggagctcgaggcatcatctaattggcgtaactgaacgatggccaagtcatggattcacacttttggtaagtttgttaagtctctcaagattgagatatttacacttgtatatgtgcaaagttggtagagagagtttgggagatgttaatgggaatgattaaggatagtttcaatatgttttctatatataactcagtccaattaaaaaaaaaaaaaaaagggcaggccgctctagaggatccaagcttacgtacgcgtgtatgcgccgtcnnnnnnnnnnnnnnnnnnnnnnnnn

SEQ ID NO: 131799 - DNA, 684 bp, Arabidopsis thaliana
  unsure (1)..(684): unsure at all n locations
atncccccggtcttcccaattancccgctttntcccgaccagggttttcaaagtgccatgccccattgtttgaactncacggnccncttttcggncattaccctggccatgccaggtgatgctaagcaacctgatggttcatttgcgtgtgttncagaaacccctactcgttcacgctggntgaaccgaaggaagagctgttacaggttctgggactacaagaagagaaaggaagctcactcgagttcctgcgcaggggatacaagtcggcaacttggtgggaagaggatgtggagctcgaggcatcatctaattggcgtaactgaacgatggccaagtcatggattcacacttttggtaagtttgttaagtctctcaagattgagatatttacacttgtatatgtgcaaagttggtagagagagtttgggagatgttaatgggaatgattaaggatagtttcaatatgttttctatatataactcagtccaattatgatagtgtctgctccacccaaaaaaaaaaaaaaaaaaaaaaagaaaaagaaaaaaaaaaaaaaataacaaaaaaaaaaaaaaaacaaagacagaataaaaaaaaaaggggcccccccaaaggtttcaagcttacgtacccgtgcatgcaaattcaaaactcttctaaagtgtcacccaaattcaatt

SEQ ID NO: 131800 - DNA, 843 bp, Arabidopsis thaliana
caagctttccgtcgttaagctcaacggctcccttttcgatgtggaagttgcaaaggattgctcagtggcagagctcaaaagagctgtggaacaagtattcaccatttctcctctggaaggtcacggcatgatttcatggtctcacgtctggggtcatttttgcttgtgttatcgagaccagagattagtcaatgacatgactagcatccgttatctcggtctcaatgatggagaccaattacatttcgtaaggcatttgtcgatagaccactctcctatgaacaaaagatccaagagcccgagttgcaagcggtacctcgagttggatgtgtcatccattgtcaacgaaatccaaatacaaaaccaaaaccagaacggtgtggatgatgtagctgagaagtgttatccaggagcacaagacgagttaccggcagcagaatccagactagttaacttaattaaaggatggttgccatatgctggacgttggggagtttccagaaaaggacccgagtgtcgcagtggtccctccagattttctttgaagcatttcggtggcagacccaagatgtaaatcccgtaagtcacaaccctcttcctatgtcccctttttaatctcttccaatgattattggtttatgaatttgttgtccagggttgtatcaaaagatccatagttttacaaaatttccatatcctatccttcaatgcaattgtggaaagccttgaaggcaaggtacattttttatttcgcataaatttcagcctagaaccacagtaggtagggcacctgttttgtgataaaacaagaatggattgagtatttgtgttgattttgaataa

SEQ ID NO: 131801 - DNA, 749 bp, Arabidopsis thaliana
  unsure (1)..(749): unsure at all n locations
tcactatagggaaagctggtacgcctgcaggtaccggtccggaattcccgggtcgacccacgcgtccgatcctcactcctcagctcctcaaatcagaatgaatcaatccgcgcaaaattacttttccggtaattatcttcaattgttttctaaaatcatgatcaatgtctaacgtataatcatgatgaacaataattctttactcaccaactagataattttttttttttggcacagtgcaaaaaccttcagagacttcatcagggccgtacacaagtccgccaccaattggttatccgactagagatgcggtggtgggtgatcctccggcagcagcagtggagacaaactccaagggcgtcaacctcgaaggcataatgagttgtatcttctgctgcggcctatgctccagcttctgtgagtaaatcagcatgatgagacagaagtcgttgcccaaacctgaaaaacaacacgtgatagaaaatctatatatatatatatatatatatatatatgttagtagtagtcgtttctatggatttccacgcattttaaagtttatttgtttcactgtttaaaatgaatcatttgcttcgtgtattttgtttctatataaataaaagaaattaaaaaccaaaaaaaaaaaaaaagaagggcggccgctcnnnnnnnnnnnnnnnnnnnnnnnnnnnnnnnnnnnnnnnnnnnnnnnnnnnnnaacggaattgcacctcaacctttcccccatt

SEQ ID NO: 131802 - DNA, 809 bp, Arabidopsis thaliana
  unsure (1)..(809): unsure at all n locations
gaaatttgtgaagcggaatataaccaatttttcaacacaagaaaaaacaagctaattgcccaatgtttttaccgccaaagcttttaattccgactcactattagggaaaagctggtacgccctgcagggtaccggtcccgaatttcccgggttgaaccccgcggtccgctgtccgtgaattgttctgtaataaatgttttttattgttcaatattgactcttctttcttttatataatgaataatgtaaaaaatttcctaatattcgtctaccttataaattagaagcacaacactctctccttttcacaaatctcacatcctcactcctcagctcctcaaatcagaatgaatcaatccgcgcaaaattacttttccgtgcaaaaaccttcagagacttcatcagggccgtacacaagtccgccaccaattggttatccgactagagatgcggtggtgggtgatcctccggcagcagcagtggagacaaactccaagggcgtcaaccccgaaggatgttgtgctgccatatgctgctgttgtgtcctggatgcatgcttctgagacttcggaattaacgatttcatgcaaattattgatgtaataaaagagtatttgatgctagttatgttacctactctctgtttggaatatactctgtggatggttgttactatgttttatgtaagtgattatatatatatatatatatattccgttgaaaaaaaaaaaaaaaaagnnnnnnnnnnnnnnnnnnnnnnnnnnnnnnnnnnnnnnnnnnnnnnnnnnnnnnnnnnnnnnnnnnnaaac

SEQ ID NO: 131803 - DNA, 575 bp, Arabidopsis thaliana
  unsure (1)..(575): unsure at all n locations
gtaccggtctggaatgtccgggtcgacccacgcgtncgctcactcctcagctcctcaaatcagaatgaatcaatccgcgcaaaattacttttccgtgcaaaaaccttcagagacttcatcagggccgtacacaagtccgccaccaattggttatccgactagagatgcggtggtgggtgatcctccggcagcagcagtggagacaaactccaagggcgtcaaccccgaagccataatgagttgttttagtacttgtatggagtgtatcttctgctgcggcgtatgctccagcctctgtacatcagagtaaatcagcatgatgagacagaagtcgttgcccaaacctgaaaaacaacacgtgatagaaaatctatatatatatatatatatatatatctattatagtagtcgtttctatggatttccacggattttaaagtttatttgtttcactgtttaaaaatgaatcatttgcttcgtgtattttggttcctatataaataaaaggatttaaaacccnaaaaaaaaaaggggggccgcntngnggnccnagtttcggccggtnantcngcgna

SEQ ID NO: 131804 - DNA, 672 bp, Arabidopsis thaliana
  unsure (1)..(672): unsure at all n locations
gataagactcttcaagtgagacgtgccaaccagggaacaatgctacaaaagcctgaacaagagaacgtattattgcatgctcagcagcaaatagcttttcagagggttatgttacagcctggtgcagtggcaacccactgtggtgtgtcctgccccaagttgttactgaggcatgagcttagcagatgatgcaggagtatggagatattaatggaagaccatgagaccaggaaggcggaaaagtttggtgctttgacccaatgttgtgattccgcgtcccaagccccaatggtgagccagtggcaggccttggcaaggtgtttttgaagtatgccgatacagatggctcgactagggcaagattcgggatgaatggtaggaaatttggaggaaatgaagtcgttgcagtgtattaccctgaagacaagtttgaacagggtgattatggagcctgatcacttctttgtttgctttctattacttaaaagttaagtactttgcttcagtttcaagacccttttgcgtgattgtaagagtatgagattatcgacacgttgcttattataacgtttttatctcaaaataaataattatgtataattaaaataaaattaattttaaattaatttttttaatttattttttatttatnnnnnnnnnnnnaacggaatt

SEQ ID NO: 131805 - DNA, 770 bp, Arabidopsis thaliana
tgccaaccagggaccaatgctacaaaagcctgaacaagagaacgtattattgcatgcacagcagcaaatagcttttcagagggttatgttacagcctggtgcagtggcaaccactgtggtgtgtctgactcaagttgttactgaggatgagcttagagatgatgaggagtatggagatataatggaagacatgagacaggaaggcggaaagtttgccttttgctataaagaatcagccctaacatacacagacaggagactgcataaacctcctaatctatttatcaccaatggccactatttcttaaaagaaaaaactgacttgtttttgtctgtgttttcttgtcttgtattcgaaatgttttgtcctttaactcttaaaatgcaggtcctttgaccaatgtggtgattccccgtccaagccccaatggtgagccagtggcaggccttggcaaggtgtttttgaagtatgccgatacagatggctcgactagggcaagattcgggatgaatggtaggaaatttggaggaaatgaagtcgttgcagtgtattaccctgaagacaagtttgaacagggtgattatggagcctgttcacttccttgggttgctttctattacttaaaagttaagtactttgcttcagtttcaagacccttttgcgtgattgtaagagtatggcggccgcgaattcctgcagcccgggggattctatagttttagaacggccgcccccgcggtggaggttcaggctttggtcccgttagtta

SEQ ID NO: 131806 - DNA, 642 bp, Arabidopsis thaliana
  unsure (1)..(642): unsure at all n locations
ganananaaacccnaaaaaaagtgnttnntacnctttgaangcctaaaagccgcggaccnaatcccctttaccccttttccaaaatgggaaccccccctttttgcctttggtgggnttggnattgaatttcttnccnaaacctaagatttgttccagagtgtaactacatttgccttcgcctctggccactattccttaaaagaaaaaactgacctgtttttgtctgtgttcccttgtcctgtattcgaaatgttttgccccttaactcttaaaatgcaggtgctttgaccaatggtgtgattccgcgtcccaagccccaatggtgagccagtggcaggccctggccaggtgtttttgaagtatgccgatacagatggctcggctagggcaagattccggatgaatggtaggaaatttggaggaaatgaagtcggtgcagtggattaccctgaagaccaggttgaaccagggtgattatggagccctgatcccttccttgtttggcttcctattccttaaaagttaagtgctttgctccagtttcaagacccttttgcgtgattgtaagagaataaaattatcgccccgttctaaccggcccgcgaattcttcaagccccgggcagcctctagttctagagc

SEQ ID NO: 131807 - DNA, 675 bp, Arabidopsis thaliana
  unsure (1)..(675): unsure at all n locations
ataaagactttctcacaagtgaagacgttcccacccaagggggacgaatgttttcaaaaagccgtgacccgggcgaggggtattattgcagtctctccagcaaaaggcttttagaagggttatgttacagctgggtgcagtggcaaccactgtggtgtgtttgactcaagttgctactcaggatgagcttagagatgatgaggagtatggagatataatggaggtcttgagacaggaaggcggaaagtttggtggctttgtccaatgttgggtttccgcgtccaagcccccaatggtgagccagtggcagcccttggcaaggtgtttttgaagtatgccgatccagagggctcgactaggtgcaaggttcgtggatgaatggtaggaaatttggaggaaatgaagtcgctgcagtgtattaccctgaagtcgagtttgaacagggtgattatggagcctgatcacttctttgtttgcctttctattacttaaaagttaagtcccttggcttcagtttcaagacccttttgcgtgattgtaagagtatgagattatcgacacgttgcttattataacgtttttatctcaaaaaaaaaaaaaaagggcggccgctctagaggatccaagcttacgtacgcgtgcatgcgacgtcatagctctgtctatannnnnnnn

SEQ ID NO: 131808 - DNA, 430 bp, Arabidopsis thaliana
aagagactgaatcaggtgaggaaccgacttcttcaggcaacgaagcatcggaggagaaacttcaggcacttttaagtatcgcaacggtttgtgtgaccattcaacccgataaccggcctgtgatgagagaggtgttgaagatggtgagggatgcaagggctgaagcaccattctcgtctaacagtagcgaacattcgcccgggagatggtcggataccgttcagagcttgccaagggatgatcaagtgagcatttagagaaattgggtgggccttcttcattgctttcatagaatgacacgtgtgattcttgaagtagggttcatagtgtaaagcttcttttttattttgtaacgccattttgattcatcgaccttgtaggacttgcataagatctattgaattgagatgctggcattgagtagttgaag

SEQ ID NO: 131809 - DNA, 361 bp, Arabidopsis thaliana
cggacgcgtgggctttatacctctctccttcttcttcttcttcttcgtgttctctctcttatgtccttgtccaatttccaaatcctttgttggcgaattttgtcttctttcttcctgagatttcccttcttgtcttcaagaaaccttgatcagggtttctattgtttaaggagggagaaacgaaatgtcaggtggtggcggatcacagagtagttgaaggaggtatcttggagctattaaagataccaccacagtttcattagctaaggtcaatagtgattacaaggaattggatattgctattgtgaaggctactaatcatgtggaacgtccttctaaagaaagatacatcagagctatt

SEQ ID NO: 131810 - DNA, 711 bp, Arabidopsis thaliana
  unsure (1)..(711): unsure at all n locations
ctcatattgttcaagccaacaacaacaattacttttacccaatgagcaaatgaaccagtttggacatactggaaatcttcagaacacccaacaacaacaacagagatctgataatgaacctgctccacagcaacagcaacagccaacaaagtcttatccgcgagcaagaaagagcaggcaagggagcacaggaagcagtccaagtgggccacagggaatctctggtagcaagtcctttcggccattcgcagccgttgatgaggacagcaacatcaacaatgcacctgagcaaacgatgacaacaaccacaacgacgacaagaacaactgttactcagacaacaagagatgggggaggagtgacgagagtgataaaggtggtacctcacaacgcaaagctcgcgagtgagaatgctgccagaattttccagtcaatacaagaagaacgtaaacgctatgactcctctaagccttaatcctctctatgcgtattgtacttgatatgtattttacaaaattagaaaaattgtgatagatgttatcctcaatatatgtaccatgtaaacgtattatggtgtaagcctcatttatatgtgttaatttgtcttggccgaaaccaaaaaagnnnnnnnnnnnnnnnnnnnnnnnnnnnnnnnnnnnnnnnnnnnnnnnnnnnnnnnnnnnnnnnnnnnnnnnnnnnnnnnncnnnnnn

SEQ ID NO: 131811 - DNA, 480 bp, Arabidopsis thaliana
cggacgcgtgggctaaaaatcccttctctctttctttctttctttttttctctccctctcttctcaggcgagtatgcaaagcaagaacatgatcgtggcttcatctcatcagcagcaacaacaacagcaaccgcagcagccacaaccgcaacttaaatgccctcgttgcgattcttccaacacaaagttctgctactacaacaactacagcctctctcaaccacggcacttttgcaaggcttgcaagaggtactggacgagaggtgggactctcaggaacgttcccgtagggggtcgctaccggaagaacaaacgtgtaaagcggccatcaaccgcaaccacaaccactgcctccaccgtctcgacgactaattcttcatcccctaataaccctcatcagatctctcatttctcttccatgaatcatcatcctttgttctatggtttatcagatcatatgagcagttgtaataataatct

SEQ ID NO: 131812 - DNA, 586 bp, Arabidopsis thaliana
aatactgtaaatagaaggttttctccaatacagagaatcagtaaacctcacaaacctaaaaaagaacaaaaacgcagaatgtctagcagacgaagtcgtagaccaattacagaaccaaccctgcacaaacaccactggctcagcttcagtccctggaacagatcctggaatcccaaatttccctaacctcctcgctaaatgccgcctcaacacaaaacgtaaccagagacggtttgatattgcaagtttgtgctcctaagcatcattcgacccctgacttgagcagtttcgccaatgtcttaacaaagaacctgaatgattctaagttcactggagctggagttggtattgattctgatggtatttggcttgttaccgtcctcactacaaacacaccagggggtagctattctaactcaggagcttttgcattcggagttaatggccttgtttcttcaagtttgatgtttcttcatgttttgagtcacaactcgttgtctttgttttcttaatatgacgtgattatggtgaaatttttaataaattcgtgtggcaatcaattaaagagagaataacaatatattaa

SEQ ID NO: 131813 - DNA, 386 bp, Arabidopsis thaliana
  unsure (1)..(386): unsure at all n locations
nnnnnnnnnnnnnnnnnnnnnnnnnnnnnnnnnnnnnnnnnnnnnnnnnnnnnnnnnnnnnnnnnnctttttttttttttttttagaacgttaggctttgtaacaactaagtttaatgccgagtataaatagggatacaataatagtccataaattctccaatgaatccaggtatagacttttatagtattacaaaaggacccaagaacaatgtaaaagagaaagaaagagtgtagagtatataagtattgaaaacacattcaatcaattgcagactgtgaatctgcaggtcccggaattagccttgatgaaacgaatagcagtcatgacgacatacactcccgaatttccctgtagtagctcatgagcttttgcattcggagtta

SEQ ID NO: 131814 - DNA, 949 bp, Arabidopsis thaliana
  unsure (1)..(949): unsure at all n locations
atgagtcaagaatggacagcaaccatattctgctcattataccagattcgaggcaagtgaaggcagaagacttgcaggcaggagtgtgctatctgcaaattactgctgttgatgcagtgatggaagatgaggatcttgggagcagaagagagagaatattttctctttcaactggaagtgttcgagcacgagtgtttgatcgtttcttatttgacacaccatttacgaaaaatggtaaaacccaaggtggattagaagatcaatggaagagaagaacagtgctgcagactgagggttcattccctgcccttgtgaataggcttgttggttaccaagtctgaatcccttgaattctcgccagtggagaatgcgattggaatgattgaaacgcggacaaccgctctgagaaatgagctagaggagcctcgtagctcggatggggatcacctaccacggcttcaaagtctgcagaggattctccaaggaagtgttgcagtgcaggtgaacagtggggtgttgagcgtgtgcacagctttcttatcaggagagcctgcaacgagattgcgttcacaggaactgcagcaactaatcgcggcactgcttgaattcatggcggtttgtaagcgagccattagggttcactttagattaatcggagaagaagatcaggaattccatactcagcttgtcaatggatttcagtctctcaccgcagaactctcccattacatccctgctatcttatccgaactttagtgtatctttgtcagtttttgttacgagttttgtgcttttttcttccaccatttggcttggctatatgtttatcatttctgtaattcttagtgcggccgcaacaagtgagnnnnnanttataaatgacaattggttgacttctaattcagaagcttatgttatnnnnnnnnnnnnnnnnnnnnnnnnnnnnnnn

SEQ ID NO: 131815 - DNA, 478 bp, Arabidopsis thaliana
tctaaatcgaagatggattcctaagatcgcatcaatggcgtctactagacctctcagttcacttccttacttgttcctctccttgtctctcctcttcgtcgtctcgcttctcttcttcttctccaattccttaatctccaatccaaatccgagcatttcacacaatactctccaaaacggtatcaatgtctatgtagctgagcttccaagatccctaaactatggtcttctcgacaaatactggtccgcttctactccagattcacgtatacccaccgtcccagatcacccgacccgtaaaacccatttacccaaacccgataaacacccaccgtacccagagaactccgttgatcaagcagtacaagtgctgaagtactggatcatgggagacctagaaacctcaccagagaaacgaattggatcttttgctaaaagaggttttagtgaatctgacgctgatgttgtcttcgtgcct

SEQ ID NO: 131816 - DNA, 670 bp, Arabidopsis thaliana
gatggagataacgggtcaaagcccagttgcttataaacatttgcaaaagagctggtgatgacatcagatgaagcttctttcaagaaccggcggctcccaaagggatacttctatgttcctgttgattgtcttcaggaagacaaaccgggaaaccagaagctggcttcatctgacaagccagcgaaccagaagacatcttcaggtgatcagtcaggttaagacgacgggtaaaagctgagaacacacattttggctcattgctcctaccttaattagatactggctattggtggacattgtcttctgcgccctaaccaggattcaccaactggcttaaagcaaaagaacagatggtattgcgctacaaaagagctgtggctgcaactgagaatcagctaaaaaaagctattgtgaagcttttgggtactcgaatacaacactgtgcaataaaggtaatgtttgagatttgagggtaacatctctataggaaaaaggcttcagattggattcagggaagtgagaaaaaagctccctattaccatataaagaaggatcggtcacgtgtaattctgtttgtataaagaaacggaaaaaaaaaaaaaaagggcggccgctctaaaggattccagcttacgtacgggtggatgggacgtcataactcttctatagt

SEQ ID NO: 131817 - DNA, 449 bp, Arabidopsis thaliana
cttaaccaatatcacgtgtctaaaattttttgctcctgtttcactaaaacgttgacttttagataatggaactcaatctagaggtgatccaaagagaagtgatcaaaccttcatcacctgcacctcatgatcgccttcaactatcagtcatcgattttggcactgcagaagcttgcgtgcccatgatcttcttctacaacctcgcggatcttgcggaaaagtccccggatattgtctcaacaaggctgagaagctctctatcccaggcgctgtcacgtttctatcctctcgctggaaaaaaagatggtgtccccatcagctgtaacgacgaatgtactgtgtttacagtggcaccgcacatatcttcttttggctgatttccctaatgaacattgatgtcaacttttttaaagattttcgtttcctcccttttcaccaattgatttctt

SEQ ID NO: 131818 - DNA, 460 bp, Arabidopsis thaliana
aaacgctgcattctgttgagcttttttgtcggcggacggtacttggggggtacgttagggtaaaattgctgcatgaaacccggtttttatggagaaactagcggcttgtgcgacagctgttgagtcaagagtggaaattgatgggaagatagtgaccagtagagggcctggaactaccatggaattctctgtcacgcttgtggagcaacttcttgggaaagagaaagctgttgaagtctctggccccttggtgatgcgtcccaaccctggtgatgagtatactattactgagcttaaccaagtcagctggtcattcgagggtaccccacagattcttgtacccattgcagatggctcggaggaaatggaagctgttgctatcattgaatgtcctgaacgccgggcaaaacgcaaatgttgtcgtagctgcgcttggtaacagtttggaagtggtagcatc

SEQ ID NO: 131819 - DNA, 537 bp, Arabidopsis thaliana
  unsure (1)..(537): unsure at all n locations
ctaattttgtgtctacttaaacctaactttgacatacatctgtctttgttcaagatcagcttaaaacatggctaccagggtttacgtcggaaatctctcaccgaccactaccgatgatatgttgagggaagccttttccggctacggaaacgtagtagatgcaattgtaatgagagacagatacacagataggtccaggggttttggatttgtcacatacagcagtcactccgaagctgaagcagccgtgtctgggatggatggaaagggacctgtatggtcgtagagtgagcgtgaaactcttttggtattggtgatattgatgaatgaatgccggttgattggtgctgaccttgaaaaggtcggaccaaatcttctatccccaaaattaaaaaaaccattccttgnaatggaattgggggctttcaaggggttttcaagnggcntgtttttggcccccttcaaagggtttttttccagggctccttttattttgatncccgggatnangccttaaaaaagngggtcccttnccct

SEQ ID NO: 131820 - DNA, 623 bp, Arabidopsis thaliana
  unsure (1)..(623): unsure at all n locations
gcctctttcaatggaggagatgttgcagaggctggtagagttctgtcactgtgaatgaaacaccgctcttcgaaactgcagctttatctggagaactagggaatagtttggctgatgttgtgatgaatgagagcgctccagtcacaagccaaccggagatagcagcaccaaaagagtttcacccatcggtagtcctgggcgtagctgcagcagtcaaaacacaaggaaaaacaactccgaagaagaaacttcaagcgatgaagaatcaaaagagctctacaaatgattctgttggagagaaggtgagtgttaacaagaggaaaagaggacagccacgcaagttcatagtcgcagagcctaagcagaagattggtgtgtctggtaataattcaaaggctgccactattgaacatgccgatatgactgatgatgataggcctctcgcttcatgggtccacactggaaattcatcatcggggcaatctgtttctcggactcctgatatagggcttaatacagttgtgggaaaagcatgtcgatattgtgggaaactcccccaggggnagagtcgacaatggttctgccatttgtaaaagaagtcacagctttgggaaagtccttga

SEQ ID NO: 131821 - DNA, 457 bp, Arabidopsis thaliana
gaaatcacaactatcgacaatgactaattgatgagaagaatagaaacaaaagaatacaaatttcttcagtcttgggattctaccaaacaagaaatctaagccaggtcattcaaagcgatttctcaagcaaaactagaagatgaaggtaagtattcaaaagatcttgataagagtgactatgaccgatgacaaaacccgagcaaaagcaatgacaaaagcagttcagtttaaaggtaagaagacctttccacaaaaaagattaccaaactctgttggatctaatggttttataggcgtgtcagccgtggaaataaaaggcgatcacaggaaccagatagaggtaaccggcgttgaagttgatatgatccctcttatccaaatactcagaaagaaagtagcgttcgcagagcttgtgagcgtgaccaaagttgaaccaccaaaagaagaagacgagaag

SEQ ID NO: 131822 - DNA, 308 bp, Arabidopsis thaliana
acgcgtccgaagaaacaaaagaaaacaaatttcttcagactttgtattctaccaaacaagaaatctaagccaaaacattcaaagcgatttctcaagcaaaactagaagatgaaggtaagtattatatggtttatgtatgtgtttttatggcttctttgattgacgttacaacatatcatttttttagcaaaagatcttgatatgagtgactatgacccgatgacaaaccccgagcaaaaggcaatgacaaaaggcagttcagctttaaggccgtgggaataaaaggcgatcacaggaaccagatagag

SEQ ID NO: 131823 - DNA, 556 bp, Arabidopsis thaliana
accaaatatataaggctgatcccaacatgacgattaagtatcctacggggactcctacttatgttgctcctgtggatgtttattcaaccgcgaggtctatgggtccaagagctcagatcaatctcaactacaatctttcttggtttttcagcattgactctggtttcacttaccttgttagacttcatttctgtgaggtttcttcgaatatcactaagatcaaccaacgggtgtttacaatctacctcaacaatcaaactgctgagcctgaagctgatgtgattgcttggactagttcaaacggggttccgtttcacaaggattacgtggtgaatcctccagagggaaatggacagcaagatttgtggcttgctcttcatcctaacccagttaacaagccggagtattatgattctcttcttaatggagtggagatattcaagatgaatacttctgatggtaatctggctggtaccaatcctatacctggtccacaggtgactgctgatccatctaaagtcctacgcccgactactaggaaatcgaaaagcaatac

SEQ ID NO: 131824 - DNA, 581 bp, Arabidopsis thaliana
  unsure (1)..(581): unsure at all n locations
gaactagtctcttcttcgaacgcttgcaatggatcttctcaagactccttcctccacggntggtctatcagaaacattcgctaggttaaagtcacaaggcaaagtggctctgattccatatatcacagntggtgatcctgatctttctacaacagcgaaagctcttaaagtgcttgattcgtgtggctccgacataatcgaactcggtgttccatactctgatccattagctgatggtccagcaatccaggctgctgcgagacgttccgttacttaaaggaaccaactttaactccattatctctatgcttaaagaggttattcctcagttatcttgtccaattgcattgtttacatattacaatccaatcctgcgacgaggagtagagaactacatgactgttataaagaatgctggagttcatgggcttctggttcctgatgttccactcgaggagactgaaactctgcggaacgaagctcggaagcatcaaattgagctagtactgctcacaacacccacaactccaaaagaacgaatgaatgccattgttgaagcctctgaaggatttatctatctc

SEQ ID NO: 131825 - DNA, 607 bp, Arabidopsis thaliana
  unsure (1)..(607): unsure at all n locations
gtccanccaagcaattcctnacagccaacnggaggcgtttgagcggtttgagaggtncttctggagcnggnggaccactntcaaaatgcgccactggggcatcaagcaggctcgtcgggtgtaaggagccaaagatttgatcctagctcttatcagcaacgagccgaggcattggagggattgcttgaattcagtgcaaggttgcttcaagatgagaggtacgatgagctcaatgtcttattaagaccatttggtccaggcaaagtttcacccagagaaacagcgatttggttgtccaagagcttcaaggaaaccactactactaagctgggagattgagagacggatttctaattctaacctgttgtgacttgaaaattttccacctttaacagtttatcaagaaaattgtatcaaagtttaactacctaggttgtcttctttaatgagtagcggaccctctttgtctgatacattgaaattctagaaaaaacttggccggtttcccaaaaaaaaaaaaaaaaaaaaaaaaaaaaaaaaaagggcggccgctctagaggatccaagcttacgtacgcgtgcaggtgacgtcataatcttctatagg

SEQ ID NO: 131826 - DNA, 490 bp, Arabidopsis thaliana
ttttttatttacaataagtgtttcttattttctttccaagatcgaaatgccaaatgtatacgagagacacaagtatgttacatcataatatacaaggtgtctccatagttttggtattagcacacaagtcaagagtatgccctacaaggaaaagattttttagatatcctattcaccttgtatctacagactgacaagacactaggactcctgttattcccaatcagcgtcgaagaatccagcatctttcatttctgaatagtagacattctccaaattcagatcttcctcctggaaaaagtctgcaagaaaagtaacatacaaaagaggaacatagaaggcgtggtaacaaacacttgtgatcccatacaaccataatccaaaatgagcaccgtttgccgtaagagcacatgcaaatagggagagcccatttaaggcgagcatgacagttatatacttgtagaatgcaggtcttgctggtaatctcctc

SEQ ID NO: 131827 - DNA, 890 bp, Arabidopsis thaliana
  unsure (1)..(890): unsure at all n locations
gaatatcctttgtctatagttcttgttggtgttggagatggtccctgggacaccatgagacagtttgatgacaacatccccgctcgtgcctttgacaatttccagtttgtgaatttcacggatataatgtcaaagaacattgatccagcaagaaaagaggcagaattcgcgctttctgccttgatggagatcccgtctcagtataaagccaccctcgaactaggcttacttggacaaagaaccggacattgtccagacaggattgcgcttccaccaccaacttatgctactcaatctatgcgcaacagcccaagaacttcccgatcaaccagttttcaaaaccaaaccatatgataatggtgtttcctctacaccaccttcaactactcataacgagagccagcaacagttttgccccgtatgtctagtgagtgcaaagaacatggctttcaattgtggtcatcagacttgcgctggatgtggggaagacctccatgtgtgtcccatttgccggagctcaatctcggttcgtatcaagctttattaagataagtctctcaagaactgaaggaacccgaggtggtctgagatctttcacagccaacaccatcccaacttagatctcatttaccagtgtcctaacatttgtttttactttgaggggaataaccggttcctctcaaaggttttgtagataatctgttgtcaattttgcattctcattgcacatgaaaaaaccacagcagactctctcgtgaataaaggatcctttctctgcggttacacatttttacttaaaaaaaaaaaaaaaagnnnnnnnnnnnnnnnnnnnnnnnnnnnnnnnnnnnnnnnnnnnnnnnnnnnnnnnnnnnnnnnnnnnnnnnnnnnnc

SEQ ID NO: 131828 - DNA, 496 bp, Arabidopsis thaliana
  unsure (1)..(496): unsure at all n locations
aagaatggaaacccatgttttatctcgcattttcctcctagttctctgcatctacagccttaaaaccatggtttatggggctggagaatgtgggagaaatcctccagacagagaagccataaagttggctccttgtgcaatggctgcacaagacacatctgctaaagtgtcagcaatttgctgtgctcgagtgaaacagatggggcagaatccaaaatgcctttgtgctgtcatgctttcttccacagctaggagctccggagcaaagccagagatctcgatgactattcctaaacgctgcaacatcgctaatcggccccgtcggttacaaatgtgggagcttatactcctgccttgaagccagcagccagaaagcaatagacgggttcttcaaaaccaggccaaattggcccaggtccacagttgtattacctgggttccataaaaatatgggcccaaagggggattggcccgaaaggggnnccnttttcnnggg

SEQ ID NO: 131829 - DNA, 475 bp, Arabidopsis thaliana
aatcggagaaaaagctacggagctcgagagaagagtgaatctatgtcgaacccaaacgaaccagccagggctcttctgccttacctgcaacgtgccgatgagctgcagaagcatgaaccacttgttgcttattactgtcggctatatgcaatggaacgaggattgaagattccgcagagcgagagaactaagaccaccaattcgattctcatgtctctcattaatcaactcgaaaaggataaaaaatcattgactctgtccccagatgacaatatgcatgtggaggggtttgcacttagtgtcttttgctaaggcaggcaagcagggtcgtgcaggaagagcagactttgggcacttgccaaacctttttatgctgcgagcatcttctttgaaattctgagccagtttggtcccgtacctcctgatatagagcagaaacacaagtatgctgcttggaaggctgctgacataagga

SEQ ID NO: 131830 - DNA, 540 bp, Arabidopsis thaliana
  unsure (1)..(540): unsure at all n locations
gagagaacgaggccttgatggcaataagaaagttgggatatggagagttgttgttgttcataatctcccctattcagatggaaggcgcaatggaaaggtgcccaagcttcttgtccataggatgtttccaaatgctcgctattctttatggattgacggaaaactagaacttgtcgtcgatccatatcaaattcttgaaagattcttgtggaggaaaaatgctacttttgctatttctagacattacaaacgatttgatgtcttagtggaagccgaagcaaataaagctgctggtaaatatgataatgcttctatcgactttcaagtggatttttacaagaacgaagggttaaccccttattctgtcgcaaagctcccaatcacaagcgacgtacccgaggggttgtgtcattttaagagagcatgttcccataagcaacctcttcaattgtctttgggtnaacggagttcccngnttantttntgggggccaaatagtttntcanccgnagggggtaaggncggggaaaaacaactngg

SEQ ID NO: 131831 - DNA, 488 bp, Arabidopsis thaliana
tcgatttttacgagtcattaattttgtgtgcaggtactgctttttaaatggcttctcctattcccgtcggcgttactaaggaacaggcgtttagtatggcacaaacggagatggagtatcgcgtggaactctttaacaagcttgctcaaacatgctttaataaatgtgtggataaaaggtacaaggaagctgagctaaacatgggtgagaatagttgcatcgaccgttgtgtttccaagtactggcaggtaaatggaatggttggacagcttctaagtgctggcaagcctcccgtgtaatccagtttaaaggcaattattacagaccaaaaagctcatggagggaacacaactctgttctttgtttttctaaagtttaaggcaatcttgtttttattgtcaagaaagttgcatcacatttttggcgctgatttggacaaattatgcaattccatgtgaacccattattattaacctaagggtgaaatg

SEQ ID NO: 131832 - DNA, 543 bp, Arabidopsis thaliana
  unsure (1)..(543): unsure at all n locations
aaaaatnccgggcccaattgcccatcctaacccggcagggctttttcggagccatggagcctatccgggacggttttcattaggaacaatatggcccacgttgtgagacccgaaggatggcttgaagtggaacgctgattttgcgttggacacactcttctccggagagtccatgaactacgggcctggtccaggactcagcagccgagtcaaaatggcctggttacccacgtctttaacaactcggatcaggctaacaacttcaccgtttctcagttcattaaagcgaaatctttggctgccttctacgggagtaacgtttagtgatggcttgtatatctaaactggctcagtgtttctattgtgaatgttcctgttttttgttccttttcattttgttttgcgttttcttgtcatgttcttctaagttggtttgttgtggtatttcacggttttggaaaaatattgataaatggggaatttaagtcgatcggctgaagttgaacaaatcatatattgcccataaaggttaatagattttgt

SEQ ID NO: 131833 - DNA, 569 bp, Arabidopsis thaliana
  unsure (1)..(569): unsure at all n locations
tgcagtaccggttcggaattcccgggtcgacccacgcgtccgacaggcaacttcacaaagataatggacgccataaagaaagctcctgattatagctcgacacgtttcgtcatatacattaaaaaaggtttatatttggagaatgttgagatcaagaagaagaaatggaacattgtaatgttaggtgatggcattgacgtgactgttatttccggtaaccgcagcttcatcgatggttggaccactttccgatcagctacattcgcggtaagcggaagaggattcttagcaagagatataacgttccagaacacagcagggccagagaagcatcaggcggtagcactgagatcagactctgacctctctgtgttctacagatgtgcgatgaggggttatcaaggtacactcttcacgcacaccatgcgtcagttctaccgtgagtgcaccatcacgggaacagtggattttatatttggggttgggcttttgtttttaaaactgcnaatttggctaaagggccccttaccaaaggncncctttntnanaaggcggaaggtttancngtc

SEQ ID NO: 131834 - DNA, 537 bp, Arabidopsis thaliana
aacagaaataggagacttaacaccagcattcttgttcggtacattagaccatccggaacaagtaatatcctcattgattgtggcaagttcttctaccatagtgcccttcgatggtttcccaccttcgggctaagaacacttgatgcagttgtaattactcattctcatgctgacgcaattggaggtcttgatgatcttcgtgattggacaaacaatgtccaacctcacattccaatttacactgctatacgtgatctcgaggtgatgaagaagacccattattacttggttgatacaagtgtcatcatacccggagctgcagtctcagaggttggagtttaaaggcatacacggggaccagccattttgtgggtaaacgatcttgaaggtcaccccattacctgtattggcatggaggtaactaccggtccccttggtttccgctttggtaatgtctgctacataagcgatgtcagtgacataccggaagaaacctacccgctccttaagactgtgatctcctaattatggatgctt

SEQ ID NO: 131835 - DNA, 897 bp, Arabidopsis thaliana
  unsure (1)..(897): unsure at all n locations
cacaaacaaaaaagctatatgtcaatttggctgaactctggccaaatagattgatggattatcgtgggatcaaacatgcaattttccgggcaaaggagagacgaaaagcattgtatggaaaccttgcgaaagagatggatcaaacaaagatgaagaagagtatgaagcagttggtaccaagaacagactgtactgcccagcccaacaccgatttagtggttcagagacctacacagtgggggaaaaaaattgattgttgctccatatgcaaccagcacttccgtggtcactagtcaacctatggttgccagatctaatcagcagcagcctgagcagctaaagggaatctcaagctcttgcaatcctacagaggaaacaagagtggtcaagagaaagaacgaggctgtaatggctgagaaacaagtcgttcttgccctgaagaagcccgaacatccacagacacgtgtaatcccagctcctcagaatctgaacatcccacgaacaaccccggacctgaacttgccaagttgacatcacgattgacaaaggagctcttagaaacgccggagacaataacctctggcctcttccttccttgtattttgaggtggcacggcattagtcctggcgatgccgatgcttggtttttttagctacaaagcatggtttataaagttgtctgtattccagtttggctcttattaagttagttactctatttacgtgtcctttttcaaaactctaatgtataaagttatgattttacgggcaactctttacttttgagtgaatgaaaaaaaaaaaaaaaagnnnnnnnnnnnnnnnnnnnnnnnnnnnnnnnnnnnnnnnnnnnnnnnnnnnnnnnnnnnnnnnagggcaccgtcaaaccaaccgggg

SEQ ID NO: 131836 - DNA, 663 bp, Arabidopsis thaliana
aatagtgtatcgcgtggaaaaggccaggatctgttcctccgagccttccacgaaagtcttgaaagaatcaaagagaagaaacttcaggtaccaacaatgcatgcagtagtagtaggaagcgacatgagcaagcagacaaagttcgagacagagctacgcaactgtgtccgagaaaagaaacttgagaactttgtccacttcgtcaacaaaactctaaccgtagcaccatatatagcagccatagacgttcttgtccaaaactcccaagccagaggagaatgctttgggagaataacaatcgaagccatggcctttaagctacctgtacttggtactgcagccggaggaacaatggagattgtagtgaatggaacgactggtctgttacatagtgcagggaaagaaggagtgatacctctcgccaagaacatagtgaagttggcgacgcaagttgagttacggctgagaatgggaaaaaatgggtatgagagagtaaaagagatgtttttggaacatcatatgtcacatcgaatagcttcggtactcaaagaagtcttgcaacacgcaaaggctcgtgctttacgatgagatcactacaatgttgtaaaatgtttcttcatctctcttacttattctgttcatagaaaaatacaaatactaccc

SEQ ID NO: 131837 - DNA, 559 bp, Arabidopsis thaliana
  unsure (1)..(559): unsure at all n locations
attggtaagagatggcaaaccaaagaaaaccaatccttcctctattacttgaaaagaaaccagttgagcttgttaaaccctcaaaacacactcattgtgaaactctttccctctccactttagacaacgatcctttcaatgaagttatgtatgcaacgatttacgttttcaaagccaatggaaagaacctagatgatcctgtctctttgcttaggaaggctttgtccgaacttcttgtgcattactaccctctctcgggcaagctgatgagaagtgagagtaatggaaagctccagttggtttatctgggtgagggagttccatttgaagtcgctacatcaactctagacctctcctctctgaactatatcgaaaacctcgatgaccaagttgctttgcggccttgtaccctgaaaatcggaatcggctacggggggaaacgtttttttcatcanccncnttaggttttcaaagggtnnccaaagttttccctttnggggggttcnccatttgggacccggatttgcanacggttttgnttaattggaacggtgtngnc

SEQ ID NO: 131838 - DNA, 933 bp, Arabidopsis thaliana
ctaactctttccttattcttgtaccattctaaatcagtaagtccttaacgtacgcaccatgtgtacgttagagaagcgcggcgatctctttctcctaaccctaaccggcgaagacgagcacagattccaccccgacacgatcgcctctgttctctcgcttcttgaacaagcaaagtctcaatccacaaaaggatccgtcctcatcactaccggtcacggaaagttcttctccaatggctttgacctcgcgtgggctcaatccgctggacacggtgctataaaacggatgcaccaaatggtcaaatcctttaaaccggtgttagccgccctcctcgatcttccaatgccgacgatcgccgccttgaacggccacgcggcagcctcggggctgatgtttgcgctgagccacgactacgttttcatgaggaaagaaccgtggggttctatatatgagcgaggtggacatcgggctaccggtgccggactacttctcggcgttggtcgtggctaaggttgggtcaggtatcgcgagaagggagctgttactgagcgggaagaagctcaaaggagaagaagcggtggctctcgggatcgtggactcagcggcgcatgatagtgcggaaggtgtggtggaggctacagtgagccttggagaaagtttggccgctaagaaatggaatggtgaggtgtatgcaaccattaggaagagtttgtatccggagctttgtcggatggttgatttaacggcaaataacttggccactcacaacctctagaaactctcattgtcttgttgggagaaaaatggttgaaatatgaatattgccgacaaaagtcaacgtccatttcactaagcacgtattttaagggaggccgctctagaggatccaagcttacgtacgcgtgcatgcgacgtcaaactcttctatagtg

SEQ ID NO: 131839 - DNA, 1396 bp, Arabidopsis thaliana
  unsure (1)..(1396): unsure at all n locations
cccccgcccccccntttgaatttgcattggccatggcccgggtcgacggtatcgataagcttgatatcgaattcgcggccgctctctctcttctacattgtttcttgaggtcaatctattaaaaatgggattatattcactaatcacaggaagaagaggaccaagtggatttggttcagcttcaacagctgaagaggttactcaagggattgatgcaactaatctcactgcaattatcacaggagggacaggaggaatagggatggagacagcgagagtgctgtcgaagagaggtgctcatgtggtgatcggtgcccgaaacatgggagctgcagaaaacgccaaaacagagattctcagacaaaacgcaaacgcacgtgtcactcttcttcaattagatctctcttccatcaaatccatcaaagcctttgttcgtgaatttcatgccctccatcttcctctcaatctcctcataaacaatgcaggagtaatgttctgtccataccaactctctgaagatggaatcgaattgcagtttgctacaaatcacattggtcactttctgttgacaaacttgctcttggacacaatgaagaacacagctaaaaccagtggttgttgaaggaagaattttgaatgtatcatctgtagctcatatctatacttaccaagaaagaatccaattcgacagcatcaatgacatttgcagttactcggataagcgagcttaccgacaatcgaaactagccaatatattgcatgctaatgagctcttccgtcagcttcaggaagaaagagtaaacttaaccgcaacctcagttcaccctggtcttattctcaccaatctcttccaacacactgctcttttaatgaggttcctgaagttcttcagcttctacttgtggaaaaatatacctcagggagcagcaacaacatgttatgttgctctgcatccaagtgtgaagggagtaacaggaaagtactttgctgattgcaacgaagtcactccaagcaaacttgctagagatgagactttggcacagaaactctgggatttcagtgttaagctcattaactcggtttctaaaaagaactacctcggtttcgatgacaccacttgaatctctacggtgttcttgttgaatgttacctaaagagtgaaaaaaaagtaagaacaagtagagattgtgatgtttctttccacattatcgtatggtaactcatgagatgcattgttgtatgcttaaatattttatcgagtgaatatgtaaccgcgtccctcttttcatagtatggacaataaaaagcggccgnnnnnnnnnnnnnnnnnnnnnnnnnnnnnnnnnnnnnnnnnnnnnnnnnnnnnnnnnnnnnnnnnnnnnnnnnnnnnnnnnaa

SEQ ID NO: 131840 - DNA, 943 bp, Arabidopsis thaliana
  unsure (1)..(943): unsure at all n locations
ctgcagtttcggaccggaattcccgggtcgacccacgcgtccggtctgggatgcttcgaggtgtttgaatgtttttacaaatggcttagatcttcaaccaacccggagaatcatggaggagatatttggtaatggatgctgggaaaacaaggcaagaaacaagtgaagaagcaaacatcattctcaacaacttgcagaatcatgggagagatatttggggtttatggggtcctccttcaaaaatgttcctattaaaaagtagtgagagttttagacttaaaagaattttccagcctttgtttttcatgtggattcttgtgaatgggctgttgtttcactaaaaaaaaaaggaaaaaaaaaaaatatataattataaaaaaagggnnnnnnnnnnnnnnnnnnnnnnnnnnnnnnnnnnnnnnnnnnnnnnnnnnnnnnnnnnnnnnnnnnnnnnnnnnnnnnnnnnnnnnnnnnnnnnnnnnnnnnnnnnnnnnnnnnnnnnnnnnnnnnnnnnnnnnnnnnnnnnnnnctttgaggaacatccccccttttttgcccagtttggggtttatttaacccaaaagaaaggccccccgcaaccccggatattggtcccctcttttcccccaaaacacatatttttgcccaccacaccccctctttggaaaatagggggccgaaatattgggggaaaccccgcgccctccttttttgattatccggggaggcgcccaattttaaatattcccccccggacagggggattagattggggtgtgggttttacaccgccacccaagcccggtgggacccgcgtttaccattctttgccccaaggcgccccctttaatagggcccccggctccctttttaagcattattcttttccccttttcttttttttttggccccacattttcgccgggggtttatttcccccgac

SEQ ID NO: 131841 - DNA, 665 bp, Arabidopsis thaliana
  unsure (1)..(665): unsure at all n locations
atgatgaagatgatgatgatactaaagaaggtggcactggactgtatgacgagcacaagatgagttcaacagttgaatacatggatagatttnttgggaacaatggagagagattgancgtggaagatgactcgtgcacttcctttgaacttgcacgtaatgcagtcaactgtgcagagaaagatgagactnttcctggagagcagcagaagaagttgaaggattgtaatgatccaatagataccaaagtctgggatgcttcgaggtgtttgaatgttccatcataatggcaaagatcttcaaccaacccggagaatcatggaggagatatttggtaatgggatgctggggaaaccaaggcaagaaacaagtggagaagcaaacatcattctccaacaacttgcagaatcatgggagagatattaggggtttatggggtcctccttcaaaaatgttcctattaaaaagtagtgagagttttagacttaaaagaattttccagcctttgtttttcatgtggattcttgtgaatgggctgctgtttcacttttcttggggccctctttcttaaaatcatttacttagaatgtcataatctctctgatttgctgtaaaagattttctcttctttgaactttaaattttttatatacaggaagttttga

SEQ ID NO: 131842 - DNA, 459 bp, Arabidopsis thaliana
gactcagaacctgctgcttggggttctcagggttataattaattctgaaactgagtcaggtcctgctgcttggggtgcttgggacaaaaagaaatcggaaactgaaccaggtcctgctggttggggtatgggggacaaaaagaattctgaaactgaattaggccctgctgctatgggtaattgggacaaaaagaaatcggatacgaaatcaggtccagctgcttggggatctacagatgctgctgcttggggttctagtgacaaaaacaactcggaaactgaatcagatgctgctgcttggggttctaggaacaaaaagacttctgaaattgaatcaggtgctggcgcttggggttcgtggggacagccaagtcccactgcagaacacaaggataccaatgaggatgatagaaatccgtgggtttccttgaagagaccaaagtagagagaggatgataa

SEQ ID NO: 131843 - DNA, 543 bp, Arabidopsis thaliana
  unsure (1)..(543): unsure at all n locations
cgntgtgggctggacncggcggcattcgtggcaggcatngccttaccgcagtcgntgcggtttcctnttttccccnnccangtcgggaaggtncccnaactngncccaaaggcagtggattacagtggnccgtctcttagctactacatcaacaagttcaagccttctgaaattgttcacccttctaccccctccgtcacagaagccccaccggtggccgagctagaaacttcactgccagaaactccatcggtggctcagcaagaaacctcactgccggaaactatggctagtgaggctcagccagaggcgtcttctgttccaacaacaagtagtacctcttaggggcttagcctaggattatatctttgtgtaaaaatgagatgaagcatataccaagattatgcattctgttaatattcggatatacctatatgtatgtatacactctgtcactcttctctttgagtgaatgattatatcaaatctcaaatcctattatttttgctnnnnnaaaaaannnnnnnnnnnnnnnnnnccccc

SEQ ID NO: 131844 - DNA, 428 bp, Arabidopsis thaliana
ctttctccttcttcttcttcttcttcttcttcttcttcttcttcttcttcttctttttctttagaaacaacacaaaccccaaaaacttaaaaaataactctacagagatggctgttggaatccttgaggttagtctgatcagtggcaaaggtctcaagcgctctgattttcttggtaagatagatccatatgttgagatccactacaaagggcaaacccgcaaaagcagcgttgctaaagaagatggaggtagaaatccgccatgggatgataatttgaaatggtgagcagagtttcctggctccggcgccgactacaaactcatcgtcaaaggtcatgggtcatgatactttctcctctgacgatttcattggcgaagccacggtacatgtgaaagagctattggaaatgggagtggagaaggaacg

SEQ ID NO: 131845 - DNA, 524 bp, Arabidopsis thaliana
  unsure (1)..(524): unsure at all n locations
atcagggtttagtggattctccaaatctccacgggtcggttatttcagggagatccaaagaccataaaaggggaacgccactcctacaatctgtaaagagaaagacatagtgaaagaaggtcaagttctatgctacattgaacagctcggtggccaaatcccagttgagtctgatgtttccggagagattgtcaaaatactccgcgaagatggcgagcctgtaggatacaacgatgctctcatcacagtacttccctcatttcctggcatcaagaagcttcagtaagaactgattttggcttaattgtgtttgtgctttgtgtattttgcttcttagtttttctccacatagacaaaaataagctctactccaaaaaatctttgtccgtaccattacctttgttttaccaaaatttaattgaaacttttttgtttaaaaaaaaaaacaaaggannnnnnnnnnnnnnnnnnnnnnnnnnnnnnnnnnnnnnnnnnnnnnnnnnnnnnnnnnnnnnnnngtccta

SEQ ID NO: 131846 - DNA, 547 bp, Arabidopsis thaliana
  unsure (1)..(547): unsure at all n locations
nnnnnnnnnnnnnnnnnnnnnnnnnnnnnnnnnnnnnnnnnnnnnnnnnnnnnnnnaacagataaatgatctatttgtattcctaataaagtctgaaaagaattataaccagaataactgttattataacccgggtgatagtaactagacaaatgtataactgtacaacatttgtcgtttttggtatcatcgatagttttcgtagcttcttgtgacgttagatttacagagtctggttgaagatagcatcttgagcccctcagcggtggatacgcatcatgactggaacaaggttatagtggctatatgaccgttcttcatcacctcaaaagcaacattctgatagccatacacatatgtagatccaaaagggttgctcgttgagcctttgcgtctgaatagctgctggcccacattccccgagtatttccttgacctgatcccagttagtgcttggagtgatcttgtttccacttttgtgtgcttctgccgaatccgctccagccgaaatcacaaagttgcactttatgtatgagttgaaatcagc

SEQ ID NO: 131847 - DNA, 582 bp, Arabidopsis thaliana
tgacttatcaaaggtggtttttgttgccactgctaatagggtttcaacctattccacctcctcttctagacaggatggagctaattgagttgcctggttatacgcaagaggaaaaacttaagatagctatgcgccatctgattcctcgagttctagatcagcatgggcttagttccgagttcctcaagattccagaggctatggtaaagaatataattcagaggtatacaagggaagccggtgttcgtagtctagagaggaacttggctgctttagctcgtgcagctgctgtgatggtggcagagcatgaacaaagtcttccgttgagcaaagatgtgcagaaacttacatctcctctgcttaatggtagaatggccgaaggaggcgaagtggaaatggaagttattccaatgggtgtaaatgatcatgagattggaggcacccttccagcagtcccccagcttttggtggtggatgagaccatgcttgaaaaaatcctcgggcctccaaagtttgatgacagtgaagccgctgatcgagtggcgtcagctggcgtttcagtgggtctcgtttggactactt

SEQ ID NO: 131848 - DNA, 446 bp, Arabidopsis thaliana
ctaaaagataaagatgagagaagagagaagtttatccgataacagcttccgcaatcattatttaacaattgtttttacataatatgtttaaatttatatcatatcattttattatttaatttataataaatcttattattgttactgatatttaatttaataggtcttagtaacatatactgcaactttttcaatttaaagcacaagagtcacttgttttaaacataactcttatttctaattttctatagcaaatttattataggcaatgttcgtcacgttaacgttgcgctagggatctgcgattgaaatttaaacgtcaacaatagcaaaagaaacaaaaaaaaaataataaagatgtctttgcggccacttttacaggggataccggtgtcgtcggcatcgctaagaaaaagcggcgaccatttttttagacgctgcggctc

SEQ ID NO: 131849 - DNA, 597 bp, Arabidopsis thaliana
aatgaattgggtgatattcattgttttgacttggctagtgaacagtggaaggctgtggagactaccggggatgtaccggcggcgagaagcgtgtttccggcggtttcttacgggaagtacattgttatttatggtggggaggaagagccgcatgagcttatgcacatgggagctgggaagatgtctggagaggtttatcagcttgatacagagacgttagtgtgggagaggattgtgtgcgggaatgaagaggagaagccgagccaacgtgggtggtgcgcgtttacgaaagcggttaaggatggtgaggaaggtttgttggttcatggtgggaattctccgaccaatgagcggcttgatgatttggtgttttggggtttctctcatcttaatgtcaattaatgactagctgctttgtgtctttcgtgtttatgaactgtttagtgtgttgttgttttaaggagtttaagtggtgatgatatgtaactgctaagtgtctgagtttaaggagctatgtgtggtgaaactttgctacctattccaaatattttattaagtttggtgttttggtaatttaataaaaaacttgttagtctg

SEQ ID NO: 131850 - DNA, 568 bp, Arabidopsis thaliana
  unsure (1)..(568): unsure at all n locations
cgtatatgtatttacgcagacctttgctacacatcaactcacacatacgtcccccctccggtctattcgacgtctccggtacaatctcctgagacggttggctcacagtcccggtggtttctacagatacattgttccgcggaggcgataacatcggctgatggaaattattgttccgcgcggcgaggacaacgccgttactctcgagtttggaatcaattgcgttttcgattgactcgatgtgcttctgaagatcatcgaactggcgtttgaatgtttccactgcaactgaaaacgcagctaattcgtctatggatttcaaaaattgaggctgcttagattgaccgatcgccacgtccatacttgtagactctgtttcgacaatcttcggtaattctcttcgtcgctgttcagattgatgtcgcccctgcagtggattcgccgtcgttgtgggttgcgccgccaccgtcggtggataattgaacatgagcggacgcgtggnnnnnnnnnnnnnnnnnnnnnnnnnnnnnnnnnnnnnnnnnnnnnnnnnnnnnnnnnnnnnnnnnnn

SEQ ID NO: 131851 - DNA, 454 bp, Arabidopsis thaliana
cactaaatttgcaaattattcaaaagaaaataatttatttgacacgaatttacatcctacgggcagatatagttgcgaaggggagacaattctctgctcctcaaaaggaacaatcctgtaaacttgatcgcaaacaatgaccatttatttgcttattcgttgagaaatactcttcactaggtaaatgagaacctaaaaacgaaacaaatgagttcataatctctacatagtagttacagatgatccctcagcttgcaagctatggtcattgagccacgagataatatcggacaagacacggagaatcatgtcgtctggttcgccttcgagcagagaatgataagcattttcatacaaaactatcttcttgtctggacttttggctttctcgtacaactctctgctcactgaaggatctgccactggattagctttctcatgtagaatcaatatc

SEQ ID NO: 131852 - DNA, 427 bp, Arabidopsis thaliana
ccaacgtataccaagagtttcggagacgacgtcgttttgtctctgcgccgcgttcttagtctgagcgcacgctgggtcgtttctcctctaacgtcaactgtgtttttgcatcctcagagggtttaacatagttggggctaggaattttcatggtttctgttggttctaaatcattgccatctaggaggcacaggaccattgaggaagatagcttgatgggtgaacgaggaaagtctagtaacaatcacagtgaaaggaataagggaatgcgtaggaaggaccataagggtaaccgtggatttgatggagatagcagcaagaagaaccaatccggtggtgcccccaatgtaaagccagcatcaaagaaacactccgaattcgaacatcagaatcaatttgtcaggaaagagattgatccagagacttc

SEQ ID NO: 131853 - DNA, 437 bp, Arabidopsis thaliana
gaggatccatggatatttcttgtaaaagtgtctttctaatcgtggctaagtcttcagttctatgcatgggggggtatagaaaaattgaagcaaaatagctattaaacgagaactttggtttactaaagacatcgacatattatattgttttagctcggtagaaaccaaatacttttcctaaggattccgttaaatagaaataaagaacgaagtaactagaaagattgttcgagttggcccgatctatcttctagaaggatcatctagaaagcaaaattttctgtgaaagtacccagacggaaaaaagctcacatagatgttatgggtcgaatttttatttcgttcccgtctttttttatttgggaatttctccatccatcataaaggagccgaatgaaaccaaagtttcatgttcggttttgaattagagacgttaa

SEQ ID NO: 131854 - DNA, 687 bp, Arabidopsis thaliana
  unsure (1)..(687): unsure at all n locations
ctgacgcgtggtctgtagggttttagtcggaggaagcaaggggcatgcgggttattactacacctgagggcttttcccgacggagttgagcttagaagctttctctccggttgacctacaacgggagggtccgaatcttcgtcccgggattatatctcctgaacctcagtcgatgattaaatatgggacgaatttgaagttgaaattttcggtcaccggagaagttacgactccggcgaaagtgactatggtatttccgacgttcacgacgcatagcttcgcgatgaatcagagggttttggttttggacaatgttaagtttacgaggaaaggcaaatcgccgatgtatgaggttcaagtgaggactccgaggtcggcgaatattgcatggcctggttattatatgatttctgtggtgaatcaagacataccaagcgaaggtgtttgggtaaagttagaatgattcattgacttttatttaatatctttatttttgtgtgtaattgtgttatattactgatatcaattgtatatgaatgtaataagaatatgtcttctcaacttgatgataataaattaattacctaaaaaaaaaaaaaaaaaaaaagnnnnnnnnnnnnnnnnnnnnnnnnnnnnnnnnnnnnnnnnnnnnnnnnnnnnnnnnnnnnnnnnnnnnnnnnnnacatt

SEQ ID NO: 131855 - DNA, 479 bp, Arabidopsis thaliana
aacacttcaaaaaacatagcaacttcacttcttcctcctccttcctagtttctcgtttggtctcattctctttaattacctcctcctctgttctgctcatcccctgtttttatagttttatataaaatggtgagccaaaacgtcgtcgtatcagacgccaagaccgggatcataacgggctctacagtctctaactcctctgtctttactccgaccgctcaaaaaccaccgactgctcctggttacatctcagtttccaggaaaaaactcctcataaaccttgaaatcaatggagctgatcaaagtcaaagacttaactcttgggttgactccatgagagcttcttctcctacccatctcaaatcactttcctctttctcttccgaagaagaacacaattcttggatcaaacgacatccatcagcacttaacatgttcgaacgaatcatcgaagaatcaagaggaaaacaaatcgtcat

SEQ ID NO: 131856 - DNA, 715 bp, Arabidopsis thaliana
  unsure (1)..(715): unsure at all n locations
cgatactaacagagccttcacagagagatgtttcgattcaatttccgtcgtgaaatctccaaatataccggagtttatcaccggaagatgcacagcggtctagaagatgccggtccgatggcgtctcgccttaaatcacgttccgttgtccggtttagcggaccggatacggttaagtttcttcaaggtttgttaaccaacgatgtacggagattcggcgaatcctccggcgagaagaactcggcggttcctacgccgaacatggcttccgttacgaatccgcctatgtacgcagcgttgttaactcctcaaggaaggtttctatacgattttttcttgtatagcccttcgagacccgatgaaaagcttgatcggactggttcaggacccgggtcggattcgggtcgtgatgggtctgttgagttgtttgcagatgttgatgttgatgtcctcgatgaattgcttgaaactctcaaaaaatatcgcttgaggtccaaagtggatattgaaaacgttgcagaggagttttcgtgttggcagcgttacggtaggaatcttactggatcatcatctgttggttggggtggtggtgttgatcgtgctggtgagtctacagctagtggtnataagtatggatggcaatggtataaggatccgaggttggagtgtctcggttacagaagtatctttccgtctgatgcaactccgcctttag

SEQ ID NO: 131857 - DNA, 373 bp, Arabidopsis thaliana
gtcttcttgttgattttttaaattttgggcccaacaaaaatttactagaccaacccacttagaggaagtaaaaatttacttctctttttttactcagaggaagtaaaaagtatcggaggaacaaaagagataaactcatgcagaactcctttacttattcaacacaatagtctaacttgtagggattcattgaagagaaattgactaattcttcctaacaactgacaagtagaacaaggagaagcaacttttctccatgaaacaaaccaagagtttgaggtgatgccttagcattcttcgaaacaatcaatcacttcagcatatttggtgagcaagtttataccggagagaaagcccaaatatgtttactggg

SEQ ID NO: 131858 - DNA, 601 bp, Arabidopsis thaliana
  unsure (1)..(601): unsure at all n locations
gaagggagggcaggcccccattaaaaaaaagctncccntttgagaaaagnccaatttaatcgggnccgaatggactttggacggattcctaaggatcatcccatttaaatttggtcaagtatttgatgttccaaatatcatagtatactgatgacttctttttccccccgatttgttctccatttagcatatctgcaacccgtttagctacgctcttcttagcaaactccacccacccttcagaaaacctttggccacgaaatccaccagcccgcttacggtgcacttgtgcttcagaatcttcaggtgcaagataaatccttccgagttctccatattgagcgagaatacggcgaagtctaacgtgatccatgtgtggtgggatacgacttaagtagcaaacacctctattgtcagctttcgaagcttccttaagcaatttctctttcaacttctttttctttctatcagccttttgactcttcatcgtttccttggactccttctcctcggatattccatccgtaagctcgtgagattcctcactctgcatcttcttcagcagcgaaagtgagaaagaaaaagaagctagtgccgtcgg

SEQ ID NO: 131859 - DNA, 593 bp, Arabidopsis thaliana
cgtccacacgtgcccaaattcggagactggaccgaagatgctccattcacggtcgtgttcgaaaaagcaagcaagagcaagaaaaatatgaacgtggccaacccgaatgaatatccagatatgaatccaaacgctgcacaaaatcgaaatatgtctaggcctgaccaacaaccaccaaaccataatgttagaccaagacatgaaagattcaatagcagagacgaaaccgatttcagaccgtctcctgcacacaatgaaagaaacaacggagttggatcagttcctcccacaccagaaacatacaaccatcaaacatatggtggaggtggcagatcaatgggaaatccaacagaaataaatagacggcaatcacgtgatcatgtcccggcgcggccaatacgcaatcttagagggcaaagtagtgaaagggtatgcataactttaccattttatagtacaaaatatgtgtcacaactcataaatatatatcgctaagtaagtgtatttttctcaattaggtggcgactattcctccatttcctggaacgggttctaacatggaaaatcagagttacacacttatctttgacaaa

SEQ ID NO: 131860 - DNA, 499 bp, Arabidopsis thaliana
  unsure (1)..(499): unsure at all n locations
ttggttcanttctccaccttaagggcagaaaaaaggattgatcaaattctattgagtctgactcatagtgatcatttatcaaagantgactctggttatcaaatgattgancaaccgggaacaatttacttacgatacttagttgacattcataaaaagtatctaatgatttatgagttcaatacatcctgtttagcagaaagacggatattccttgctcattatcagacaatcacttattcacaaacttcgtgtggggctaatagttttcatttcccgtctcatggaaaaccctttcgggtccgcttagccctatccccctctaggagtatttgagtgatgggttctataggaactggacgatcctatttgggcaaatacctagcgacaaactcctatgttcctttcattacagtatttctgaacaagttcctggataacaagccgaaaggtttttttattgatgatatcgatattgatgatagtgacgatatcatca

SEQ ID NO: 131861 - DNA, 390 bp, Arabidopsis thaliana
tccgcgggtcgcacgccacggcgtcacactgacggcattaccatactacattccgatcgcagattctgcgctacaggtacatgaactggacaacttattctacctgaagcactcaagcttttgccattatatactctcgccttaaccaaaggtgtggggttacgaatggacgggagaattgatgaccgatcattttggataaaccatgtgtcttcattgtccactcctttggctattccgctagtttatccaaggatgattgctgtccatgatcttgatgcaaatgataatgaagaaaatgtggttccttgtccaatcccattacaaagtgaacaccttagcgatgagggagtctattttcttgagaacggtgaagatggtttgatatat

SEQ ID NO: 131862 - DNA, 486 bp, Arabidopsis thaliana
  unsure (1)..(486): unsure at all n locations
attccactttagaacaatttgtgagagatgtgtttttaatagggacaggtgcaatggaatacagttcagcacacactgtatattatcgacaggcacgggctatacaagagttggcaaaaaaggattttgagaatttaaggcaagacagtgatgatgaagaaccacaaagccaacaacagcaacagcagcaaccaaaagttgccagaagaggccgtccgccaaagaaacatcctgagccgtcttctattgaccgcactgcttctgaaatgtcagctgatgctctcattcctggggatagctctaacaagttttctggtgcttacaatttaagaaaggctcctccttcatacaaattccgccaagcagaatcatcagttagaatcantcataacagtgnacccagngtggttggtcggtaggcttggggngngcggatttcccatctttcgggttgtgaaggcgggttaancaaggtnttgggggttg

SEQ ID NO: 131863 - DNA, 726 bp, Arabidopsis thaliana
  unsure (1)..(726): unsure at all n locations
gggaaaaaaacccaccctttccnaaaaaagtttaaaagggaaantcccncgnaaannacggtnnnttgnatgnaacgaaccccaaaaaagcttccaaangngggaaaacctccggncattnctaccgnggccgttgataancanaaccttatgtacgcagatgggtcncgacaaaccctcaatggagaccgtttgttgaccgcgactggcggtttggtcactaccaaatggatggtcttcaagacccgttgagtcgcgtggctcgaacccttctcatatggccgcttatcatgaaaaagaggataagaaaagttaagatcaagcacaccgatgatgctgggcttgttctacatcctgctttagcctcaccctttgactagagaaagaggtagaagaaatccgagtgtacaaactcatttccctgtatgatttgccaaacctttgggcctttggcgccattagagacgattcaccgttttgttgttaatgtttaaataaaggcaaaacggcatgatgttcggatgaggtgctttgttttttacatacgcctcgggactttaaccaacgacatttggttggaccaattaatagtaagtttaaccgacccaatgtccggtttttgttcaaaaaaaaaaaaaaaaaaagnnnnnnnnnnnnnnnnnnnnnnnnnnnnnnnnnnnnnnnnnnnnnnnnnnnnnnnnnnnnnnnnnnnnnnnnnnnacaatc

SEQ ID NO: 131864 - DNA, 677 bp, Arabidopsis thaliana
tgtttccgacagtgatggacatcaataagatacaagagattttgcctcacagattcccatttctgttagttgatagagtgatagagtacacagctggtgtatctgcggtagctattaaaaacgttaccattaatgtctgcttccttcctgggcatttccctgagagccctataatgcctggagttctcatggttgagccaatggctcaagtgggaggtatagtgatgctacacccagaagttggcggatctagaagcaacttcttctttgctggaatcgacaaagtcagattcaggaagccagtgattgcaggtgatacgctggtgatgaggatgacacttgtgaagttgcagaagcggtttgggatagcgaaaatggaagggaaagcatatgtagggaactctgtggtatgtgaaggagagttcttgatggctatgggaaaagaagagtgatcacgcctttgtttctttcttcttcatatgggccttgtggctgctaattagttgtcacatcctaagttgagtctcatttctatcttcaatttatgatgtttgtttgcacattatgattatattaaaaaagcaacttcagttttaataaaaaaaaaaaaaaaaaaaaaagggcggccgctctagaggatccaagcttacgtacgcgtgcatgcgacgtcatagctc

SEQ ID NO: 131865 - DNA, 389 bp, Arabidopsis thaliana
acggtttgattctccaaatcaaaagagattacttgaagagagaggtttgtgggaactaaagttaggttttggttgttcttgcaagtgagttgaaactctgtttggccgcaataattgggtttattgactccccagaaaggatacgtcacgtttggcaacagcctcggacctgcgtactaatacgagaattgggccaataataagactaaaaatgatatggattttatctaacatggatttaataagagattgacaaaaaagatccatctggaacagagtcaatctaattgtagtagggctatttttcttttcttttttttttgtcatactcatatatattgggtttctaattttcaacaaatgcgttgagaagaatagttccataaata

SEQ ID NO: 131866 - DNA, 506 bp, Arabidopsis thaliana
  unsure (1)..(506): unsure at all n locations
gatgacgggtgacaccataagaagaaatgccttcagctatctcagagtaaagacttgcctccttagcaccacgtcctgctccactaacaccagattttgcatcgataatgatgttttcatgtttgatgagatttgcctttagtaaaggaacaagaggaagttgaatcgtagtcgggtaacagcctgggttagccacaagtcgtgcctttttttatgtcctcccttagtatctctgttagaccatacacaacttctttctgtaactctactgccttgtgaggctgaccataccattcttcatattctgcaatattacgcaaccggaagtccgctgaaagatcaacgattttcaatgcagtaggcagttccttgatgatttcctgagttgttcccttctgtcgtcttctcgcagccgtacggacgcgtgggcgcacgcgtggnnnnnnnnnnnnnnnnnnnnnnnnnnnnnnnnnnnnnnnnnnnnnnnnnnnnnnnnnnnnnnngta

SEQ ID NO: 131867 - DNA, 662 bp, Arabidopsis thaliana
tgttaaagtgatgatgtgtcaatcatatggagagagttggccaactttcatatatatgattcttaaacctgtaaaagttcagttcacccgacgaaccaacttccaagtagtagtccaaatcatagattcttttgaggttttaaatgtaccctcacgtcagaatctacttaagtctttcccctttttctgtctctctttcaccttttcttctccatcgatcttacctccacggaacttcttatttaaatcaaaaaaattcagaatcttttaatctcacgcaggcaaatgtctcgtaatttaatctatagaagaaacagagctctctgttttgttttaatcgtgttctgcttcccttaccggtttggcgctagaaacacgccggaggcggaccaatccacagcaaaagcaactcaaataatacacgtcagcaattccacgtggcatgatttctctcgtcttgtagatgtccaaataggtagccacgtcagcggcgtatcagagctcaaaagatacctccaccgattcggttacgtcaatgatggctccgaaatattttccgacgtgttcgatggtcctctggaatcggcaatctctctgtatcaagaaaatctcggtttaccaataaccggaagactcgacacgagtacagttactctcatgtc

SEQ ID NO: 131868 - DNA, 1571 bp, Arabidopsis thaliana
  unsure (1)..(1571): unsure at all n locations
ggatggccgacttggtccggttattcaactgttttcttccaccaccaagcagacgacggttggtggagcatcttccgggtagatataccggagaatttcacggaatataccgatttcccaatcacaccaatccgagtcactccatctggactccattgcttcactcctgcagctttccgcgacgggaaacgaatcgccttagcaactcgccgtcgcggcgtcaaccaccgtcacatcgagatttacgaccttgaaaacacaacgtttcagccggtgactgagtcactcaatccgagtttccaccattacaaccctttcgtgtctccagactccgagttcctcggctaccaccgattcagaggcgagtcaactcaaaggcgagtcaaatcggtacctaaacatcgaatccatcgtttcaccaatcaaaaccctccgattactaagaatcaacggatcgtttccatcatcatctcccaacggtgatctaatcgcattgaactccgatttcgacatcaacggtggaatcaaagtatctaaatccgacggttcaaaacgatggacgttgatcaaagaccgtacagctttctacaattcatggagtccaacagagcgtcatgtaatctacacatctctgggtccaatcttctctccggcgagaatcgcggttcagatagctcgaatcaagttcgatccatcagatctcaccgctgataaagaagatcttccatgtgatgtgaagattctcactctagagaacactgggaataacgcttttccgtcttgctctccggacggtaaatcaatcgtgttccgatctggtagatcaggtcataaaaatctctacattgtagacgccgttaacggagaatctaacggcggtggaatacgacggttaacggatgggccatggattgacactatgccttgctggtctccgaaaggagatctcatcggattctcatctaatcgtcataatccagagaacacggccgtgttcggtgcttacgtggtgagacctgacggtactggtttgaggaggattcaaatttcgggaccggaagggcctgaggaagcggcgagggagagagttaatcatgtgagtttcaataaagatggtgattggcttgttttcgcggcgaatttgagcggagtaacggcggagccggtgacgatgccgaatcagtttcagccttatggggatttgtacgttgtgaaattagacggaacgggattgaggaggctgacgtggaatgggtatgaagatgggactcctacgtggcatactgctgatgaattggatttgagtcagttgaatttgaacggtcaagatggtgacaagcttgaaggtcagtttgaggagccgttgtggatttcttgcgatatctgaatgcgatttctccttttcttataaaagactgtcatatttatgtaatctcgctttttttatttcaataaaacaaacaaaaataaatgcatttagcctttaaaaaaaaaaaaaaaaaaaaaaaaaaaanaaagggcggccgctctagaggatccaagcttacgtacgcgtgcatgcgacgtcagag

SEQ ID NO: 131869 - DNA, 994 bp, Arabidopsis thaliana
  unsure (1)..(994): unsure at all n locations
aaaccgggggggacccacgcgtccgaccatctcctcctcctctatcttcacaccatcaacatcatcaagaacgggggggaatcgcagattgtccggcgccttcaccactgccaccgcatctcatatctccaaagaagtcaaaccgtaaaggttcaatgactcctcctccacaatcgcaccatgctccttctcctcccattcctgattctttgatttctcctgctcacgctccagtctctttctctatgaaacgcatctccccggctctagcaccttctccaacccaagtgtttcctctcaggtcctcttcaagaccttcaaaatctcggaaattccctctaggtccacctcttcaagcatttcctcctcctccccctaattcagattgttcttcaactatttgtttggaaccgtacacaaacacacctccgggatctccatgtggctgtgtctggccatttcaagttgagctacgccttagcatggcgctctacgacttcttcccaatggtttcagaatttcctcgggaaatcagcgccggagttttcatgaaacagagccaagtccgtataatgggagctaacgcggccagcgaacaacctgagaaatccattgtnctaatcgatttagtaccgcttggagataaattcgataacatgactgcaatgctgacttaccagagattctggagtaaaaaagtctatatagatgaaccaatctttggcggatacgncgtgatttacgtgcgtnatcctggtttacccgcttccccgccaacttctggtatgaccattatagntcaaggaccgtactctggtaataataacggaagggccggtcaaaaccgcttcggagttnnttgttccaagaagccgngcaagaaaaggggtcaattggtggaggttttctgtnattgntttttccgaactgntttatngggttattgttncgnannggtttggtnttgggttccgggnaaaagggtcgcngngta

SEQ ID NO: 131870 - DNA, 795 bp, Arabidopsis thaliana
  unsure (1)..(795): unsure at all n locations
gggactgattgcacatttccagtctgttcttcatatgggaccgacgattatatacaatgtgcctggtcgaacagggcaagatataccgcctcgtgccatcttcaaactttctcagaatccgaatttagctggtgtgaaggaatgtgttgggaacaagcgagtcgaagagtacactgagaatggggttgttgtgtggagtgggagggatgatgtgtggcctgattccagatgggattatggagccacaggagttataccagttactagtaatttagttccgggtttgatgaggaagttgatgtttgaaggtaggaattcatctttgaactcaaagcttctacctttgatggcttggctgttccacgagccaaacccgattggaatcaacactgctttggctcagcttggagtttcgaggccggtttttaggttaccatatgtaccattgccactgtctaagaggcttgagtttgtgaaactggtgaaggagattggacgagagcattttgtgggtgagaaagatgttcaggctcttgatgatgatgattttatccttatcggtcgatattagcatacttttttttttttaatttttggttcctttttgtttggtgttaatgaagaagagatggttctatcatttggttttatgtagctgatgaatgaatgaaaactcaaggaatgatttccnaaaaaaaaaaaaaaaaaaaaaaaaanaaagnnnnnnnnnnnnnnnnnnnnnnnnnnnnnnnnnnnnnnnnnnnnnnnnnnnnnnnnnnnnnnnnnngtacctaa

SEQ ID NO: 131871 - DNA, 651 bp, Arabidopsis thaliana
  unsure (1)..(651): unsure at all n locations
aagacgcagagcatttggactggccaatgagactgagaatcgtaatgggaatagcttactgtatggaacatatgcacaatctaaaccctaaacccatctctcacaccaacctcaactcttcttcagtctacttggcaacagattacgcagccaaagtctcagactttacgttcctcagctccacaccacttgaccccatgaccaacgtatccagctttggcgcccttctacaagagatcatcaccggaaagatcccggatccagattctctgctccaggaagaaaccaaacccgttgcagacccgactctgaaaagctttcaagaggaggtcatggagagagtgtgggaagtggttaaagagtgtttgagtcagaaggtggaaatgaaggaagtggtggttaagctgagagagatcaccggaataacgccggaagcagcgttgcctagtcggtctccggcgtggtgggcggagctggagattatatccaccgaaatgtagatatatcaattgcacagtaaactaatgtaccatcatcatctctgtactctctgcaaattcggacgcgtggnnnnnnnnnnnnnnnnnnnnnnnnnnnnnnnnnnnnnnnnnnnnnnnnnnnnnnnnnnnnnnnnnnnnnnnnnnnnnnnnn

SEQ ID NO: 131872 - DNA, 775 bp, Arabidopsis thaliana
ggaggggccaattgggatccctttattgtaatagatcaaatccttcccttgttccggagttggaggggcttttttcggcggccaggttttaggttggcctccattgggaagtctgaattgaggaccctaataagtgttttttccgaaaccaagaattcgggattccccccttttttcttggggtcaggaaggaatggatcggtttaaccgtttttttaatgtaatctatttctcaattcgaaatgggagcaggtttaaaaagggattttagagtgtttagggttaggccagtagggtctcttagcgccttctttttttttctcagggaggttatttcaccaaatacttcctatggtaagaaagagggggggaccaggcacccttgaagagcccagtccaacgaagagttgtatgctgcgttcgggaaggatgaatcgctcccgaaaaggaatctattgattctctcccaattggttggaccataggtgcgatgatttacttcacgggcgaggtctctggttcaaatccaggatggcccagctgcgccaaggaaaagaatataagaaggatctgactccttcatgcatgctccacttggctcgggggatatagctcagttggtagagctccgctcttgcaattgggtcgttgcgattacgggttgggtgtctaattgtccaggcggtaatgatagtatcttgtacctgaaccggtggctcactttttctaagtaatggggaaaaggaccgaaacatgccactgaaagactctactg

SEQ ID NO: 131873 - DNA, 1152 bp, Arabidopsis thaliana
  unsure (1)..(1152): unsure at all n locations
tgtcgtgtcatccagaaggcaattnaggtggttgatctagaccagaaaatccaaatngtcaaagaacttgatggacatgtnatncgatgtgtacgtnatcagaatgggaaccatgtggttcaaaagtgtattgaatntgtgcctgaagaaaacattgagtttatnatttnaactttctttggccatgtggtgaccctctccactcacccatatgggtgccgtgttattcagagagtattggaacactgccatgaccctgatacacagagtaaggttatggaagaaatcctgtccactgttagtatgctggcccaagatcagtatggaaactatgttgttcagcatgtgctggagcatggaaagcctgatgagcgcactgtgataatcaaagaattggcggggaagattgttcagatgagccagcagaagttcgcatcaaacgttgttgagaaatgtttgacttttggaggtcctgaggaacgagaattgcttgtgaatgagatgctgggaacaactgatgaaaacgagcctcttcaggcgatgatgaaggatcagttcgcaaactatgtagtgcagaaagttttggagacctgtgatgaccaacaacgtgagctgatacttactcgcatcaaagtgcatcttactgctttaaaaaagtacacttatggaaagcatgtcgttgcgcgtattgaaaaactcgttgctgctggagagaggagaatggctttgcagtccctaacccagccccagatggcttaagcccttaagtaatgtacagcttaactagggtggatggggctcccgtagcgttttgagaattaggtaagatctaaaccggaaataatttgcggggaaattgtgaaggagagctttgttttctctgctaaatctgtaaaattgtgtagtttgcttacggtttttttatacatagaacgaaacatccctctttaggctgatgagtgagagataaaaaggcagagaatggtgtaaagatggattttagggtttccttcccccaaaagagaatggctttttcattgccaaatgtgtaaaagtgagaatatgtgttcatgcttttaggacaatcccagtttagagtttttttttttcccnnnnnnnnnnnnnnnnnnnnnnnnnnnnnnnnnnnnnnnn

SEQ ID NO: 131874 - DNA, 513 bp, Arabidopsis thaliana
aaatgccgcattgaacctacctttctttttcgcaatcgcgaaccacaggctcaccgtagtctttttcgatggacactacatcaaacctataaaggctacttatatcactatatcccctggcgaaacactagacatgttattacacgctgaccaagaccccgaacgcacttattacatggctgccagagcttaccaaagcggaaatatcgatttcaacaactccactaccataggaatcttaagttacacctcttcatgcaaagctaaaacatcatcgttttcaggatattacccaacccttcctttttacaatgacacctcagcagcttttggattctttaccaagatcaaatgcttattctccggtcaagttcctgtccaaatctctcgtaggataatcacgacggtttcaataaatcttcgcatgtgtcctcaaaactcgtgcgaaggtccaaatgggtcgagattagcagcgagtatgaacaacatatcgtttgtcacaccaagtcacgt

SEQ ID NO: 131875 - DNA, 604 bp, Arabidopsis thaliana
  unsure (1)..(604): unsure at all n locations
ctanttcaanggaagggcnggccccnttnggagggcccnanananttaatttcccnccnaaaaaaatgncntncaaccttcagcggaacatttttgctanggccctcccaaaaaagcatacaccctgtaaggggtgtgagaagaggtacacgttccttctgggaaagtctggccgtacaagcaaggcctgcttatagctcgtaatggcagcttctacatgcccactatccttgtaagctgaggccaggtttgcgtgagcttcagccattgtaggccggaagtttatagcatgcatgtaatcctgaattgcttcagttaccctcccgatctctttgtaagtattccctctattaaccagagcgtcagctgccaatgggtcaatacgaagaacctcattatagcaggatatagcatccgagtaatttccctgttgcttgtaaattatagcaaggttattgaacggagcagatagccctgtagttacagccagagtagccttgaataatgaggaagcaggacccatcatattccactccatataaatgtttccaagattagccatggcttgtggatgatttggttgtaaagcaagacattgattatg

SEQ ID NO: 131876 - DNA, 536 bp, Arabidopsis thaliana
  unsure (1)..(536): unsure at all n locations
ttcaagaaccatgaaatacacaaaattcttctcgagtcagatcttttcgggcaaggggaagatgttttggctctgttcttanctaancggtatttgaacatgtgtctggtatacctaataaatgaaagataaagacaatggttacctatccttgtaagctgaggccaggtttgcgtgagcttcagccattgtaggccggaagtttggagcatgcatgtaatcctgaattgcttcagttaccctcccgatctctttgtaagtattccctctattaaccagagcgtcagctgccaatgggtcaatacgaagaacctcattatagcaggatatagcatccgagtaatttccctgtagtaaaggagaagaaaacaagctaaatttgtcaaacatgagcaagactacaaaaatgattaaaaattgataatggagcacgtagctacctgttgcttgtaaattatagcaaggttattgaacggagcagatagccctgtagttacagccagagtagccttgaataatgaggaagcaggacccat

SEQ ID NO: 131877 - DNA, 463 bp, Arabidopsis thaliana
  unsure (1)..(463): unsure at all n locations
taaacccccaaatccatgagtacaacacttcttcttcttctctctaagtccagttaaaaatcatctctttgcaatgttgactctttaatcttcgatttataagctctcgaaggaatctattaccttcaatctctctcgttgttagctctttgaattgtagaagagaatgggttgcttacttggttgcttcggtcgtcggaagaatcgtcgccgtcagagacgcagagaatctttccagccacgtttaaacagaatctctgaggaagctgcaaaggatgttcttttgaatcttagggttcctactgttgaagaagtcccaaagtatgcaaaagattcaacttgttgtggaagtccctaaaattttcggnggttgnctccaaaggggtaatcattttgaacgttttttnngaaaagtcccntnaaaggttntggaacnccgntcaactnnnntcttntnncaagg

SEQ ID NO: 131878 - DNA, 715 bp, Arabidopsis thaliana
  unsure (1)..(715): unsure at all n locations
ggaattcgggtcgaccgcgcgtccgacttttggaaggaaaacttgtgtacactattgaaacgacgtcntttttgaaagcaaaacataacccagtatgtttaggtctcgccggaaaaatcgaatcaagcatcttcttctttcacgtacgaaacaaaaagctcagagcagagtcgaatcgcgatgaagcatcgagttcggtgttcatgaaggtcagagagttaagtattaccagaactggttaggtcttagtgacaaacaaggtattcatgttatccatccctgatactagaatgtggaatctagcatcgagttatcttacgggaaacattggaccgaaaaacgatatcagaagaccggtccatgctcatgcggagtgttcagatgacgatgtatcttctgtaggtagtaaagacggaggtctcgagtgtcctatatgcttgggggaatcattttaatatagttgnaaacggttccgtatggtgttattgggtgttgggcatacggtgcttgtaaaaaccctgcatttttgtggggccttcaaattgggcttttttttgggaatttcccttttttanccccgggtcaacgtttcccctcttcaatttaattcccctgggggaaaccttttttnttttcccgcttggntttaangggccccntaggttccctncaaaggnccanttttgnctttngnttgcnnggggggtaattnggg

SEQ ID NO: 131879 - DNA, 531 bp, Arabidopsis thaliana
  unsure (1)..(531): unsure at all n locations
nnnnnnnnnnnnnnnnnnnnnnnnnnnnnnnnnnnnnnnnnnnnnnnnnnnnnnnnnnnnnnnnnnnnnnnnnnnncttctttccacgcgtccgcaaaaagctcagagcagagtcgaatcgcgatgaagcatcgagttcggtgttcatgaaggtcagagagttaagtattagcagaactggttaggtcttagtgacaaacaaggtattcatgttatccatccctgatactagaatgtggaatctagcatcgagttatcttacgggaaacattggaccgaaaaacgatatcagaagaccggtccatgctcatgcggagtgttcagatgacgatgtatcttctgtaggtagtaaagacgaaggtctcgagtgtcctatatgctgggaatcatttaatatagtttgaaaacgttcccgtatgtgttattggtgtggacattcgattgtgtaaaaaactgcaatttttgggccttcaatcgggctatctgtgaaaattccctcctcaccccggtccagttccctntnttcaattt

SEQ ID NO: 131880 - DNA, 534 bp, Arabidopsis thaliana
  unsure (1)..(534): unsure at all n locations
tacaaatcccatcgatcttttcggaatcttccctcattatgctcagccaccattaccagagctccattgtttcagttctccgttcaacgattatcggaattattcacaacactattagtatcaccgtcgccaaccgattttgattaccagctttggtgacgacagtcgtgattaaggaggttttggtaaatttcttcgttcctgtttgttttcaaagatggctgctttgaaaggttatggcttgtgttctatggactctgctcttcaattcccctgtcctaagctattcaatagctacaagagaaggagctcgaaatgggtctctcccaaagcagctgttgtacccaatttcccatcnnccaatgngnagtttnggagggttaaaaaacagggcaaacacagncggcattaaagctctacgggnngtcacagnttttaaaacaccgggtttacccgnttggagntttggcctttagcctcggtggcnttgnannttnggtcaaaacgggcttaagggnaatnttggggcactgg

SEQ ID NO: 131881 - DNA, 1141 bp, Arabidopsis thaliana
  unsure (1)..(1141): unsure at all n locations
cggttcgacccacccgtacggccctcgaacagcagtttcagcaggaagtttctatgcttgcttttttgaagcaccctaacatcgtgaggttcattggtgcgtgtcgcatgaaaccgatggtgtggtgcatcgtgactgaatacgccaaaggagggtctgtgaggcagtttctgactaggagacagaaccgagccgtccctttgaagttagctgttaaacaggctttggatgttgctaggggtatggcttatgtccatggacgcaacttcatacacagggatctcaagtcagataacctcctcatctcagcagataagtccatcaagattgcagattttggtgttgcaagaattgaagttcaaaccgaagggatgacaccagagactggaacttacagatggatggctccagagatgatccagcacagaccctacactcaaaaagtgggacggggtatagttttgggaatcgtgctgtgggagttgattacaggtctgttaccgttccaaaacatgacggcggttcaggctgcatttgcagtggtgaacagaggagtccgtccaacagtcccagcagattgtcttcctgtgcttggagagatcatgacacgttggtgggatgcggaccctggagtccgtccttgttttgcaaagattgtcaatcttctggaggcggcggaaactgagataatgacgaatgtgagaaaagcccgtttcagatgttgcatgacgcaaccaatgacagtcgactaatctgttgtgaagaaagagagaggagaagaagaggaatgaccaaagaagagaccataaaagaaaaaaccagagagagagagagagaaagcaagaagggctttagatatatgtaagtttgtgtgtggatctatccatctatatatatatatccgattgtatctcttttctcaagataggagaagtaacccatccattttagactactgattttctagatttttgtattaagaaagaacaacgaaaaaattagatgtacggtgattgtctcaagtgtttggtttagttttccttggaaaaaaaaaaaaaaaaaaaaannnttggtncgnccagggcggccgctctagaggatccaagcttacgtacgcgtgcatgccacgtctttggtggaa

SEQ ID NO: 131882 - DNA, 862 bp, Arabidopsis thaliana
  unsure (1)..(862): unsure at all n locations
agtgactgaatacgccaaaggaggttcagtgaggcagtttttnactaggagacagaaccgagccgtccctttgaagttagctgttaaacaggctttggatgttgctaggggtatggcttatgtccatggacgcaacttcatacacagagatctcaagtcagataaccttctcatctcagcagataagtccatcaagattgcagattttggtgttgcaagaattgaagttcaaaccgaaggaatgacaccagaaactggaacttacagatggatggctccagagatgatacagcatagagcctacaatcaaaaagtggatgtgtatagtttcgggattgtgctgtgggagttaatcacaggactcttaccgttccagaacatgacagctgtacaggcagcgtttgcggttgtaaacagaggagtgcgtccaacagtcccaaacgattgtctcccggtgctgagtgacattatgactcgatgttgggatgctaatccagaagtccgtccatgttttgtggaggttgtgaagctgcttgaagctgcagaaacagagataatgacgacagcgagaaaagcccgtttcagatgttgcttgagccagccgatgacgattgactaaataatccccccctcaagaaaataacaaagaaagaaagaagaagaagaagatataagaaaaagggctttagatataagtttgtgtgtcagttatgtgtctctgtgtgtgtttgtgtatctataaaaatatgaaatgtattttgttttctcaacaaaaaaaaaaaaaaaagggcggccaacaannnnnnnnnnnnnnnnnnnnnnnnnnnnnnnnnnnnnnnnnnnnnnnnnnnnnnnnnnnnnn

SEQ ID NO: 131883 - DNA, 517 bp, Arabidopsis thaliana
  unsure (1)..(517): unsure at all n locations
gggttnnaaaanagnggagnccngccnaaaagccccaaaacgattgncccccgggtccngagtgacattatnccccgatgtggggatgctaacccaanaagcccgcccatgtttttgtggaggttgtgaagctgcttgaagctgcagaaacagagataatgacgacagcgagaaaagcccgtttcagatgttgcttgagccagccgatgacgattgactaaataatccccccctcaagaaaataacaaagaaagaaagaagaagaagaagatataagaaaaagggctttagatataagtttgtgtgtcagttatgtgtctctgtgtgtgtttgtgtatctataaaaatatgaaatgtattttgttttctcaagataggagaagtaagtaaccccaccaccaccattttagacttactgatttctagttctatttttctttttttcgtttgtgttgnatgcggcccgcgtaattccgatgatncaagcttnatgcgatgaccgtncgacctncgtagg

SEQ ID NO: 131884 - DNA, 350 bp, Arabidopsis thaliana
  unsure (1)..(350): unsure at all n locations
ggtttcttggcagtaacacttatggtttggatcgaggagaacatangagggagcggcagcttcactatatctaccgcggttttagcctctgcgatcttcgttttcgttgcgggatgcccgatgtatcgattcaagcgcccagcagggagtcctttgaccagaattgtgaatgtgtttgtttctgccgcaagaaaccgaaataggtttgtaacggatgcagaggtggtgacacagaatcataactctaccgacaaaagcattcatcacaacaagttcaagtttttgaataaagcaaagctcaacaacaagatatcagcaacacaagttgaagaaacaagaacgtttctagc

SEQ ID NO: 131885 - DNA, 844 bp, Arabidopsis thaliana
tttgcacgttccgctccggaatttccgggtcgacccacgcgtccgagataggtggaaaatgtataaagctcgaacttagtcgtcctggatgggctcgtcgactgtcggtcccgtcacaaagtcaagatttggagagaaccgaagttacaaatttctacaatcaagtaggttcacatgttgctaattctccaccaggtaactggccaattggtagcccagtgaagggctctccttcgcatgcctttacgaggccacatggtctaggaatggtcaggccagttaactcagacaatatgccaggactggcttcaattcttcctgctcatccttctagctttcatggattttcaccagtcagtaatgaccaagggctattgaatcattcaaaccaaactattctgaataagggattgatgcacaacatttcctatgggcaacctcattctttgccagagcatataacagggggaatttccaactccatgaggtttatagctccacactcctcaggattcgggacttcatctgatcaccgctatcgctggggaagccctcctcagcatatgaattatcctggttacactggagtgtcgtcgtcatcgtcatctactgaacgtcctttcactgtcaggcatggttttccatttgctgagaggcaggctttattgcttggaaaataccagcatcatgtgggctctgctcccttaagcattcattttaatacacaaatgaattggtacacgggatcacccagagatacccctttggatttagtgatatggggaatcaacaagacactattacagtgctcatggaaaagcaaaccttggtgttagtctaccgg

SEQ ID NO: 131886 - DNA, 357 bp, Arabidopsis thaliana
cacgcctacgcgtgaattctacgaggatttaagcataagtttacaatagccatagtaatgcggtgggtacatgcttttgggtccttatcatctctattggtgtggtcatatctgaataagcagagctactacggatcacgaatctcttcttctcgtatgttttatgtttaagtgaggttcgatctagaacctcatcaattaatatcaataaaagtacacccatgatcaatgagaactcatgtaacaataatctctgttcgtaggttcttggggataaattagtcatcggaatagcataccagagatcgacgatctcattaatcattatgtataagtacaaaacttcgtaaaactatc

SEQ ID NO: 131887 - DNA, 367 bp, Arabidopsis thaliana
tgtcatttctctctctagtggctttagtatggcggattggggacctgcggggtcgctgtgatactgttcgtgcttttgactccgggacttctctttcagattccggcgagaggtcgtgttgttgaatttggtaatatgcagactagtggagcgtcgattctcgtccacaccatcattttcttcggtcttataaccatcttcaccatcgccattcgtctccatatctataccggttaattgtaccgtaccggattcgtaacttcccccggttgtctagttttatgggttgttttggattttggttcttctctgtgtcttgtcaaaacgttatggaatttgtgaatctgaatatgcgttaagttaaaaa

SEQ ID NO: 131888 - DNA, 758 bp, Arabidopsis thaliana
  unsure (1)..(758): unsure at all n locations
cttttgaatgngcacttggcacccccctcgaggtcgacggtatcgataagcttgatatcgaatcgcggccgccatcgttacacaaagtttgctgaataaataaaaattaataattactggaatgagttccaaacatcagtattgtgtggctttcacgttaaaattatacattcttataccaacaacagtgacttttttttttatataactacaaaagatggagcctaaaagtggagtatcttagattttcttggggaatgtcataccaccgcctcggatagagagtgggggtcctttcacagagctcacctgattggtatcaaggaagattatgaccacagttatgtcatcgtggaaatgtctcctcacacctctctctatcttctttagatcagaatatctcatctctcgtttctttgccgcctcttgcagtgccatcttcaccagtctccgtgcaatcccgtttcgtgggtggttctgaacgatgtcaacagcttcttggttgctcatctgttcccatagtccatcagaagcgaatattagaaacttatcttgtggttggatctcatgctccgttatcgttggttccccactcaagataggtcttttgaacggttcacggattctatactttgtgtacaatggttcctttgttgaactcttgcctttttaagaatacacggtcgccctatgggatctaagataatctgaaataagggcnnccttaaaccacgccacacaattgttgcttttaaaca

SEQ ID NO: 131889 - DNA, 375 bp, Arabidopsis thaliana
cacgcgtgcgagttaattggatatcatcaactttaccacataaagtacccaagaatatagatagaggataaccaactgggtggtttaaagaaatgggtgttatagatatggtcttgttttgggtgttattggtcaatgcccttctcattgttgatgcctcttcaagaaatatgccatttgcttaccaaaatgaaatgcaaaggcattgtagctccacaaagtacacctcactctgtgtccaaaacttacgagagtttcgacatggatctcttgacgggctcgactttgggtcttttcttgttaacaagactatctctgattccaatctgctaattccacctctctcctcgtcgatgggttcctccaaacttgttt

SEQ ID NO: 131890 - DNA, 515 bp, Arabidopsis thaliana
  unsure (1)..(515): unsure at all n locations
gggtggcccaagttnccttnaaancaanggncatnnnccccttggccccagnggaatttttaangnantcccagcccctgatttaattggataaacccaccagtcgaaacctcgaggaaaaaaagtaaacccgagtccggtttcccgggggaaagcccttcaaatgctattcgatttccgtttttgctccccgagaaaacctgcaaataccaacgaagagccataattttccagttaatggaacagagtctttgtgttgtgttgccatttactttgcccctccagttttaccagattcgagccattcattttcagccctttctctttttgttctgatttttggtataaaaacttttatttgaacatgaaattgaattgtatagttgtgacctttgtagaaaaactactctctgcctttatgttcttttgaaataatccatgttccttcatcttcaaaaaaaaaaaaagaaaaaaaaaaaagggcgagccgctctagaggatccaagcttacgtac

SEQ ID NO: 131891 - DNA, 517 bp, Arabidopsis thaliana
cgtccgcttttgtactctggatttacagaattttttcaaagagatttcactctttgggggaaggacagaagatttccttgtgccgcttatcatggtcccttaagctgttactttaattggagcttcgatgctttcaattcggtgcaaaacataagagtcttcgttcgattccttatcggcgaggatttcttaccggaatcggcgctcaacggtggaggttgttgccggaaaaacttgtgattactcatcaggcgtgggacgtggtttaaccggttgtcgacacgtttccatggatggagtttagattgaaattcttctacagaagtcggttatctatttggtctttgttggctatttctgtaaacctgctgtttgggcttttgttaaagcctatgtatgatattgtgaaagcttaataaattctatcacttgtgagaaaaaaaaaaaaaaaagggcggacgctctagaggatccaagcttacgtacgcgtgcatgcgacgtcataactcttctatag

SEQ ID NO: 131892 - DNA, 367 bp, Arabidopsis thaliana
gcgtataaatgtttatatatttatgtatctcaaacatcatgagtcaaaaacggggatatataatttttaagatacgaagtatcaaatgtatttaactatattcaagaaatcccccgacctcgtacaatggtactattgaagcttttttgaacatgaataactccatttggtattctacctacattttatgtgaaccattacttgtatttttactcaaaccaaaattttaaccacaagtagaaatttaattaacctaaatcacacgatcatttttttaataagtgacgcattctccatttgacatgtgacataacttttaaattctacgtttttacttctccttttctgaataaaatctttctttccg

SEQ ID NO: 131893 - DNA, 369 bp, Arabidopsis thaliana
gtcattacgacatgaatggtccttcatgatcaaaaccattgccgccggcgggattgttatccatccgggcaaaaacaattctgattaggtattcggtaccggctcaacttggtctaattagctttactattcttgattatgtataattgatccggttatgctaaaccaaaatctgatattatatgggctactcgtgtggattaaaaatccgattgggggaactcgtgcaaagcccaattaaagagaggcggtttgttttgtttttaacttttaactcggtccaaagtcccacatcgctaacaacatatgagttgaagacaagaggagttgtataaataacgagaccacttcacagatcaattcatacct

SEQ ID NO: 131894 - DNA, 667 bp, Arabidopsis thaliana
  unsure (1)..(667): unsure at all n locations
gacgaaagaagattttntttccctctctaatgatgatgtgtttctatcagcagagtcttctagtggcgaggagtctcctatgggagagcttttggacccgcttgatcctgatgattcttacagtccatgcactgagaaagaatcagattcttgtttagccattgaaagagctaccattcgtgatgatttttttcctctgctcctggatcaaaatcaagagtcgtcgacgtcgtctccaaaactgcaagaaagaacttttgaaatgcagctcttgcaaatggaagaaaccacaaagagccaagaaccttggaagcagccattatcatcaataagcaatatcgcagattccatgggagcagaatttgtgtatggaggcctcatgaagaaaccttcacctcggtgctagagcagttgttggttcaagccatttctacaaatgggtctcctcccaaaaggttaaacacaacatgaaaatgtgatcttgcttctgggcacaggggggtatcatgtcggctttcttgctcgcgagctacaaacttcttcttggtggtataattgcctttgatttaggctaaatcaggctttaatcggttttgtttcggcaactagagcttggggtttacttggtagaagggtaggctnaaaggtnggntttaaaaaaaaaagc

SEQ ID NO: 131895 - DNA, 485 bp, Arabidopsis thaliana
agccatttgttctagttcgtttgtttctgataatattttcatctccaagaactgaatttaagctgggtttggtttaaatcgattgtccaaaatctaaacaaatagaaacgtcaaattgttatttgagtggtgaaagattgaaatttttggaacagagaagcaatagagaagcaacgattctttttacaaccgtaaggaaaataaataaaaggaaaggctgtaaataaaaatatatacttaagagcaaatatatgctctacactagttatgcaataaagaacaacttgttgcctgctaatttagacgaggatccatccctgatatcctctcatcctccaacagagcatatggatcgatgtaaggtggtggtgaaaccggagttctacttccatcatgaatgaaatctgctccaaagtaaaggtaaagagcagagaaggcgccgagagttaagacttatcaatggccaaaaagcccaagaagaaagt

SEQ ID NO: 131896 - DNA, 709 bp, Arabidopsis thaliana
  unsure (1)..(709): unsure at all n locations
ctctacttccagcatgtaaagaatatgatatatcctccgggatttcctttaaagctgatgcaattattgccaaccctccagcgtatggacatacccatgtggcagaagcactgaagataccgattcacgtatttttcaccatgccatggacaccaacaagtgaatttccacacccattgtcacgtgtcaaacaaccagcaggatacagactttcatatcaaatcgtcgattcattgatctggcttggaataagagatatggtaaatgaccttaggaaaaagaaattgaaactacggcctgttacatatctaagtggaacacaaggatctggatctaatatcccacatggatatatgtggagtcctcaccttgtaccaaagccaaaagactgggggcctcaaattgatgtagtgggattttgctatcttgatcttgcatccaactatgaacctcctgcagagcttgtggaatggctagaagctggtgacaagcccatatatatcggcttttggtagtctccctgtgcaagaccccgagaaaatggccagaaatcattgttgggaggcacttcaaaggccctaaaccggggggggttnntccacaaaaggttgggggggnccttgggancttaaannncccgnggcctttttttncttttggggaaattccccnatgnctggctttcccggggtaaaattgggggccannt

SEQ ID NO: 131897 - DNA, 372 bp, Arabidopsis thaliana
ctcaaatttctccagaagagattcagccatcacataaacatctcctttggcgtcattgtatctcatcgcgggcttgaaaactagtcttacatcggcatatatctccctgacattgctatactccgaactctccattttttttttaattgttcccaagtccattggcttctctataacctgtttagtaatgaacagaagctatgaacatttttcaaaatcgctcatttcagcaaaattccatgtaaacatggaatatttaacccacagtttattagcaacagtttgaatctttaccttgtaataatcatgtagtccaagtcctttaacatcaacaggctccaagaacggccatgcccatttatgttgagcaat

SEQ ID NO: 131898 - DNA, 350 bp, Arabidopsis thaliana
taaaaataaaagacagtaaacttacaaattaccaggtggtctgaactcgatcttatgaaaaaaaatattgaatcgaattcttaaatgtcatatatattgatgtcggaacaatatttttttattgaaacactaaattcattgaacatgttgggttcagtccggttcagaaatttactactgtgtctttataaaaccaaattactattgtgcccccattttccgatcgctataaaaaaaacctaattcctcaactctaattcaccatgtcttcagatcaactaagcaaattccttgatagaaacaaaatggaagacaataaaagaaaagtattagatgaagaagcgaaagct

SEQ ID NO: 131899 - DNA, 379 bp, Arabidopsis thaliana
cccacgcgtccggtttcattaataatcttctctcgctttctctctttacgttaggtctgaagatggttgttgtgaccagaagcatgcgtggcgactatcctctcatttacaactccggctgacacaatctcgtcggcggctgtctcatcagttttccgagtcgccggagactctgactttgtgtgggagaagtttttaccgaccgattactgccacgtcatctctagatcgactgatcctcaccgaattttctcttctaaaaaggagctttatcgatgtctctgtgaatcaattctcatcgataatggcagaaagattttcaagatcgagaagctttcagggaaaatatcgtatattttgtcgtcaagagatctttcca

SEQ ID NO: 131900 - DNA, 353 bp, Arabidopsis thaliana
attacggataaaagcataaaccttctcgcccgtctcaagatcctctagcgtagcacaagccgttatcagcgacacaccattgtaaccgaattaggagtcacctcttcatctctcaccatccgcaaaaacaaatcaacagcgtcttttgcaaaatcccgcctcgcgtaaccacaaatcatactcgtccaagaaacaacatttctctcagacatttcatcaaacaccttacgtgcactatcaagctctccacactcggcgtaaaaatgaaccagcgagctctgcacaaacaaatctttcgcataacccatcttcacaatcaacccatgaatctgaatcccattacctttcgctct

SEQ ID NO: 131901 - DNA, 381 bp, Arabidopsis thaliana
ctcaatttctctccgttatctcaatcgcgaccaaagatctcttcgatcaaaaccctagctctaaattcccccaaatctgattcttctcctccgataagcttttgttgaattcacaaagcagcgtaaatggtgttggcggagctaggcgggcggattacccgcgcgatacagcagatgagcaatgtgacaattatcgatgagaaggctttgaatgaatgcttgaacgagatcactcgtgctttgcttcaatccgatgtttcatttccccttgtgaaagagatgcagagtaatattaagaaaatcgtcaatcttgaagatctagcagctggtcacaacaagcgccggatcattgaacaggctatctttagtgaactctgtaag

SEQ ID NO: 131902 - DNA, 441 bp, Arabidopsis thaliana
aagctcaaaaactccatcttctttcccccaggaactcacaaaccctagatgaattgttaatcatcaatcatcgatttcaagatttagtctcgaaaggttttattttttttgtgcttgcgtcttaaatggagaatcgtaaaggaggaaactttagcgtacctagctccgaagctttgaccacgacgcttcgtaatgcgatccaagctttgggtcgtggtttcgatgttacatctgatgttcggcttctttattgcaaaggagctcctgggtcaagacttgttcgtatagaagaaggacaaaacagagatcttgagttgtctcatgggtttcttcttcctaatgtccctgctgatattgactgttcacgcggcaacagtggcacacaaagaatctctgtttgcagcttccatgagatggcagaagaattcaatgtgagatcag

SEQ ID NO: 131903 - DNA, 354 bp, Arabidopsis thaliana
gcgtgcggtaacacctcttgtttttttcgattgttaatatcactttccaaaagaggtcaaaagtgaaatgtgttagtttcgaatttgatcttatgaatataaactacccattcttcgtaatatttatgacgcaaaagaggtgtgacgttagacaatgcgtaagcaatgttaaggtgtcgaaaaaacttgacctagattagattttgtcatggtgaaacaaagattgatgataatgatgttaatatgtggttgtcactagcgaatataattcatatctacttatcgtgtgatagatatcaaaagaattgtttatatcaatatgggtgatatctttgcgtcatgttatgttgagat

SEQ ID NO: 131904 - DNA, 600 bp, Arabidopsis thaliana
  unsure (1)..(600): unsure at all n locations
gncccccccccccagggggntttaagtnggnggccttggccctgnngtggacccncgtntcgnccccgggcacaagcttntcctggctccccaggctagggagccaaggaaccaatgttgatccaaaactaaagggagaatatcctcctaaagctgttgcaaagctcgctgcagtagcagcattgtgtgtgcaatatgaatcagagtttaggccaaacatgagcattgtggtaaaagctcttcaaccattgttgaggtcatcaacagcagcagctgtaccagtccaggaagcctgattcttctgtgcaatagcaacaatggaagattgggttcggtttcagttgttgccataccgtataaatgtgttcttaaagagagtctttttgtcgaggcttttcttcagttgggatgtatatgttttattaaggtgatgagtagtgatttggtgtgtcttttcaaatgctttgtggagtctgtttttccttataaaaatttattctaaatctggtttgtattttgggggtcttctttgctctttcttcattaacagaatactaattataagctttaaatatacaaaccttgaaaggaattttcatc

SEQ ID NO: 131905 - DNA, 671 bp, Arabidopsis thaliana
  unsure (1)..(671): unsure at all n locations
tatcgaaccaatctcctgatatggctgctcgtnttcattctaccagagttttgggaaccntcggttaccacgcaccagagtatgcgatgactggtcaactgacacagaagagtgatgtttatagttttggtgtggtgcttttggagctcttgactggtaggaaacccgtcgatcatacgatgcctcgtggtcaacaaagtcttgttacttgggctactccaaggctaagtgaagacaaagtgaagcaatgtgttgatccaaaactaaagggagaatatcctcctaaagctgttgcaaagctcgctgcagtagcagcattttgtgtgcaatatggagcagagtttaggccaaacatgagcattgtggtaaaagctcttcaacccttgttgagggcatcaacagcagcagctgttacccagtccacggaagcctgattcttctgtgcaatagcaacaatggaagattgggttcggtttcagttgttgccataccgtataaatgtgttcttaaagagagtctttttgtcgaggcttttcttcagttgggatgtatatgttttattaaggtgatgagtagtgatttggtgtgtcttttcaaatgctttgtggagtctgtttttccttataaaaatttattctaaatctggtttgtattttgggggtcttctttgc

SEQ ID NO: 131906 - DNA, 704 bp, Arabidopsis thaliana
tcgaagcaaccttgtcttcaacattctccatccgcctccgcacttaatccccaagttcacacttcaaatccactctttctatttctctccttcttcttctatgtctcgactcctccctcctcatctctccgtcaaccttcctaccatggagaaaactacttcttccgagttaaccccaactcgactcggtttccctaacgagtttccttacgagttcgactctccttccttctcccctggtttcacttctcccggtgactccactgagacggaagacgaaagcagtgatgacgaggaagacttcctcgctgggttaactcgccgactcgctccttcgactcagcgtcttccttcccctctcttcaagtctgaggagaaacgtcaagttgcagctacttcaccacagtcaacactgagtggactcggaagcttttcaaactcaggaagtagaagccctatccttccatctccaccgggtcctacggcatcatttcgttagggccacgcgggggatgtgatttctgcggctgctggagaagtcgctagacttaagctcggaagctacgagcctcatcaccttcctcttcaaacccctgagtctcttctccgccgtcaaaacgctgccatacatgctgaactccaacacccgcgtctcatcgaacagatgtggctctgctctgctcaatcaagattcaagctctcag

SEQ ID NO: 131907 - DNA, 803 bp, Arabidopsis thaliana
  unsure (1)..(803): unsure at all n locations
ccccccccgaggctttaacacttttaaagctttcccgggttcggtaattttggtgtggaaattgtgaagcgggattaccaattttcaccccagggaaccaagtnnnnnnnnnnnnnnnnnnnnnnnnnnnnnnnnnnnnnnnnnnnnnnnnnnnnnnnnnnnnnnnnnnnnnnnnnnnnnnnnnnnnnnnnnnnccacgcgtccgcttcaggttgagtttcctcaacattatcctatggaagctcctcaggtgatttttgttccaccagctccgttacatcctcatatttacagcaatggacatatttgtttagatattctgtatgactcatggtctccagcaatgacagtgagttcagtctgtatcagcattctctcgatgctatcaagttcacccgaaaagcaacgccccactgataatgatcgatatgtgaagaactgcaagaacgggaggtctcctaaagagacaaggtggtggttccatgacgacaaggtttaatgatgacgaccttaagatgtctctcctttcagttacaaaagaggtttatataatttcccaagactgataatactaattgaaattcctcatggcctcccacttttttttctgtaacggatcattatgtataaatgacatctgaaatgtttcagtgtctgaattaacaccttgtgcttttgtcctttctgaagtgaaaacccatggagattttaggcaaaaaaaaaaaaaaagggcggccgctctagaggatccaagcttacgtacgcgtgcatgcgaagtcatagctagagctgttctatagtgt

SEQ ID NO: 131908 - DNA, 912 bp, Arabidopsis thaliana
  unsure (1)..(912): unsure at all n locations
ctgcggtaccggtccggaattcccgggtcgacccacgcgtccggtgtcttgctgctcagaaataagtatcacattgtaatatatcgtgggaaggacttccttccttcaagtgtggcagctactttagcagaaagacaagaattaacgaacgagattcaagatgtcgaagagagggtaagaaatcgtgagattgaggctgttcagcctgttggtgacaaagtaccagcagaagctggcactctggccgagttttatgaggctcaagcccgatgggggaaggaaataactccagaccatcgtgaaaagatgattgaagaagcttcaagggttgcaaatgctagagttgttaaacgaatacaacacaaactaaaccttgcccaatcgaagtttcaaagagcagagaaactgttgtccacaatagaagcctctatgattccaaatggacctgattatgatcaacaggtcatctccgaggaagaaagagctatgttccggaaagtgggactgaaaatgaaggcatacttacccataggtatccgtggtgtatttgatggagtcattgagaacatgcatctgcattggaaacacagagaattggtgaagcttatatcaaaacagaagaaccaagcatttgttgaggagacagcccggttactagaatacgagagtggtggagttcttgtggcaatagaaaaggttcctaaaggatttgcgcttatttattaccgtgggaagaattacaggagacccattagcttgagaacaaggaatcttctgacanaagcaaaagcattgaaacgttccattgcaatgcaacgccacgaggcacttagttagcatatttctgaactggagagaacaatagagcaaatgcaaagccaactcacttcgaaaaaaccgtcatacagtgaa

SEQ ID NO: 131909 - DNA, 352 bp, Arabidopsis thaliana
gtagccttactggatttatgcttttacctgtatttgctcgggttccatggggtgtctaagtgcttgcatgggttccacttttcaattttcttttgttttgcaaatctttcaaacttttagggacatggaacctatgaagatcggatggaaatgcttcgcaatattgttgatttagtggaggcgagcctcttctcagataatcaagaatggaggtagacatgtcacttgtatctgatatcttccaccagtttttatcattagtgtggcatttttgtagtctttcatctttcttattcccgtcgactttattatgtgtttcgttctttgagcataagactgcataacaatgatt

SEQ ID NO: 131910 - DNA, 546 bp, Arabidopsis thaliana
tgttgtctcttcaagcttctctctctgttcctcttattaccttttatctgtcacttttaaactgtgtcaatctaaactcagctttggattcaaacgctggtttttgcactccttacccatgtaaccaaccgcctcaaccaccgtcctctacaggctactctccatatggtaaccctcctccaccgtctccacagtattcaccacccccaccgccttcacagtcttcaccgccacgttctcgctgccctcctgttccgacgacaggctgttgcaaccaaccaccaggtccaccaccttcgacgatgtattctcctccgtatccttacttttatactcctccttatccttacggtactattggcggagggggacaaggcggtggcggccaaggaggaggaggaggaggagccgaaggcggtacaaccggttcagcgatggcttactattcctcttccattcccgtatatgttttgatgcttgtgttagctaatgcttttattgtcttttaggtcatacataggtttcagataaatattaaaagcctat

SEQ ID NO: 131911 - DNA, 359 bp, Arabidopsis thaliana
cggagtcacttctcaacaaagcttcaagaatcggtgaaggggccttgggggcagtctacagggctcctgtagcagaacagcggagaaacttggctgttaagaaacttgtcccgtcgccgattcttcaaaacctagaagattttgatcgcgaagttcggatattggcgaaagcaaagcaccctaatctagtatcgatcaaagggtatttctggacaccggagttgcatcttctggtgtcagaatacatccccaacggaaacttgcagtccaagttacacgaacgagaaccctcaacaccgcctctttcttgggacgtaagatacagaatcatcctcggtacagccaaaggactcgcttat

SEQ ID NO: 131912 - DNA, 455 bp, Arabidopsis thaliana
  unsure (1)..(455): unsure at all n locations
aaaagatcagatagagatagagagacagaggtagagatatggaattgctctttctcctctgttcaatcatctacacttcaatcacttccatcttcttctctcttctcctcccgtttcgcttccttctccaccgtctccttccttcacgcgccgccgtcgatcctaatgtctctttctacgaaggcacagtctggcacgaccgtctccgtcctgtccgccactctttccgttattccgttcgttacgcactctttgacctcgccaaagctattcccacaccgccggatcatttctccgccgccggacctcgccgggtttctcgtcccaccggcccattttttctattggccattcccaccaggggttggttatgaacaaaancccttggggtttaaantnttggcaatgnctttgggaggggnaagaaagggttaagnaaatgcattnntnaggnt

SEQ ID NO: 131913 - DNA, 396 bp, Arabidopsis thaliana
ctcccactttcctagtgtgtctgccctgctaagtttactttaaacaaatgcccattattgattggtaagtttacgtactttaccctagttcatatagttacctcatatttctaagtaactacactatagccaaacataaatgtgaaacggaagcactcaatcgtcagcgaacttgagagcaaaatacaatacgacggtacggtatcagcataaacgtgaattaatggaaccgcatatttaaaaaaatcataactggataaggtttcaaaaaaagaattgttgcgcaataaacgagtttttttgtttattacaataaacgagtatcaattccttccatcgtcaaaaaccaaagagctttttgtaccgagcgaacgacattataatcacgaacaagat

SEQ ID NO: 131914 - DNA, 565 bp, Arabidopsis thaliana
  unsure (1)..(565): unsure at all n locations
catagttgtggcggtcttgttcacagttgttgctgcacttttcatttggaatatttcttgtgaaagacgtggtatcacagatttcatcgctcgttatccggatgctgatcttagaactgccaaaaacggtcaatatgtgaaggtcactggggtggtcacctgtggtaacgtgcctcttgaatcatccttccatagagttcctaggtgtgtttacacgtctacttgtctatatgagtaccgtggatggggttcaaagccagccaatgcttcacatcgtcgctttacatggggactgagatcagcagagaggcatgtggtagacttctacatttctgatttccaatctggggtcagggcattggtcaaaacctggaaacgggtgcaaaggtaacaccgcttgtcgatgattctgttgtcatcggttttaagccaggaaatgagcaagcctctccagactttgtaaggtggttgggtaaaaagaatctaaccaatgatttatccggataattcgncttaaagaaggnattttcaaagaggngnnnattaaggttnnttnnngtgggca

SEQ ID NO: 131915 - DNA, 435 bp, Arabidopsis thaliana
cccacgcgtccgttcagacttaaacaagagtaaccaaaccgggcttgtccttagttgcaggggttttagagctatggctaaacctattgttggtgctgacaaagaccttctcaaacaaggcattgtcgacatcgaataccaaagagtttcttgcgattacggcaacaagaacatgaacgtgagagtagaagaagcaagcaagaaaccaaactactttaggagataacgcttttataccaaggaggtcaaacagaagtagtatccatcgacattgctcaagtcggttcatcgccaaattggggttacatgacaagaagccacggagctgtttgggtaactgacaaagtacccaccggagctatccagttcaggttcgtagtaaccggtggatacgacggtaaatgatttggtcacagagtgttcttccatccaatt

SEQ ID NO: 131916 - DNA, 633 bp, Arabidopsis thaliana
cactatagatagactatgacgccgcatgcacgcgtacgtaagcttggatcctctagagcggccgccctttttttttttttttttgcaaaagtggctttggttgacaacaaaaaacacacaagcgacttacagaagccggcaaaagatttgctcaaaaacaattaaaaaaacacaaactgaaagatatttggtttccaaagatggagcattcaaccaaatctgagaaacttatgtacagacaaaagatcagatttgaggtagaaccgagatttcatgatcacaccaaaaaggttatgttgctcaggcaacatgtcttaactagaatccgttggtgcattgctatcttgcgacgaggagaacaaggtgctaaacggccacgggatcgagaatccgcttccgtcattgttctcgttctcctcctcttcctcctcttcttcttcttcttcttggcgccggtttccatcgctgttctcagctccatggctggttgtagcagaagcactactgcttccattgttatcgctcgttgttgttactgaatcagtcttggcttcatctgcaggtaactgatatctgcaaaccgggcatgaactgtgaagctcaagccatggtaacaagcagtcactatgaaac

SEQ ID NO: 131917 - DNA, 410 bp, Arabidopsis thaliana
aggaagtgtaagagactgattaaacaaaatcgagactttatagtactcaggtttgtcggaatcgactgagtatcgaaattattgtggtgttttgtgaacagaaaccaagcaggattaaagatggttcaatctgtgttaatttcgcgtaacaagggtttggcggagcaagatctaactaagcttgatgtaacaaagttacatcctctgtctcctgaagtcatttctcgccaagcaaccataaatatcggaaccattggtcatgtcgctcacggtaaatcgactatagtgaaagctatctctggtgttcagactgtgcgttttaagaatgaattagagcgtaacatcaccattaagcttggttatgcaaatgcaaagatttacaagtgtgaggatgacaagtgccctagaac

SEQ ID NO: 131918 - DNA, 411 bp, Arabidopsis thaliana
cgggggggacccacgcgtccgtggcgatatgtatatagttagtatttaaacagcgcgggaacaacgaggggcagttggtttgtgtgaagggagagacaagggctttaatgggtcattagaaaaacgcccatgggccttaatgtcatatgtgggcattatggagaatagtcaagagaattccgaataaggccgaagaagaaagaaagatctctcactcactcagctctttggatccgccatagcaactctctcctcatttctcccggccatggagtctccaaagagctatgtaaatccgttctagcttttattctctcgctaattgccaaacagagatgtactatttctttcctctctaactcctcctgaaatggtgatatttgtttctccgtctacaacaagtttcatttg

SEQ ID NO: 131919 - DNA, 534 bp, Arabidopsis thaliana
  unsure (1)..(534): unsure at all n locations
ggacatttgagtcggaactgttgtgatttcaaattttcatttctggagtgataatttcagtttttgatctgtgcgttcatcaatggaggtttcttctttacccagatactgtaactcacgctcctttgttccagaattgtctcgtttcaggggattcaaagttcacttatgggaccaatctcttgttcctcttcatttcagcattcgaaaacgaaagaacacccctcgttatttgatttcttgcagtcagaagaaagatgtcactgttgttgatggaagttgtatggatgagatctatgataagttggcggaacgtcttgtccctacagcagcggcaatgtttagccccaatcttaaacgtttggtcggtttggctggtcctcctggtgccgggaaaagtacagtagcaaatgaagttgtgcgtcgtgtaaataagctatgggctcagaaagctgcttcttttgatgctgaggnttaatccnccggntntttcctantagganctttncccanggatgggttncnnatttntna

SEQ ID NO: 131920 - DNA, 397 bp, Arabidopsis thaliana
cggccgccagtgtgctggaattcgcccttgttttcttgctgtccaactcccacggacagagcccgccggtgccgttggcccgccccggccccgccgccgcagcccccgcggcagttcccgcagttccacgtcaagtccggcctgcagatcaagaagaacgccttcatcgatgactacaaggtcaccacccaggtcctggggctgggcatcaacggcaaaggcttgcagatcttctacaagaggacccaggagaaattcgccctcaaaatgcttcaggactgccccaaggcccgcagggaggtggagctgcactggcgggcctcccagggcccgcccatcgtacggatcgtggttgtgtccgataatctgtccgcacggaggaaagtcctgcttattg

SEQ ID NO: 131921 - DNA, 573 bp, Arabidopsis thaliana
ctttatatttttaacattcttttatcagatcatattttttggatttcttgttaagtgacaccaacctggtatcagtgttttcaggttaataaaaaagaataatgatgttttcggtgacggttgcgatccttgtttgtcttattggctacatttaccgatcatttaagcctccaccaccgcgaatctgcggccatcctaacggtcctccggttacttctccgagaatcaagctcagtgatggaagatatcttgcttatagagaatctggggttgatagagacaatgctaactacaagatcattgtcgttcatggcttcaacagctccaaagacactgaatttcccatccctaaggatgtaattgaggagcttgggatatactttgtgttctacgatagagcaggatatggagaaagtgatccacacccatcacgcactgttaagagtgaagcatacgacattcaagaactcgccgataaactcaagatcggaccaaagttctacgttcttggtatatcactcggtgcttactcggtttatagttgcctcaaatacattccccacagactagctg

SEQ ID NO: 131922 - DNA, 1000 bp, Arabidopsis thaliana
ggaaaaccgggggcgacccacgcgtgcgggaaattcgaaactcgattggttggttgacttctctctcttctctccctaatatttttcagagagagaggttcttatatgttatctccgtccggtttgtttttaccggagtttatactcggatgaagtccggttctgctgttagttagccgtcaacacgacttctccgttgtcgtgttcttgccgtcaacacagctttttcgttgctgtgttcttaccgttaacatggctttctattgccatgtccttttgctcatacaaaagcttgatgttgaagactatggcttctaggattgttgaatcgggagagtttcgtatgcgccaaatctattctcttttgccataatatacttcatccattgagattttgcttttggatctgatggttttctaacgatgtgtggttttcacttccacacaaaaacgttggatccatcggatttacgacagcttatgttacctgcgtctaaggtttggttaaaaactcatttccatcttaaatttcgattcccttttgctgcttataaaaatattcagagattcacttatattatcaagggtggattacttcaatctctacatcttatttcatgattacgatggttttcttatgaatctatcaatcatttgagattagtagattgatttgttctgtaatccattattatcattatcagtgagaaaaaaagaagaattcgtaatcggttgtagttccggcaacgtattctgattcactggatttggaatctctgcatgcggtgaaggatgtgaaataaacacgtatcctcaacttatccccatcgatgagacacgttcttgagtttatcctttcttgggcctcttgtttgggcttcgttgaaagttgtctttgatgtttatgtaattgggtgtgatgttatgtattattatttcaataaaactgcagtttcagaggtaaaaagaaaaaaaaaaaaaaaaaaaaaaaagggcggcc

SEQ ID NO: 131923 - DNA, 428 bp, Arabidopsis thaliana
  unsure (1)..(428): unsure at all n locations
cacagcaatggcgtcgacgaagcccgattccgcaatcaaccttgaagaagtggctgaaggcgacggtgtagccgtagacgatccgattttgataccggggaccacgaacttactcgtccgttactcgccattcgacgacagggacatcgattgcaatccttatttccctttcacaggcccgatttcagattctggatcaggttcttactcggattctgagcccgatcccaacagctgtcccatcgatttcttcgatcgagaattctttccgatgttgacgtggctgagtacttggaatcaaggagggcttgaccgccgggtgattaataaatatttgggggcttttattgaccccaaggaaggccgaggaagaggggggagttagttttggggacttccccgggncggattnttnaacccgggtgttt

SEQ ID NO: 131924 - DNA, 523 bp, Arabidopsis thaliana
ttagaagataatgacgtcgcctgcacgcgtacgtaagcttggatcctctagagcggtcgcccttttttttttttttttttaacaaaaagcaagcttcgttattattataacttcattcatcttacaacactatagtccagtcaccaacatcaaacatcgaacatcgggtttgataatttgaacttggaaagggcttggggatcgagcaacaggagtgctcttagggggaggagccaatgtcaggttcagtcctccaatggcctctttcatgtcaaccttgtctcctttgattttccaggcaaagcattgcaccatcattccaatcggccggtcctacaaagatatacgctatatttggtccaggacatcctctccttcccctaccaaatgcaatgtacttgagggctggctctcttatcccttcttcttcccttaagcttgaagaagctagaaacctctcccgcttaaactcctcaggctcttcccagacatttggatctctcatcacagcataaccattaac

SEQ ID NO: 131925 - DNA, 578 bp, Arabidopsis thaliana
  unsure (1)..(578): unsure at all n locations
tgaaatggtcatagtttagtgtagtagaaaggttggaatttgtgctcagtatcggtcagaggtgtcagggttcgctacttttccagtctctagaatgatgtcaacaagatcactcatttccatggagtcaacttgaagaagagctttttcgatcaaatccttgaattcgattgatgggtatcctcggctgcgacgcccatggcgatttgaacgatgcagagttcagcaaacccttaccttcgattggtatctacgttgccgtagcttcactcatctgtggtctagccatggccgccgatcttatacacggcttccgacaccgcaaattctggtttccctgtaagttcttctctctcaacgccacttctctgactttcatcgctgtcggaatcaaaactctctgtgggtctcaacacttncatgccgagtcgtcaggatcagttagctaaactcagcagcaccgtctttgtatgtactgtgatggggaattcgntgccttctctngggatntnggcaanatntntccnatgaatcttatggtttaggggtnttgnatnctgangtgtaaaactgattna

SEQ ID NO: 131926 - DNA, 987 bp, Arabidopsis thaliana
  unsure (1)..(987): unsure at all n locations
gtcctcttcttcgacttccagataaaatcgcttcctctgtttttttccgatctaaattcacagctcatcgaaaatgggctcacggcaaggaccaccgaagcatcagaacaaattcgcctgggttcccaaagccggcgtcaagatcaacgaaacggaagtcggcgggagatttagaccattatccgagattaccggagtttgctaccgatgtcgagagcagatcgcctggaaacgcaaatacggcaaatacaaaaccctaactgaagccaccaaatgtcagaagtgtacaaagcgaaatgttcgtcaagcataccataagttatgccctggttgtgccaaggagcaaaaggtgtgtgcaaagtgttgtcaaagtgttgatcaaatccttggaagagatatttacgaagtagaggctgaacagaagctgcttgatgagactatcaagaatgctagggaaagagatcgaaggaccctattacgtgctatgaacaaagataacaaaccaaataaatcagatgaagaagcgtcaaggagtgatagcagcaaggttggtgatgtgtttccctcaacttcccttgaagaatatgcaaacaagtccggaagagttagcgggattattggtcatggtagtgtgcctgatcatgcccatgatgatgctagtggacctgaatcagatgaggatgacaatgttggtgatgatgagcatgatttgcgcgaagacagtgatgaaaatgagcaatctcaactgcagaaataaactcatgtttggttgtactactgtcaatttggtaggattgtgagattttgcaagactgtttattcctgttgttttgataaaacttttacttggtcacctgcaatgcaagactagcaaagaatactataaattttgttctgttttaaaaaaaaaaaaaaagnnnnnnnnnnnnnnnnnnnnnnnnnnnnnnnnnnnnnnnnnnnnnnnnnnnnnnnnnnnnnnnnnnnaac

SEQ ID NO: 131927 - DNA, 831 bp, Arabidopsis thaliana
  unsure (1)..(831): unsure at all n locations
gtagacccacgcgtccgctgaatgcttaagataataactataatctaagagtaattaattaaacgataagtggttaaatttgttgaggttaaaagtgaagcttcaatggcaagaggtcgaaagctgacgatgagccagagcgagaggtacctaggaagcagctatagttacggtgacagtaacggaaactccgccaccgacgaatcagagctcacggaggaggacatctggtcacacgccgtcgatcacagcccggagatgctggaatctcatggagcgtggaacacacgcgatgctgtggtgaggaatgggcgcgtgggtggtggtttgtcgctggcgtttgaggacgcgtcatcttcgccgaggatcgtgcaccagatacgtggcggaggagaaggaggaggaggtggtggaggaggaggaagnatttttntgtnttttttttttttttttttntttttccgtgtcggtttggagtttgattttcctggttganttcggttggggcggttcctcgaattctttcgaaccacgattatgctctatttctttgatatcattatagccctgcctcatgtagaccttttgcgcgatattacttctccttcagattttactctgttaactaaaattataatcttctagctctgccgactaccatttttaattcataacttccctgatttatctacagtattgtttctctgacaacatcgcctttctataacagggtctccggttccgtaacctatcttctatgtggcctctcgggtttctctagaacactcttcggtggtctatcatattccatctcaagctcctctacatcac

SEQ ID NO: 131928 - DNA, 744 bp, Arabidopsis thaliana
aatctcatggagcgtggaacacacgcgatgctgtggtgaggaatgggcgcgtgggtggtggtttgtcgctggcgtttgagcacgcgtcatcttcgccgaggatcgtgcaccagatacgtggcggaggagaaggaggaggaggtggtgtgaggaggaggaagagttgagaggcagttggcgtcgtcggctccggtgaacgtgccggattggagtaagatataccgagtcaactcggttgagtcgatacacgagtctgatgaagaggaggaggaagattccgggatgatgatgccgccgcatgagtacttggcgaagagccaacagcgacggagcagaaaatctggcggcggtggctcggtgtttgaaggagttggaagaactcttaaaggacgagaattaaggcgcgttcgagacgcgatttggagccaaacagggttctacggctaagttagtaatataaaatttgaaagaaaaaaaaaccaatataaaacttcaacataaaaactttggaaaatattttgcttattttgtcagtttagagttaattttgcaactttcttgaatcccaagcttgagatgtataagatttatatattgcttcccatgcaaacgctttttcttttcttatttttagatccataaattaattgtgggaaaattttcaagaacctgctaagtgaacaattttctctctttttgctgttgtattgataaaatagagaaaaaaatcaatattttagtgtc

SEQ ID NO: 131929 - DNA, 185 bp, Arabidopsis thaliana
cctaaattgaagaaagagatgttttccatttaagaagaagagaatttcatgaagaatggaaggaagaaagatttgtgcctcgagtaactagtaatttagaatatccttaaaccgtcataagattgtataaatagaggggtttgtcctctatttgaaccatctgtaacttaatactcaaaccaaaa

SEQ ID NO: 131930 - DNA, 730 bp, Arabidopsis thaliana
  unsure (1)..(730): unsure at all n locations
tcgaaagttttctctgctatggatttttattaccaagcttgggttcatggaggtgctctgcttgctgttggagctgatgtaccggcggcggttagagaatttagccggactttgtttaatatgcgtccggatatatctctgcttgtttcgaggacggntttcaacagcgatctgagaggtgtgcttgggttagttagagttccgacgtgtgtgattcagaccgcgaacgatgtttctgtgccggcttcggtggcggagtatcttaggtctcatctcggtggagatactactgtggagactcttaaaactgaaggacatttgccgcagcttagtgctccggcgcagcttgctcagtttctccggcgagctcttcctcggtgacttttttttatagatataaaaagagaacaataaaatataattggtggaatatgggtttagtggggtccacgtatcgaagaaaagaagggcctctatttgtggaggacagtttggcattgtcacaaatctagtaagataagattgttcacttgacacgtgactttcgcttttttatcactttttttcttgctctcttcattagtttataatcacaagtttatttcataaaataattggagaataaccnnnnnnnnnnnnnnnnnnnnnnnnnnnnnnnnnnnnnnnnnnnnnnnnnnnnnnnnnnnnnnnnnnnnnnnnnnnnnnnnnnnnnnnnnnnnnnnnnnnnnnn

SEQ ID NO: 131931 - DNA, 479 bp, Arabidopsis thaliana
  unsure (1)..(479): unsure at all n locations
ngaaaaaccactttttaaacttttctatacacatttcccgagaaaatagctgttctcaaagcgtacccgttggcttttgtctcttgtttttagataaaatgatactctattgagaaaaataaaacgaacgtaacaaagcagacaattataagctgacattgtcttccttcttattctaaacaaagcagacaattataagctgacattgtcttccttaattcttattctaaacaaaataatagatagtaaagcataaataaagaaaatgaaaatatcatatcattgtacaacaactctgcttaatgatcagtgttgtggtatagtagagcaactaaacccaaaatttggctcaagagttgtgttcttggtccagagaagttgagtatcaatcaaagaatgattcttatcatcgagccgtttccaagttttgattgtatcaacagctccccaacgtccatacatagtcttttcaagctgag

SEQ ID NO: 131932 - DNA, 535 bp, Arabidopsis thaliana
  unsure (1)..(535): unsure at all n locations
gcggcaccggnnccgaaaacccgggnncccacgcgtccgcttcgcttaattctccggcgtatacaagtcgccggcaaaaatgtcgatgtcgaagagctccaagatgcttcagttcataaactacaggatgcgagtaacaatccaagacggaagacagctaatcggaaaaatcatgggggtcgatccgcccaatgaatcttgttctcggcgactgcgaagagtttcgaaaacttcctccggcgaagggtaataagaagacgaacgaagaaagagaagagcgtcgtacgcttggtttggttttacttagaggagaagaagggatttcgatgactgtcgaaggtccaccgccacctgaagaatctcgcgccaaatctggatctgtaaccgctgtggctggtcccggaatcggtcgtgctgctggacgtggagtacctactggtccattggttcaagctcagcctggtttatctggtcctgttcgtggaattggtggacctgctcctggaatgatgcagcctcagatctctagaccacc

SEQ ID NO: 131933 - DNA, 633 bp, Arabidopsis thaliana
  unsure (1)..(633): unsure at all n locations
nnnnnnnnnnnnnnnnnnnnnnnnnnnnnnnnnnnnnnnnnnnnnnnnnnnnnnnnnnnnnnnnnnnnnnnnnnnnnnnnnnnnnnnnnnnnnnnnnnnnnnnnnnnnnatctcaaagaaaacaatatctttaaaggctaaactacgagtacaatcataatggttttatcactactcttaaacaagaaatctttagatatttaaaaacaaaagccaaaggataggggtattcaacattactacatatgagagtgacgtaacagcaaggaaacaacccttagtttgctcattggctccaagccacattgtgtacaacctaataagaattcagattacctacaacccttggtttgctcgttcgtcgtaacacatattcagcagagtcgcagacccaaacaagttctgactacagtcatctaataacgattgtaggcttttccatattcttcacgtctctggcgttggaacccaccataattgttgtcttgatgccttgaagaatagttatctccatgatttggatatcttcccttggaatccattggcacattgtttccaccatagggaggaggatttgaagagttgccatcatcaaactcagcataaggaggaaactgtctatagttaccataa

SEQ ID NO: 131934 - DNA, 869 bp, Arabidopsis thaliana
taagcttcctcatgaactaaatgtctatcaggatatcttcaaagagttgtatttaagcaagtacagtggtaggaggttaatgtggcaaaattcattaggccactgtgttttaaaggcagatcgccccacgcgtccgaaggagctggctgtttccctgtttcaggctgttgtgttaatgttatttaacgatgcaatgaaacttagctttgaagacattaaagattccaccagcatagaggacaaggagctgaggaggactttgcagtcgcttgcttgtgggaaagtccgtgtcctgcagaagaatcctaagggaagagatgtagaagacggtgatgaatttgaatttaatgatgagtttgcagctccgctgtatcgcattaaggtaaatgcgatccagatgaaagagacagtagaggagaacacaagtacaacggaaagagtattccaggaccgacaataccagatcgatgcagccattgttcgtattatgaagacaagaaaagtcttgagccatactcttctaatcactgagctcttccaacagctcaaattcccgataaagcctgctgatctgaagaagaggattgagagcttgatcgatcgagaatatttggagagggaaaaaagcaaccctcagatatacaattatcttgcttagaatctctttggtaaacacaccttttgaatattttcctttttgtatatttattgacaaacaaacgatgaccgaaattttcttatcagtttgaaaaaaaaaaaagaactctcgattttccaatcaagaaaaaaaatgtgttggtatcttgataaccgaattaattagggggcggccgtttttaagggatccaagctttacttccccgggcatg

SEQ ID NO: 131935 - DNA, 771 bp, Arabidopsis thaliana
  unsure (1)..(771): unsure at all n locations
tttccttcgacgagggcaacaagaaagcttgggtagataaacgaacaggtgggctctgtttatgcacatcagccaagggcttatccataaccggaattgatgatcggagatactggagtcatattccgtctgatgattctcgatttgcttcagtagcttatgttcaacagatctggtggtttcaagttgatggagaaattgatttcccatttccagctggaacctacagtgtttacttcaggcttcagctaggcaaaccaggcaagcggtttggttggaaggttgttgacaccgaacaggttcatggctggaacattaaacctgttcgttttcaactctcgactgaagatggtcaacattcttcatctcaatgtatgttaaccgnagcaggnaactggagtcattaccatgctggagactttgtggtcggtaaatcgaaaagttcatcgacgaagattaagttctcgatgactcagattgattgcacgcatactaaaggcgggctatgtgtagattctgtagttgtgtatccgagctcgtgtaaggaccggttgatgcagatttaagttgcaaaccggagtttgggtgtagtttagaggtttaaaaaagctgttttttttttttaaagtggttttaaaaccttttgtagaatctttgagggggtaattagaaaactcagtgtaaagagaaaaagagggtaattactaattagggttggtgtttccccgtttagctccaatgtaaactttaagtttgaagttattaaagctc

SEQ ID NO: 131936 - DNA, 387 bp, Arabidopsis thaliana
cgcgtccgatttaaaagctaattttcttagtttcgtgcaaactttatttttaggcgacatagaaagttaccggggggggggaaaacttaaaaaaaaaatgacgaaaatgttatataagttacacaaaagattacgatgatttgatcaacaaagtacatgccaagttgcatctcacgcagaaacgttggatttgaatttttgtttattttattacttgtacgattcgaaatatttgataaaattgtcgtatctagtaagaaattagtcaaagttatccgttctttgcaatcattttttctttcacatctcttactacctagtattatatctagcatacgaaaatgctatcgtgcttcaatggtttaaagtttgttgtataagtctaaa

SEQ ID NO: 131937 - DNA, 479 bp, Arabidopsis thaliana
atcatgcctgcaactggctcttcccttttttgcgagaggtgctccaagcagcaggtttcttatctatttgaacaaacatatcatacctgtttttgacaagctcccagaagagaggatacttgatttgctcaaagcacttgctggtatttctccatacacaactgctggggaagcaaggcagctgcttccttcaatcgttgagcttttaaagatatacatgcctgctagaaagactggagaggaaatgaacttcacatacgtcgagtgtttgttgtatgcgtttcatcaccttgcccacaaggttccaaatgctacaaacagcttgtgtgggtacaagattgtgaccggccagccattcagacaagattgggggaggacttctcagagttgaacaaacactttactgagagattaaccattgttgaggatctaactaaggcatccatgaagaaattaactcaaggaatgactggtcacaa

SEQ ID NO: 131938 - DNA, 599 bp, Arabidopsis thaliana
  unsure (1)..(599): unsure at all n locations
ggntnttnttccacnccgntttccccgggtttnttgcttggggnccagccggncccattccancaccnggacatccaggttcaggcgtggtaagcctggaaaaagcaaaattcaagcccgggattacttaaagggtccccagccccgggaaaaaaacgagttactttgccagcaatttgggattgagtacaattcattacctgtaatctcccgcatgggttctcccgtttcccgcctaaagacgcaggaaggtgttacagaggagaatggagaagtttcaggaaagcaagtggaagcagaagtgggcgtagactattcaaacattatcgaccaatgtttctggcaacaacatcctcacattcttagcttctcctaagacaggtattcattgctaccaaaaaaaaattccaaaccgaaaaccgaatgagattcagctcttattttgataaaccgaagctaaagtacaaaacaatcgaaccgaatggtttacttttttctttcactattttttgtttttttccattattttaaattaaccttttgcggccgcgaattcgatatcaagcttatcgataccgtcgacatcgagggggggcgcg

SEQ ID NO: 131939 - DNA, 930 bp, Arabidopsis thaliana
ggttaggattgatggctgccattttcacagattttctgaagttcatgaatttgagaagccaaatgatgagcaagctctgaaacttatgaattcatgtgcagtggctgttcttgaggagtttcaggatattgcctttgcctacggcgttagtgatgagttcagctttgttcttaagaataaatctgagctttacaaaagacagtccagtaagataatatctgcagtagtatccttcttcacatcgacttacatgatgagatggggagattttttcccgccccaaaaattgaagtaccctccatcattcgatggacgagctgtttgctatccaacatcagatattctcctggattatctagcttggagacaagtcgactgccatatcaacaatcagtataatacatgtttctggatgcttgttaagtctggaaaaagcaaaattcaagcccaggattacttaaagggtacccagacacgagaaaaaaacgagttacttagccagcaatttggaattgagtacaattcattacctgtaatcttccgcatgggttcttccgttttccgcctaaagacgcaggaaggtgtttcagaggagaatggagaagtttcaggaaagcaagtggaagcagaagtgggcgtagactattcaaacattatcgaccaatgtttctggcaacaacatcctcacattcttagcttctcctaagacaggtattcattgctaccaaaaaaaaattccaaaccgaaaaccgaatgagattcagctcttattttgataaaccgaagctaaagtacaaaacaatcgaaccgaatggtttacttttttctttcactatttttttttttttccattattttaaattaacctttttcaatttggtagttatttttttccttcaatgagagatttgggttgttaattttcctttg

SEQ ID NO: 131940 - DNA, 363 bp, Arabidopsis thaliana
tcgacaaatctgaataagccctatttgctccagtggagcaatatattcgaggctccgatcactactccgacgggacactaatcccgaattgcatcgctgccgcttccttgctactaaccagaaaatttatctattgatgtaataaaaaacctgataatgtctctcccccattggcctcggccagaagagaaaggagacggctcatagggtccatggagaaagaggtggatcgctccgagaaacaagggccgcgttcagttgtggagtgaaacccattggtattaagggttttcaagaaatgaaatgggtcccaatttaaggagctgtgaattgcaagattgaattgcattttcatgatgattc

SEQ ID NO: 131941 - DNA, 585 bp, Arabidopsis thaliana
ggttctgatgggatcggtggtcttgcatcatcagcaaatcaactgctgcaggatgacatggaccagtttggagatgtgggagctctagaagataatgtagaatcatttttgtccaagatgatggagacggaggaagcttgtttggcaccctaaagccggaactcttctgtgcataccgaaacctcaagcctttcagtttcaacgcggtcggttgtataagaaaaagtgcctgtttggtcatttgctgtagcttctcatatgatgggaagttgttggctggcgctggacatgataagaaggtatttatatggaacatggaaacactacaagttgagagcactccggaagaacatgctcatatcatcacagatgttcgcttcagaccgaattcaactcaactggcaacgtcatcattcgacaaaacaatcaaaatctgggatgcttctgatcctggttacttcctacgaacaatttctggtcatgctgcacctgttatgtccattgatttttatcctaagaaaaccgagcttttatgcttctgtgatagcaacaatgatattcttttttgggacataaacgcctttt

SEQ ID NO: 131942 - DNA, 666 bp, Arabidopsis thaliana
  unsure (1)..(666): unsure at all n locations
gatgannnnnnnnnnnnnnnnnnnnnnnnnnnnnnnnnnnnnnnnnnnnnnnnnnnnnnnnnnnnnnnnnnnnnnnnncttttttgtgtttttttttaaccatctaaagttgatttattttattttgaagataatatatgagaagtaatgtaagattaaacggaaaatgaagatccctcacacacacaaaaaaagaaaaggaaaacctatgatgtacattctcaactcattacacaaacacaaagagaaaaacaaacacaaggacaaagacagacatacacattagctatatagatagtaaaatgatgtagtttagaaacatcaaaggcctcagcttttctttatcagatgatcagtcatctcttccactctaccggagttgccttaccgtttccttctcgggacgaaagaagagttttctctgtcttgttcccgcttttgccactcgagtttgagactcttgttttaggagaatgagaagtgatttttgcactattacctgaagatggtagagagtaacgtctactggctttctcagtggccctaattgcctagggnagaagagccttggagcccagctttgcttagggntttaggcgnctgcanananncgggatcccgggnacaagccggtnccatancacnccctgaaccgggggtngnggc

SEQ ID NO: 131943 - DNA, 537 bp, Arabidopsis thaliana
  unsure (1)..(537): unsure at all n locations
aaccaacaagaagtagtcaaagcacaatacagcagtagtagtagcaccatggctcctctcaagaactcctttgtaacatctctggtcattgcactaacattcacaagcttcttcaccagcctatccgctcatcgtcaccttctccaatcaacaccagtgactcagcctccagctttaacattcccacctctgcccaaaaccactatgccaccggttccttctctaccaactccaggacaacaaacgttgccacagccacaaccaactctgccacagcccactgggttgccaccgatgccgagcacacagataccatcattgcccaaccaggtgcagcccacaatccctaacatttcacaggtcaacttccctaggaactttcccttcaactttccttttaacattccttttcttacttcaccacctttttaaagtaggggaggtgaaaggtgggtnttttgggtgtaaaaggttattatccttttttcctggggcaggttttgggtaaaantttgntttggggaggttgtttanata

SEQ ID NO: 131944 - DNA, 528 bp, Arabidopsis thaliana
  unsure (1)..(528): unsure at all n locations
caagcttcttcaccagcctatccgctcatcgtcaccttctccaatcaacaccagtgactcagcctccagctttaacattcccacctctgcccaaaaccactatgccaccggttccttctctaccaactccaggacaacaaacgttgccacagccacaaccaactctgccacagcccactgggttgccaccgatgccgagcacacagataccatcattgcccaaccaggtgcagcccacaatccctaacattccacagatcaacttccctagcaactttcccttcaactttcctttcaacattcctttccttactccaccaccttcaaagtaagagaagtgaaagctagctcattagctgtcacagatcattatccttctttcctgagacagctttggttcacacactctgctttgtgtcagtttgtatacacatatatgtattcttttgctgttgtttggggtcatcggcctctttgttgttgcttccataagtcaaggtccctttggtaatnttcaaaaannnagnt

SEQ ID NO: 131945 - DNA, 1363 bp, Arabidopsis thaliana
  unsure (1)..(1363): unsure at all n locations
nagacagctggtccggtttcgtgctctttaaaaacctaaagaagatgagtttggtgtggagttgtcgaagcagcgacacttatgacgatgttgtggagaaagtggctgagaagcttggtcttgacgatccatccaaacttaggcttacatctgacaattgctattcccagcaacccaagccttagcctatcaagtaccgtggagtagaccatttgtcagatatgttagttcattacaatcagacgtctgacattttgtattatgaagttctggacatccctcttccagaattacaaggtcttaaaaccttaaaagttgctttccatcatgccacgaaggaagaagtggtaatccacaatatcagactacctaaacaaagcacggtcggagatgttattaatgaacttaaaacaaaggtggagctttcgcatccagatgcagaactgagattgctcgaggtgttttaccacaagatctacaagattttcccatcaactgaaagaattgagaatataaatgaccagtactggactttacgagctgaggagattccggaagaagagaagaatattggtccaaatgatcgcttaattcttgtgtaccattttgccaaggagactggacaaaaccatgcaagtgcaaaactttggcgcgcccttcttcttggtaatccatgaaggtgaaactcttgaagagaccacgaaccgtatccaaaagaagcttcatgtatctgatgaagattttgccaagtggaagtttgcgttcatgtcaatggggcgtccagagtacttgcaggacacagatgttgtttataatcgcttccagagaagagatgtctatggtgcttttgagcagtacctcgggttggagcatgctgacactactcctaagagggcttatgctgcaaaccagaaccgccatgcttacgagaagccggtaaaaatatacaattagccccaaaacatgaacacaaatgtcaggagacattgtggcagcaacgttggaccaaggcattgattggaccaatgcatcgaataagaagggaaagggcgagtgtgagggtgtgatgatgaccgtaggatgttgtagagaatctggtctgatagggttttgggttgcgcattgatagtggggtgttttcaatttttttcttttcaatctatccttattttatttcgggcttcaatactttgtgttaatatctggaatgtgtgaagaccattgcacatgcaatttttattttccaaaaaaagaatatgggagcccttcgcttgggaaaaaaaaaaaaaaaaaaaaaaaaaaaaanaaagggcggccgctctagaggatccaagcttacgtacgcgtgcatgcgacgtcagag

SEQ ID NO: 131946 - DNA, 488 bp, Arabidopsis thaliana
  unsure (1)..(488): unsure at all n locations
catgacccaactgacacaatgtcagacatgtgcagcaacgttggaccaagcattgattggaccaatgcatcgaataagaagggaaagggcgagtgtgagggtgtgatgatgaccgtaggatgttgtagagaatctggtctgatagggttttgggttgcgcattgatagtggtgtgttttctatttttttcttttcaatctatccttattttatttcgtgcttcaatactttgtgttaatatctggaatgtgtgaagaccattgcacatgcaatttttattttccaaaaaaagaatatggaagcccttcgcttggattcgggagcgcggtttggctttcagagtttatagaataccgaaacatttgtaattttagagattgtggtttaagaagatttttgactaaaaaaaaaaaaaaaaagnnnnnnnnnnnnnnnnnnnnnnnnnnnnnnnnnnnnnnnnnnnnnnnnnnnnnnnnnnnnnnnnnnnn

SEQ ID NO: 131947 - DNA, 632 bp, Arabidopsis thaliana
  unsure (1)..(632): unsure at all n locations
cgaaaaggagatttnccatgtcaattgagactacagaggaaaaagttacgattgtcgaggtaataacacaagaattgtctgatgctctttctcagatataccagtttgttacctatctttcaaaggaagcaacggtgtgttctgagaacagaactttctcccaaaaagttcaagaattatctgtcacattcgagggagtcttgagcaaggaaaagacattggtcgattttctgtttgatctttcgcgagttttagtcgaagctagtgagctaaagatcgatgtgctagggttccacacatccacagtagagattcacagcccggattgcattgataaagtcgctctaccggaaaacaaagcacttcagaaagattcatcaggtgaacattaccagaatggttgttctcagagctcagattccgagattccggatgattgcaacggaacatctggctatgaaccaaagcttgcaacttgtaaatttacatcagaagagtttgaaggtttgaaactcgagaaagaaaaagcagagagcaaccttgcaagctgtgaagcagatcttgaagcaactaagaccaaactacaagaaacagagaaacttcttgctgaagtcaaatcagacttggaatct

SEQ ID NO: 131948 - DNA, 658 bp, Arabidopsis thaliana
  unsure (1)..(658): unsure at all n locations
ggataaagtaaactccgctttagctatgtntttgattgcaggtccaagggattatttactcgtggaaagagcctttgaatatgtncttagaccgcatgctttagaacacctggcctgctgtatcaagtcaaacaaaaaaaacatatcgtttgaatgggaatgcagcgaaggggactatcatcgtatgagcagtatgcttgcttctcacttcagacatagatggttacagcaaaagggaagatcgatagccgaggaaggggtcagtggggtaaggaagggcacagttggtctggagactattcatgaggacggtgaaatgtcaaatagttcatctcaggataaaaaatcagactcctcgaccatagagtgggctcaccagagaatgcccctacctccacactggtttctcagcgccatctcagcagtccacagtggtaaaacctcaacagggccaccagaatccacagagttgcttgaagttgcaaaagctggagttttctttcttgcaggacttgagtcatcgtctggttttggatcgcttccctctcctgttgtgagtgtaccgttggtttggaagtttcacgctttgtctaccgtattgcttgttggaatggacatcatcgaagacaagaacactaggaacttgtacaattatctg

SEQ ID NO: 131949 - DNA, 413 bp, Arabidopsis thaliana
  unsure (1)..(413): unsure at all n locations
gtgaacctctcctccttcactctctctaatggcgcttccaagcactgtctcatctccttccttcaaatcaactccaccttatctctccgccttcaaccctaaacctctacatcttccagctacttaccggagcatcaaccgtcgaagctgtaaactcctctccttccgttgctcatcctcttccttctccgagaaacaccacaacaacgcgaatccacccaaatcagatgacttagtcgagcttcctctatttccactacctctcgttctcttcccaggcgcaacaatcccgcttcagatcttcgagtttcgttaccgagtcatgatgcaaacgcttctccaatccgatctcagattcggcgttgtctactccgacggtgtttcaggctncgagctgggaatcggatgcgtcg

SEQ ID NO: 131950 - DNA, 555 bp, Arabidopsis thaliana
gttggataacaaaattagttgccgacaattaaatgaagggaatggtttgtcaaatttggcaagtagagtgtttttacattatacccagtgggctaaacagaaaaggatgggcctatggatcaagagaaaagcccaattgtaacgagacattacaatatcaagatatgatgggttgggtatttgcgatgatcatatctctctccaacacattacttttggtcgagctttcttcttcaatgggcccattagcgatctcgacggagctttcttcatctggttgttcttcacctgcctgaaaaaggtcgagaaaaaacccataaatgaatgggaagaaagaaggaaagggagagtagtgttgaaacatttattacgaaggtgaagcgtctcatcttctcctgctgctccttggctctcagagatcggattggagaaatcttctgttgtccaaatcaaacggcaaattactttaaatactcttcataactaaaagaaagaagctactatatatgtttgctgcttacagaggaataggcgtggagctccttcaatcgaaag

SEQ ID NO: 131951 - DNA, 317 bp, Arabidopsis thaliana
  unsure (1)..(317): unsure at all n locations
tgatgaaggatcagtttgcaaattacgtggtccagaaagtcttggagatcagtaaagatcagccaagggagattctggtgcagaggatgaaaattcatctcccaagtttgcggaaatacccatccgggaaacccatagtagcccgattcgaacaactgtttggtgaaaagagtgaagtctcagaaaagggaacagaaggttacacagaagattttcctttgggttgcagatttgtacaatgtttgtcttagccaaatatgtatttgaaaacgcctatggatataaacttgcccccatgcnnnnnnnnntnnntggnt

SEQ ID NO: 131952 - DNA, 377 bp, Arabidopsis thaliana
cgggggcgtcccacgcgtgcggctctctcatgtcttatcccttagactaccagtcgactcagccgaacggggaatgcagtttttattttgtttcccttaggatcttagttatggctacttgcttgcgtggaatcacgaagagagttaatcttctacagagacgagtttatccatcgtgtggtcatctaattcgtgatgatagagatgaaactaaatctggttcttcggatacaatgattcgtgaagtcttagcacgtaatgggactaataagcttagctctatgtttgcggataggcattatcagtcgtttgctactggtccgttgggtcttggattgtcttcgtgtcggcatatgagttctacaccaccagaatgg

SEQ ID NO: 131953 - DNA, 530 bp, Arabidopsis thaliana
  unsure (1)..(530): unsure at all n locations
gttcacttcctgatgtatttgttgaactcgaggtgaacttctttcttctacgacgtttgttgggagtgagaacaaagggatcagagaaacaagggaaagtgtcattgctaacgaaaggagagattctgatgcgcaacggtggttcgatgtcctctggagccaaagttgtaggagttaaagtcgatctggctaaactgcaactgactgcgcctgtttgtaccagcaaaggagagaaagtggctctaagcagacgtgtggaaaagcattggcgtttgattggttggggtcagattcaagctggaaccaccatcgaagttcctccttcacctttctaagctatgtgttatttttgtcctttttgtttgtgtttctgaaaaaaagattgttaaacccctcaaaaagataataaaactctttttctcgttgggggatnnnnnnnnnnnnnnnnnnnnnnnnnnnnnnnnnnnnnnnnnnnnnnnnnnnnnnnnnnnnnnnnnnnnnnnnnnnnnnnnnnnnnnnnnnnnnnnnnn

SEQ ID NO: 131954 - DNA, 760 bp, Arabidopsis thaliana
  unsure (1)..(760): unsure at all n locations
antaaataaacccccgggttaanccccggggncnccccgaaaaaancncgggnncccccncagtnaaacncncgggntttcccnccagtnaaacccnccaggnctttccccccaatcattacccccccccggtcaaaagtcccaccaccatggtccggctatcccccatatggtcccccttccggtggaggaggaggaggcggcggcaaacaaccaacgtgtccgatcaatgcattgaagcttggagcctgtgttgatgttttgggaggattgatccatataggacttggaaatccggtggagaatgtgtgttgtccagtgttacaagggttacttgagctagaagcagccgtttgtctttgcacaaccataagacttaagcttctcaacttaaacatcttcattcctcttgcacttcaagctcttatcacttgtgggatcaatcctccttctggttttgtctgccctcctctcacttgatctaaaaacatccccttgatttaacaaatgtacgtatgatcaagggtggttttcgaggcttttgtaataattcaaatatatatgtggtacttttgattatcaggtttgttgattatctagggttttaattaacaagtgttgttttctgttattgtcgttgttgttataattaagctagggtttttgcatggccttctttaaatttcttttgcgtgtaatctttcgtacgttttgtattgttccagcttctcgctgtctatcaatttgactctttagtctc

SEQ ID NO: 131955 - DNA, 444 bp, Arabidopsis thaliana
  unsure (1)..(444): unsure at all n locations
gttgagtacagtgtcggagttgatttgtggagtgctggttgcatttnagctgagttattagctggtagagcgataatgccaggncgtaacgnggtcgagcagttgcataggatatataagttatgtggatcgccttcagaagaatattggaagaagattaaactttcttgtactcataaacatgctcatcacaagcctttaccacagtataagagaagaataagagaggtttacaaagatttctctcctgaggcgctttctctactcgatacgcttctagcgctcgatccagctgaacgccagacagctacagatgtgttgatgagtgatttctttcacggacggagccattggcatgtcaaccttctgatctcccgaaatatcctccaagtaaaggggttttttnccaagagncgngncgtgannttncggggacaagnngag

SEQ ID NO: 131956 - DNA, 426 bp, Arabidopsis thaliana
ccgtccgggaatccttgcaattggatgtgtcgattcatcgaagagaccaggaagagagcgttagtgaaggtgggttgttgatggatcccatcaaccctaatcaaacttttttaaaccctttattctcccgattttcttaaaaaaggagcctcaacgcgaacaagaacccagctcatgatccatttcaaagaaggcgtgggatcttttaccggaatgaagctcttactaaaaccgaaatgaacattaatgagaatataaaaacagaggatgtgaaagacctcgtatataaccgtgatatacaaattttatctacctcttctctttcacttccatcatatttattttgatttattataatttctatttattattagtattcctcctaaggtacgaatactaaaaaataccttgctaacaactactatg

SEQ ID NO: 131957 - DNA, 758 bp, Arabidopsis thaliana
ttgcagtaccggtccggcaattcccgggtcgacccacgcgtccgctctataaacctcttttgctttctctcttcgtctctgaccactttggctccggcgttagttttttccctctctgctactgctgcggctccggctcctgctacggtatttgacaagtgtgttgacattctctcataacaattcaaatgggtgactcggaaaacgttcagcaaccttcaaaaaagagaggtgccttgaagcagctgtctcgtgataatccaggtcttgatgatgatgatgattcagctgaacttgagagtggaactttcaagaaggccagtgatgaggttttggctagtagaagaattgtcagagttaagcgcaaagagccatctgctgctccagttgcagcatccaatccatttgctggaattcagttggtccctacgactgcacctgcttcaacccctgtgggaacaaatgcacctctggctgagtcaaaattggctccagctgaagcagtagttgaggacaatcaaaaagcaagtgatattgaggagggcgatgaaattgacagtaagaaagttgatgtcaaagatgctgttggggaagagactgaaaagacctaagataaggatgataatcattgtggaaagaatgctgatgtccaagttgccgctacagaagtagctcaaaatgtctcatgtgacacaaacgtttgcaacaacccttgtgaaggaacagacccaactgatttttctcttgagaaaggatca

SEQ ID NO: 131958 - DNA, 478 bp, Arabidopsis thaliana
agcatttccagtgcagttcttatgatccattcaacgacttaaccggtcctatccaaaccatcctttgtgaagacagcaaccaaagcatgtactgtcagttactagccggtctgattcaccgtcacaaggtgatgcgtttaggagcagtctttgcttcagcgggtctccgcgcaatctcgtatcgcgagaagaaatggagtcagctctgtgaagacatccgcaccggtggtctcaaccccatgatcaccgatccaggttgccaaatggcaatgtcttgtcttttaatgtcgccgaatccagagttagctagcgagatcgaagagatctgtgggcggtcggcgtggaaagggattctgtgtcagctctggcctaaggcaaagttcatcgaagcagtagtgacgggctcaatggctcaatacatacctgcacttgagtgctttagccaggggaagattccattggtttgtccaatgtatgc

SEQ ID NO: 131959 - DNA, 577 bp, Arabidopsis thaliana
  unsure (1)..(577): unsure at all n locations
atnccncagggngttttntccccaccncccnnaaaaggttngaggtcttaagggggcatagnaaccagcnccggnccaagccttggngncaaccaacaccaccgtcttttgccntatgggagtggatcccctttctacacaaggcttggcncctttcaaacngccctacggctcacttacccgncggattttccantacgctctttctcctgatcacgattgtagcccttgttgcagccatctacatcacatgggtcctttcagagaagaaagaactaagccgaaaaatggaggtgattggaaccgtaaggtttaaaatccttcctctctttgggctttttcacattgtagaatgtttatgaaccatttttcgcactcttagaagaaaaaaccattgtcttagctaaattcttgatgttaggctttggaaatcgagtacactttacagactcttgctttgtgacctttgtcacattctagagttgagctgcaccttctgaatttaaagtttatagaagcctctgtttaccctcnnnnnnnnnnnnnnnnnnnnnnnnnnnnnnnnnnnnnnnnnnnn

SEQ ID NO: 131960 - DNA, 721 bp, Arabidopsis thaliana
ggtgcgcctgcaggtacccggtccggaattcccgggtcgacccacgcgtccggcactggagtactgatgtgtcccatgcacccgaatttacatatagtaatgtccacctcttaccaaaaacaagtcatttatggatattatccggaggttcatgtggatctagtctaattcgtttttcgatccataaagatcaagatcaaatgaatataccttttctttccgccgaaagaaaatctatttctagcctctcagtgaataatgatcaagtgagccaaaaattttttagttccgattttgccgatccaaaaaaattagggatttacgattattcagaattgaatggaaacttaggtactagtcattataatttaatatattctgctatttttcatgagaactcggatttattagcaaaaagacgaagaaatagatttctcattccattccaatcgattcaagagcaagagaaagaattcataccgcagtcaggtatctcggttgaaatacccataaatggtattttccgtagaaatagtatttttgctttttttgatgatcctagataccgaagaaagagcttccggaattcttaaaatatggggacttctaaagggcggatttcaaatcattcccaaaaaagaaggattatggaactggaagtatttcggaggggaaggtccccacacaaataaatttcaaggaaccacaaaaaattacctgc

SEQ ID NO: 131961 - DNA, 584 bp, Arabidopsis thaliana
  unsure (1)..(584): unsure at all n locations
aaccaaaattgggnttcggtntcnnatggagggancttggtcctgnccctttccccaaaaaccccttttttcatgggaactcgggttttttgccaaaaaggccgaggaattagattcctcattcccattccaatcgattcaaggagcaagagaaaggattcataccgcagtcaggtatctccggttgaaataccccataaatggtattttccgtagaaatagtatttttgctttttttgatgatcctagataccgaagaaagagctccggaattcttaaatatgggactctaaaggcggattcaatcatccaaaaagaggatatgattgagtatcgaggagtccaaaaaattaagacaaaatacgaaatgaaagtagatcgcttttttttcattcctgaggaagtgcatcttttacccgaatcctctgccataatggtacagaactatagtatcattggagtggatacacgactcactttaaatataagaagccaagtcggcgggttgatccgagtagagaaaaaaaaaaaaaggattgaactcaaaatattttcaggggatatccattttccggacaagacag

SEQ ID NO: 131962 - DNA, 394 bp, Arabidopsis thaliana
ggggcgtcccacgcgtccggctgggcagaaccagatccaatcaaggagcttacactcattaggtacgggtaggcattttgttttttctgacccatctctgaagtcatctgatttttggggtacggctcttggatcagccgaacgtgtgagtgattcttgtgttaaatctaaatctggtagacctggtaactcctctctgcatttctcctttggctctggctcctctagagacacctcagctgctaaagtttctgagcagaggagtagcattttaaaagaagctcctagggggactggttatatatctgatggagtaaacttaagagaaagaaatgctaaaagatttgatgaagctgaaattgcattaccaatttcctcttctactgatacgctg

SEQ ID NO: 131963 - DNA, 446 bp, Arabidopsis thaliana
tacggctgcgagatgacgacagaaggggactagagataaccctagaaagatctctctcgatctctggttcgaagaaaatccaccatttccgattgttctttctctttgacaaaacccagatagataaaaattcgttccaattccagtgagctccggaaatggcgtccttcaagttgatgccttcttccaattccgacttgtctcgccgtaattcttcttctgcttcattttccccttctataagatcatcgcaccatctccgaccaaatcctcacgccgatcactccagaatcagtttcgcttacggcggaggagtcaacgattatactttcgcgtctgattcaaagcccttcgagatggcgattgatgttgatcggagtatcggagatcggaacagcgttaacaacggaaagagtgttgacgatgtttggaaagagattgtatct

SEQ ID NO: 131964 - DNA, 471 bp, Arabidopsis thaliana
  unsure (1)..(471): unsure at all n locations
acgggnttaannccggncntnaaccaaaangnttaanactaaccgttaaaaaagaaccccgtggcttcgtcgagcagcaacacctttggatctttgacgatggctctggctatagctactcgttgcttttgtccgcctgataattgaattcctctttctcccaccatcgtatcataaccctgttgcagaccactgatgaatccatgggcgtttgataattcagctgaagatacgatttcggattcactcgcgtctcctcctttgccataagcaatgttggctctaattgtctcgttgaacaagattggttcttggctcacaagtcccgtttgttgtcttagccattttagtcttaggctcttgatctctacaccgtcaagagtgatctcacctgaatctggatcgtaaaacctctgcaacaatgcaatcaccgttgatttccgcataactacaccaaccaaagccggacgc

SEQ ID NO: 131965 - DNA, 645 bp, Arabidopsis thaliana
  unsure (1)..(645): unsure at all n locations
gcgatcatcatcattactttctctatctatctctcttcttaaagcggccatgggtgctctccaagtttcatgtcaagctttggttctngntttggtattttcttaattgaaatacaagatcttgaacaaaaagaaatggaaactgaagacgatttgtgtaacaacaactggggaagctcttcttcgaaatcgcgagagccgggttcatcagacggtggaaattcgacattcgcaggttttacatcccagcagaagtgggaagatgcttcaatcttggattatgagatgggtgtggagcctggattgcaagagagcattcaagcaaatgttgatttcctacaaggtgttagggctcaagcgtgggatccaaggacgatgttgagtaacctttcttttatggagcagaagattcaccagctgcaggatcttgttcatcttcttgttggtcgtggtgggcagcttcaaggtcgtcaagacgagctcgcggctcagcagcagcagctttataacgacggttcttacttcccattattcatacagcttatttcaactgcaggtagtcttcttcccatctgtttaggcttaatatgtccaacagttccggggtccctttcactggggcgcccggttcagccgtgttccctt

SEQ ID NO: 131966 - DNA, 392 bp, Arabidopsis thaliana
atctttatctccagagaattgaatattgttggggtttttaatattttcgtcattgtgtcgtgttattactctcgtttgttaaaattactatcaaacttttacacgtaattttgaaggttattccaatattttaccttttaaaatctcttgtaaaatcctatttaaaatgtctgtttaaatccttttaaaataccttgtaaatctttcgttatgccacttacatatactttaaacgattgtaaatcaagttaaacacttttacaagcttttaacttgaatcttttaaaatgtcttgtaagtcgcttactaaaattactatcaaactttacaagtaatcttaatagtaattccaataatttacctttttaaatatcttgtaaaagcctgtttaa

SEQ ID NO: 131967 - DNA, 448 bp, Arabidopsis thaliana
  unsure (1)..(448): unsure at all n locations
gagaagaaggagcaaaaaggttttnccgaagttgagagatcaatcaaagatttgaagggccgatgaattcaggaggcggcatcgctgctgcagcagctccttcaagcggccgtggtaatgttgaatggcatgtccgaccaccgaaccctaaaaacccagttgtcttcttcgacgtctctattggtggtatccccgccggtcgtatcaagatggagctcttcgccgacattgctcccaaaaccgctgaaaacttcaggcagttctgtactggtgaactcagaaaagctggaaagccgcttggctacaaagaatgtcagtttcacagagtcatcaaaggtttttantgggtccaaagtgggggatttttttaagaattatnggtaggnggttncantgncaatntncgggccncaannttttgggggtggggaatttttncnnnttaaaa

SEQ ID NO: 131968 - DNA, 472 bp, Arabidopsis thaliana
  unsure (1)..(472): unsure at all n locations
ctctcatccatggcggatttcttctatcttcattaaatatttccctctttattaaaatctcatgantttcaacggttttttcgacgacggtgctggagcctcatagctactctctgatgctccgtacaacaaccacttctctttctccgccgtagacaccatgctcggaagcgccgccattgctccttctcagtctcttcctttctcttcttcaggcctctctctcggactccaaacaaatggagaaatgagtagaaacggagagattatggagtcaaacgtaagtcgtaagagtagtagaggagaagatgtagaaagcagatctgaaagtggttaacgctggaagctgtctccggtgacgatttagatacctccgatagacctttaaagaagaagaaacgttaccatcgtcacactcctaaacaaattcaagacctcgaatcggtttttaaagagtgtgcacatccagacg

SEQ ID NO: 131969 - DNA, 389 bp, Arabidopsis thaliana
tactccttggctctttgccaagaccacctgctgctgctgcactctaccgtgcgcttggcgatctgtatcagaagctgggaaggtgattttaacagttgaagggaatttgtaattctgactccaatgatggaaaagttcttgacctggaaattttcttgttggtgtgcagtgaaactgttcggtctccagcaatttctccattgtctgaagactaaacttgtggaattggcttcatgtctttggaagaataacaacagtattcttgtatagattcatgcaattcttgaatgtacatagtttggtagtttgtggtttgtaaataaacatacattattatctgaagttataaattgtttcaaacttaaacccctgcatttttttctattttt

SEQ ID NO: 131970 - DNA, 495 bp, Arabidopsis thaliana
  unsure (1)..(495): unsure at all n locations
ttttagtccgaaaactcccgatggacctacgggtcctgattaagatacctatgaatactggtttaccgtccgtcgattgggtcccagccttttcccttccccaattcatcgctgtaatgtatgaggaaaatcggcaggagcttcttgagctagctaagaatttgttggaacgagaggaggaaccagaattgcctgtaatatcccagaaaacgttaatcgtttggggagacaaggacaaggtgtttcccttggagcatgcttatcggctgnaaaggcatttacagagttcaagattagagataataaaggaaactggacacgctgttaacattgaagcaccaactactcttaataattttattacttcgtttgtctttagtgcttgatttctagttttgtatatacttcttcttcatataaatacctatatgcatttgatctaagtgtatatatagttgacatcatttaacatatcatcaactgctgagtcaaaaa

SEQ ID NO: 131971 - DNA, 447 bp, Arabidopsis thaliana
  unsure (1)..(447): unsure at all n locations
cttgttaccaagatgagcttctacaaaagaagctttcactctttccttggccaaaccaacaccaaagggatgccgtttgaatccggtcttggccatgatgagacacaatcacatggcttaatgttgtgcacagagtatctagggtttgagagttacgacatgaggatgtccgataacgaggtggagaacaagatgacttgtcatgcggaggtggagaccgaaagggttgaagcaaagaggaggaagacgaaggagaatgtggtggtgcaagcgcagaaaaaacagtttcctccgcctctctcgtcattaaacagccgtggacagcgatatttttatctccgtccggtgagaaaagacggtagattggaacttacgcaagttatggtcgatcgnccagagattttccacgnttctagagtagatngacggttnaaaattacatttttt

SEQ ID NO: 131972 - DNA, 454 bp, Arabidopsis thaliana
ctcaattttgctcagacaaaaaatcaatggctttgcaagtgcagcaaacttcagcagccttcacaatctcctcaccatccaccgccgctgcacgcatcaaactctcccctttcagaaccgtggcggttaaccgcggagttagatgcagcggcggtggagtcggagtacgaggcggagatgccgggaagaaaaaagcagttcctaattctaattatgtagttcctattgataaattctcatcttcttcgtcgattactaggcctttgattgagatacttcgtgaccttaataagaagattcctgataacattgttaagagtcatgatcctccttctacttctgctgctacttctggttttatcccttggtaccatgcaaatcggatgcttagcttctatgctcctggttggtgtggtgaagttagagatgttattttctctgagaatggaaatgt

SEQ ID NO: 131973 - DNA, 702 bp, Arabidopsis thaliana
ctaagagattcttttccaccgtctgacaaatctttaagtaaattgcttggagattctccacatctgccgaaatcagttctgaagttgttggaatcgttttgctgtcctggaagtggtgaagttgaaaaggatttacaacatggagaccgtgttactcaaggtctcagtgctgtttggagcctgattttaatgagacctggaatccggaatgactgcctgaatatcgctttgcagagtgctgttcatcacttggaagagattcgcatgaaagcaatccgcctggtggcaaacaaactctattctttatcattcattacagaacagattgaggaatttgcaaaggataggctattttctgtcgtaagtgatgattgtgataagatggatcttgatctgaaaagtccaccaaacaaaccgcaacacagtattagtggtatgagtatggagacgccctccgaagcaacatcatcatcaacttcagttactggagctcaacgctgcttgtcactctattttgctctctgtaccaagaagcactccctttttgttcatgtattcagcatatacaagaatgcatcagatcccgttaagcaagctattcatcttcaaatccctattctagttcgtactatgggctcatcctctgagcttcttaaaattatagcagacccaccaagtgggagtgacaaccttcttatacag

SEQ ID NO: 131974 - DNA, 360 bp, Arabidopsis thaliana
ctctctatttcactaaaatggcatgcaactgcagtttagcgaatgttctaggggtagttttagtattcactctgttccacgacccgatcaccgtggcgcggacaaaatattccggcggtggcattgttcacgttcggcgattccaacttcgacgccggaaacagaatgttcctcgcaggtacaagatttcctcaaaacttctggccttacggtaaatcccgagatgaccccagtggcaagttttcggatggcagaatcgtccctgactttatcgcaaaattcatggggattccacacgatttaccgccggcgtttgaacctggcgccaatgtctcacgaggagctagctttgctgtagac

SEQ ID NO: 131975 - DNA, 770 bp, Arabidopsis thaliana
gaccaagtccctaggatgttccaaatagcagggagcaagacgcaagaacaacaacaacgagttgacttggccatcatggaaaaacgctttcagcggtttcgacccgaacataatcgcagaagcattcaagatcgaccccgggacagctaagaaactacagaaccagaaagacaacagaggaaacatagtccgagcagacggtccgctacatttcatcagctccccgtcacgtcaatggcaacaagatgggaatggtaatggcatcgaagagacgtattgcacggcgaggctgcacgagaacatagacgatccagaacgtagcgactttttcagcacacgagccggcagaatcagcactcttaacagcctcaatctccctgtcctacgtttagtaaggcttaacgccattagaggcgttctctacagcggaggaatgatgttgccgcattggaccgcaaacgcacacacggtgctatacgttacaggcggtcaagccatgatacaagtagtggacgacaacggtcagtccgtgttcaatgcgcaagtgcaacaaggagagcttcttgtggttccacaaggctttgcggttgtcaaaaccgctggtgaaacagggttcgagtggatagcgttcaagacgaacgacaatgcttacatgaacacactcagcggtggaacatcgtacttgagagcggttcccgtggatgtgatcaaagcggcgtatggagtgaccgaggaagatgccaagcgggtcaagtttagtcagcaagaga

SEQ ID NO: 131976 - DNA, 586 bp, Arabidopsis thaliana
cggtgcaggaatccgccggcggcgattccacggcgtgcgctatctcttcaacaagatcataatggcggatactgctagaacccatcacgacataaccagccgtgaccagtacccgatattgggccgagaccgagaccagtatccttacggacgatcagactaccagacgtcgggccaagactactccaagactaggcagattgctaaagctgctaccgcagtcaccgccggagggtcccttcttgtcctctccagtctcacccttgtcggaacagtcattgctttgactgttgccactcctctgcttgttatctttagcccaatcctcgtgccggctctcatcaccgtagcacttctcatcactggctttctctcctctggtgggtttggcattgcagctataaccgtcttctcctggatctataagtacgcaacgggagagcacccacaggggtcagataagttggacagtgcaaggatgaagctgggaaccaaagctcaggatattaaagacagagctcaatactacggacagcaacatacaggtggtgagcatgaccgtgaccgtacccgtggaacccatcac

SEQ ID NO: 131977 - DNA, 636 bp, Arabidopsis thaliana
ctcgattccttgagaataggattcatggagagagtggttattccttcacgtcatccacctcctagatttctacttgattttgtgaagaaacaaattaaaaacctaagtatttcaagcctatataaaaaggtcatgcttcaagtcttggagagacacagtgaagtctttgatagttacacacaaatagcaatagcaaaagctccgacaatctctttctgttaaaagtaagtctcgagagtatcgtagtaactattttcgttagagttgagtttcgagtgatgcaaaatcagtttatagaggttgtatcctgagatccttaaatcacacagaaactgttacactacggggtgatttaaaaggttaagggaagaattcatcaactcgtctcatctcatgttctttccttaatgtttgtgattttgatttcaattgcctttacgtaatgtttgctaattttacctcctacaaaatcaagacgaattagttgagtattgatgtaaaaaccagatcaggagactaattgaagtattgaactccattttgagccttttgcatagaaaccttgttccgaacgcacaagtccgcttcaaattgaccaaggatgaacatacaaaagtgatttcaattattcatcac

SEQ ID NO: 131978 - DNA, 486 bp, Arabidopsis thaliana
  unsure (1)..(486): unsure at all n locations
ggaaacaaaagagactctgtctgaagaaagctaaagacttgttttgattcttgacaaaagaaactgtgtctttggagaactctgaagtaagagagacagagaaagacaaagagagagacatggtgggctcaggagttggaggaggagatagaagcaaagatgctgtaggaatgatggcacttcatgaagcacttagaagcgtctgttttaactccgactggatttactctgtcttctggaccattcgtccccgaccgagggtccgtggtggtaatggctgcaagattggtgatgaaagtggcagcttgatgttgatgtgggaagatgggttttgttggtggaggaaggaagtgaagatcttttgctgggaacagacatttgaaggtcatgaacgaagatcttttcaaaaaagctttcannangtnnccctncggcatataattttggggaaggttttttgggnaaagtncctnctnanaatnncca

SEQ ID NO: 131979 - DNA, 478 bp, Arabidopsis thaliana
atcattggaggatgataagaatacgcatgtatacgcgattgccaattcgttaatcataaatgctgggttactatatataataagttacgggatatgaaaacaactatatgcacaaatatgagggattgctgtaaattaaatctttatacatgagattaatttaatcaatcacatagataccaattatagcggattcatagataaattaacagagtccttctttgtgagatctacattgagatttttttctaaaatgaagaattaagaggttgataattaaattaagatccttgtacaaaaaaactaccattattattactgatcagtaaaattaatatctttcaattcatattaaaaggggaaggatttctttttatgataaaaaatatagtcatttcatttgaagaacaaaaagaagaaagcaggggatccgttgaatttcaagtatttagtttcactaataagatacgaagactta

SEQ ID NO: 131980 - DNA, 560 bp, Arabidopsis thaliana
gaagcagccatggttcgggccatatccgcccgtgccgagttgactaattccggcaagagctgcacggatagcaagaaacaagcagttttggcggattgcattgacctctatggagacacgatcatgcagttaaaccggacattgcatggcgtgtctcctaaagccggtgccgcgaaaagttgcactgacttcgacgctcaaacgtggctgagcaccgcgcttacaaacaccgagacctgccgacgtggctcatccgatttaaacggtcacaggctttcatcacacccatcgtttcaaacaccaaaatctcccacctcattagcaactgcttagccgtcaacggggccctcttgccccctgggaacaaaggcaacaccagtgctaatcaaaagggctttccgacgtggctttcccgtaaagataagagactcctgcgtgccgttcgagccaccctcgtggtggccaaggacggatcaggacatttcaacacggtacaagcggctattgacgtggcgggacggaaaaaggtgacgtcagggaggttcgttatatacgtaaaa

SEQ ID NO: 131981 - DNA, 616 bp, Arabidopsis thaliana
ttttggtgaagagactcacggcggtgaatgtttcaagaactcctgggggagatttctccggttatgctctccgacaagctacaagcggaatcaaccacttctcaaccggatttaagcaaacggagggctctactcatgacgataagtccacgacgagttacgtggcagacaaggcaaaggaaggggtgaagaaagcgaccgacgcagccgtcagcacgggtgataacatgaaggatgcgatggatggtgcgtggaaagcggctaaggaaacgggtcaaaacattagcgatgcggttacgggcgatgatgatgacggcagaattcaagaggataaggtcgcagtggaattgaaggatgtgcaacagcctgtggatacgacggagtatagaggtgtggaggatctacatcagcaaaccggcggagaagttaagtcaccctaagctaatgtgttagggtgtctatcctttctttcattgttgtttcagtgagaggttgcttgtgcctcgtggttcaaattaaaggtttatgaatggaccgtggcttagatcgcattacaatttactcttattactagttgaactaaagcaaaataaacaactactccgattctccgaac

SEQ ID NO: 131982 - DNA, 386 bp, Arabidopsis thaliana
gaaagaaaaaaaaatgacatgggcttatatttctttacgcggtccctggattcgagaattaaataatgaaatttctatctttcttggtgtctttgttcagactaaattgtgatatagtgagcatagcaaatgaagtaatggaaatttgaatatagcattagcaggaacgtttccacataactagttgcatatttcaatgcaaagaaaagaaacatgttatttaagaatataacaagaggatgtatgagttatgtgggtaaaattgaagttttttgctattttgggaaactttactatttttatttaaatttaaagagataaatgatagggtaacatactaacatgattttgtatcatgttgacatttaaattgtctttataggatg

SEQ ID NO: 131983 - DNA, 479 bp, Arabidopsis thaliana
  unsure (1)..(479): unsure at all n locations
gaattcttattgggcgaaacttccggcggttaaagcggcgatgattgctcagcctgaggcggagtggatctggtgggttgattctgatgctttgtttacggatatggattttacgccgccgtggcgacggtataaggagcataatcttgttgttcatggttggccgggagtgatttataatgatcggagctggacggcgttaaacgccggagtttttctcattaggaattgtcagtggtctatggaactcattgacacgtggacaggtatgggaccagtgagtccagagtacgcaaaatggggacaaatccaacggtcaatattcaaaggcaaacttctttcccagagtcagatgatcaaaacggctctcgctttacttaactcttacaaacacagagaagtgtattnttccaaggttttncctcgaagggggacttttnttttcgaagggatattggttanngatcganccgggttnt

SEQ ID NO: 131984 - DNA, 400 bp, Arabidopsis thaliana
tgacaagaaggaagccgtgacgcttgggacatttttggatggatcgcagccaaaatagagtgggggctgttgtacttgctaccaagggatgaagaagggtttttgtcaaaagaagctattaggcggtgtttcgatggaagcttgttcgagtactgtgccaaaatctacgctggtatcagtgaagacaagacagcatactactaaaagtatcctttatgttaagtaattgatcgagccattttaagctaattaatcgatcaatgtgaagcttgtgcctatacggtaaatgaaggttcgggtagtagtatggacttttggtctaagagatctatgtttgtttttgtttttccagttctgtatggttatactataagttgcagctctaaagaaaagcttctgt

SEQ ID NO: 131985 - DNA, 364 bp, Arabidopsis thaliana
  unsure (1)..(364): unsure at all n locations
cccnganacccggggaagttttccantaccttctccaggtaggtggttgccccccatgctgttacctgggaagtcccgtggaaggaggggaaagtgcctaagggtgttgggaagttagtaaagggaaagtggtgaaggcagtgagtgaagtggaggagaaagatgggaagctttggatgggaagtgtattgatgtccttcattgccgtatatgacttgccttagttcgtttctttttctattcaaatttgtatatttctagtttggctatgggattgcaatatgcatctcgttatcaaactatatttgacgtaatcaattcaaacacaaacaattactaaatacagtatcctttttgccntgtc

SEQ ID NO: 131986 - DNA, 721 bp, Arabidopsis thaliana
agatggtgttgtcagttttctcccttctccaaatgaagtcaataactatgctcttgaccagaataataatgaagagagggtaaccttgactggatctccagatggacctcttgtggcgctggctttcaaattagaggagggtcgttttggtcaattgacatatttgagagtttacgaaggtgtgattaagaaaggtgattttatcataaatgtcaacactgggaagagaattaaggttccacgcttggtccgtatgcattcgaatgatatggaggatattcaagaggcacacgctggacaaattgtagctgtgtttggtattgagtgtgcatcaggtgatacatttacggatggatcagtcaagtacacaatgacatcgatgaacgttcctgaacctgttatgtccttagctgttcaaccagtttcaaaagattctggaggacagttctcgaaagcattgaatcgattccagaaagaggatcctactttccgtgtggggtttggatcccgagagtggccagacggttatttctggtatggggggaattgcatttggacatctatgttgaacgcatgcgaaggggatttaagggttgatgcgcctgtggggcaaaccccgtgtcaattttaggggggctatttccccgcgggcagagtttgattatttacataagaagcaaagtggaggagcaggtcaatacgtagagtacagggtacgtgg

SEQ ID NO: 131987 - DNA, 493 bp, Arabidopsis thaliana
ccgctcttctcctcagagcttccagcaccaggtaattcctctgaaacaagtccatcctgaggctgtgtaacggacatgttacacggatatccacctgctactggtgacaaagggtacccattctgtgttatttctgcaccatttggggatgctaaatagccatttggtgacactggatacccattagaaacccaaggttgacccggtatgaactcagcagcatgggggttcattattcttgggccattgaattgattaccctcaccattggactcggtgctattggggaagcttggtttgttacgcggaaccctgtttccagatcggttgtaaccaccaccagagagtctaggcccataaggaactcgagctgttacagactgatgaggagttgatctgcggacatggttaataggaagcattggtggcatattcaatggagaggttgatgatgatgatgatgaatcagtgagtcagaacttaggaaaagctc

SEQ ID NO: 131988 - DNA, 682 bp, Arabidopsis thaliana
  unsure (1)..(682): unsure at all n locations
nnnnnnttcttgtttcagtaaaaaaaaaaaaggatcattttcattatcagagtaaattacagaagaaacaggggattgtttctaacaaaagataaaacaggattctcacaactgcgtaaagaaatgattcaagagtctagagttagactcatgttgatacataagaaaaaaggaagaaaacacacaaatcattactcttacaagatcatatttactcgtcgaaaacatatctttacttacgatgataggtaagaaggaagagaaacacaatcatatcttacacatactttttggtatgtatatgttaaagaaagggcatcactgttgcttggagtttgattccacgatcttgcttgccggagctttctcttgtttctctacgtacgcagacggaaaccatccagctttgcctttgtattctccttctgaccagcctgtaccagccacctgtcgcacaattacataatcatcgacagcgagactgagttcccctggggcttgagcatcaaaacgggtgcacaaccttcgggaagaaagctaggaatcattctggctgagaaggttggtgattgtgatgatcancagncccanngggacttcttggtcttcttccccggggggctnganttacttcttncntgatganngggttgggnctcttccttgggggacttgncttcnc

SEQ ID NO: 131989 - DNA, 518 bp, Arabidopsis thaliana
  unsure (1)..(518): unsure at all n locations
tgaacgtccctggtttgacagtgggcaccttcaaactcctcagcaaacttattgacaacaaaggattgtcagggacaagacgttactttggtgatcttgggaaaactctaagaacagcaggatccaatgtcgtctttgttgctctcactgaaatctccgattcttttctgaggggtgcagaaatgaaaggtgttgatggactggttagcggtttccaccatggaatccttaaactggcaatggaaccgtctgtgataggaacagctttgatggaaggtggccctgatagaacaattaagcttgatcgtaaccccggtattgatgagttatacatcgaagggtaccttcaagctatgttgggtacaaatgtattaggcaagagtatctcagagtcaaagtcattgacggtcacggttttcctgaaaaacctccccccaaggaaattttttcaaaaggtgtggtggttgagccctgttaaaagtttttcttnaancagggggtttctcaaagggggtncc

SEQ ID NO: 131990 - DNA, 767 bp, Arabidopsis thaliana
  unsure (1)..(767): unsure at all n locations
ctcttggtactttgggaatgtatatccatcaccaccatgcctgtgccagggatttgtatctagccacatggtatctgcaggccagattcatatttcttggtcgaatggatgatactatctgaggtcagctcttgactacctggagatgcagccatgatctgtcagcccatgttcncggtgcacatacctacaagtgcccaaattgtggaatcacaagctgggttagattacctatatatgatgcagactttggttggggtcgtcctatctttatgggacctggtggaattccatacgagggtttgtcttttgtgctaccaagtcctactaatgatggcagcttatccgttgccattgccctccaatctgaacacatgaaactgtttgagaagtttttgtttgagatatgagagcgttaagccctcgtttttccctcagtaaatttgggcaaatttgcttcttgtcatcatcctgtgttttagagggtacaacaaatcataaggtgtgcttatggtctgtaactttggactatgtcgtataggaacttttgctttatgttaatacagatgataagtgttgttctataacacatgccgtgattgttttgtgtctcattggttatatccaccatgcatgtatgattttcagcttccatgcaataactctgtttctatctttcaaaaaaaaaaaaaaaagggcgaccgctctagaggatccaagcttacgtacgcgtgcgtgcgacgtcatagtcttctatagtgcaccta

SEQ ID NO: 131991 - DNA, 798 bp, Arabidopsis thaliana
  unsure (1)..(798): unsure at all n locations
nnnnnnnnnnnnnnnnnnnnnnnnnnnnnnnnnnnnnnnnnnnnnnnnnnnnnnnnnnnnnnnnnnnnnnnnnnnnnnnnnnnnnnnnnnnnnnnnnnnnnnnnnnnnnnnnnnnggatgcaaaccttagtaatatatcagaaaaaaagattcaaaattacaatttaaagttacttttccaaaccggattgcttttaaagtctaatatcaaggtttcaaatctccaaaaataaaaggaaaatccttctgatctatgatgatacacgacctctggtgtaaatagtcatcaactcaagcaccagctccttgtcaccatggttcctcacatacctttttaagaacaactcatcagtacataccaaaacagacgacattggagggagttcacttcctgtgtctccgagaagtctttttgacatgagagctctaataacattacaccttgggacagtcctcttctccaggttgtgtccaagtaccgtaggatttgaaaccacatccttcagtggccaattcatcttcttcaccacaaactcaatcttcttcttcaccggctctgcagataaaataagacactgaggaaagcgcttaacccttgttatgaactcatctctgctgaagcctaggcctagaaatatttcaatggagttcaatttcttctgctctgaagtaccaatgcactgcggatactttttcaacactgagatgacctcgtcttcgagtagtccacacttcttcagggtttcaattgtctgacctttcttcttctccgaactattcaaaaagtaaggacacttt

SEQ ID NO: 131992 - DNA, 405 bp, Arabidopsis thaliana
attagatccgaccagattctctatttggagacagacattactcggatctttatttcattttgtatgagtctgtattgtagattttgagatcaggtagtgtggatttgagatcaggtacatttacttgcaaggtgttttgaattttggttgtggacataatgggaaagcctgcaaggtggttaaaaagtgtactacttggaaagaaaccatctaaatctagtggttctaaagataaggcgagaattgtgaatggaaaagaagtggtggttatatcaaagattgaagaatccgatgttgtttcggatcttccatcaattggaaatgcagcagtctataccagtggtattgtagagacgcagaatctaaaacatgaagatgtttcggacgacgagatacaagtttctg

SEQ ID NO: 131993 - DNA, 376 bp, Arabidopsis thaliana
ggtctatccaacgtataaaccaaatataaacacacaaatttattgggagtgtcatagtttaatctaagagtgcgaagagatgcagattgagatggaagagaagtttgaagattggagaggcaaagaggcaatttctggcaaacatggtgggattaaagctgctttcattgcttgtgttgtagagacgatggagaatatggtgttcttagcatgttcaaccaacttcatgatgtactttacgaaatcaatgaattactcaacacccaaagcagcaaccatggtgactaatttcgtagggacatcgtttttgctcactattttcggtggttttgtcgcggactcttttctcactcgcttcgctgctttcgtcctcttt

SEQ ID NO: 131994 - DNA, 780 bp, Arabidopsis thaliana
  unsure (1)..(780): unsure at all n locations
tctaaagggcacaaaagctggagcttcaccggggtggggggcgctttatgaacttatggatatccccccggctgtgaagatatattcgctttcgctttcgtaatcgncccaaaaccaaccaaaacggttctgtgatcggaaccgccgtatacatcaattcaactacgtatgtgccttcgtcccttagcttagccagattcatcactggggatttcatcagcagccgtacaattatgccctctggttgcagtatcagagctctctggatcatcaacaatcaagacactgttgttttctccaggaggtttccggtcgtcgagaagcaatggtgctccgcttacaagacggagaacgaaaacactggattagatcttcctagacttcccactgatcaacaaatctccgattcttttactcgaagaaagagacgggaaggctctactcgtggatatggtatacgtgttgctcaatccaccaaaggatcggattcttgggttgatgatcccatcactcgtcatattatcagcctttgcttaaccgaagaagatgatgatgatgatgatgaaaggaacattctctggcctattgctctgcataccaaagcgctttactctatcctcgtcttgcctttggttgagcccaaggagatgaaagattacgtcaagctttggtagagatctggatgtgggaccagctggttggtgaaagatttgaagtttatcaatctttctttgcttaacaatttcaattcctttaccagggcctttttaatggggggct

SEQ ID NO: 131995 - DNA, 643 bp, Arabidopsis thaliana
  unsure (1)..(643): unsure at all n locations
catttggcaagcactacaaaccgtttgggngtaatggggcngttcaaggatctcggggtgaattttccccccnngngngtatgaagtccttgataacccnccaacatcttaccattctccagcagactccaaggaagtttatttatttttctcccacttcacgacgtcttacatcaaacttgtttcaaagtagaggtaattcataagttcttatcattttttcttttcatttttttttgtccatttgtgatcactctgtgctttggtatttcaaaaatgagtagaactaactaccagagacagtagctttattacgtctgttgaaatgttgagtcggttaggaagagagggtaaggaagatatgcaagtatgtgtgcaattatttcaatgtataaaccgaagacaaattcttgatagaaatcaaatcatttttcatgtaactttaattatatctcgtcttctacgctcataaatttgatgtgcctctctctcttccagagttatgtcttcaaagataagaggacttatattgtttaaggaaccctcagaatttacatctcaaaatgtaagatggagattgtagtaacgtagataagaaaaagtaacctgtctagatttgttcttacaatctagaaacatgtcg

SEQ ID NO: 131996 - DNA, 420 bp, Arabidopsis thaliana
  unsure (1)..(420): unsure at all n locations
gnccggnttgtttttcctttcttttngctaatnatcatcggtttcttctaatcaaaaaaaaaaacaaaaaaaaaagagggacaacgttcgtacaatcccatccttggtatggatttctggccggagtttatggcgaccagctggggaagagagttcgtcgccggtggtttcggtggcgtcgccggcatcatctccggctaccccttggacaccctcagaattcgccagcaacagagctcgaaatctggatctgccttctccattctccggcggatgctcgccgttgagggtcccacctctctctacagagggcatgggctgcgccttttgggcctccggcactttttcaagaatgctatggtattccagattttcgccggattctctcgctcttttgattcctctgttcctctggtagag

SEQ ID NO: 131997 - DNA, 633 bp, Arabidopsis thaliana
  unsure (1)..(633): unsure at all n locations
nngtccgccaggacttgattcatataatcatttcccaagtgccatttggattggtgaccgtggagcgcaaattcatttgcgtgaaatgtaccccannatgaattgccattctagatatctnnacgactgagcgactagtgctataccataattcccagtctnctggcttcaaggtggcatttacctctaggagctgtggtttgtccacttgctgagactcctgaaggggaggaggtaccacttattgattttggctcaactggcatcatccgctgcagaagatgccgtacctatgtgaatccttttgtgacttttacagattctggaagaaagtggcggtgtaatatatgttcgatgcttaatgaatgtgcctggtgaatacttctcacatttggatgctactggccgaagaatggatatggatcaacgacctgagctgactaaaggcagtgttgaaatcatagctccaactgaatacatggttcggcctccgatgccacctatctacatcgtcctcattcatgtttcgatttcggctactaagagtgcaatgcttaaagttgttgctcaaagcaataagtcctgtttggataacctgcctggttatccatgaacccaaattggatttattac

SEQ ID NO: 131998 - DNA, 773 bp, Arabidopsis thaliana
  unsure (1)..(773): unsure at all n locations
cattccgttnnnnnnnnnnnnnnnnnnnnnnnnnnnnnnnnnnnnnnnnnnnnnnnnnnnnnnnnnnnnnnnnnnnctttttttttttttttttggtccaagtatgatcaatcaatatgaagttttgtaaacactgaaatgcctctttaaggaatatcatcgacattcaatacaaatttccaaaagataacatgtcactagagtcgcaagcttgtaccaagtgaaattgaaatgcaaataggctagagaaactaagaaatgtttatagacactaagaataagtaccaaaccagaccattactggatttactctctcactgctatagaggtcattgggctgaatcacagaggaagaaggtgaaattcatgggacatgaagtcttcactgggtctgtaatacttgtctggtgagtacaagcgtaggtttgagacttggcttgtgtacaggcatgcgaatctttcccacctgatgagcaaatcgagaactctggtagccagttttcatcagttgcccccagaccttgtgaaacttttggtgacattctctttgagcttgttgatgactctgtcgtactttatctcttttagactctaagtccttgagcgctgataacatttcgagcttattattctcggtgatatcctcaaacctaatttaaagaacactcactttagagaccaattcaagtgatgaattttgtcttcaactgaaatacgcttatttctcatcaaaataagaaccttacgcatattcctcagttcccataaaagtt

SEQ ID NO: 131999 - DNA, 842 bp, Arabidopsis thaliana
aaaacggcctcgataagctagatatccaattcgcggccgcttttttttttttttataagaaaaccctcatagctataaaagacgctgttaaatagattccaaaattccaaggaacatgattattacagaacacaactacagtttaatcaatggaaactcctaatgtgagttggctcagaacattgaacacacgacggtgaataagtgtcaaaagatttttccacttacgagttaaagcgtctcactctaccagatccagacccaaaagctcgaggtggtgcaaccatatccatctgcaatctctgtgaaggtaaaaactttcgagcttccatatacttgtacattcttctcgcatctttttcaaacccacccccttttcaacgcacttttagctttgtcaaactccgttagggtcccatttggtctctcttagcttcccaaaccccaagagcttgaagagtcttcttctcattcctcacacccgaatacatacagcacaagctcacctggagttcaaatggtggagcttctcctaactgagagatcttaaccagaagctgctcagcttcctcgataagcccaagattagccatccaattcaacaagaacggtgtaagtgatcacaccaatttcaatcccttctttctccagctgcaacaaaagtctcagtgccttatctaatgagttctctcccttataagctcggaccaaatttgcaatgcacttgtcatcgggtttgtggccaagctttctcatttcatcaaaattacttttcgctttatccacctgacctgctttcccatatgcttccacaaataaactatatgcttcaaagctcagtg

SEQ ID NO: 132000 - DNA, 655 bp, Arabidopsis thaliana
  unsure (1)..(655): unsure at all n locations
cnnanccangaacncgttcctccggcccgttacaaaanaccaattnagttncttttnaaccttcttgggcctngaaaccgccncagggcataaacttcncgggctcatcccaaaggncttgggccnctatggatggnccaagcgtttactagcacgatagtgccacgtggtatgccgtatccaccaatcttgagatcttcagatggagaacgtggaacaagaagtggtgcagctgganacaaccgaaaagtctcggaaactatgttttggagataaggtagattcgcaatgtcaggttcatcgaccaatctctcttctccaatcttctcgtctatctcagcttttgcctttttcaacacttcaggtttttttaataaatttgccatcgcccattccaatgttacggccgcagtatccgttccagctagcatcatactctatatacattaaattcacacacaagttgttagttcatctacacatgtacacatataatatctttataatataaatgtaaaaacataaaccatctttcttctttcagttttatgtttgcatttagtgagtccaaggaaaaaaaattatatttaaggtttatatgtatgagaatacttacgagcatgagccctttgatgatgacgtcactgtaatactt

SEQ ID NO: 132001 - DNA, 377 bp, Arabidopsis thaliana
gcctcactaatcatatcatcagcctcattgaggccatgcaacacggggtgattttattgatgtttcctcaatataacattgaaacaatgagtatcaacaacgcacttagtgttaggatacttagttgaaagattccttggaatatacatgcaaatgtcttcataatctattaataatgtggaaatttgcttatatattgttcgtatattcaattattttcagtaccaattactccgtgaagaaattgagaagttgaaggcagaggtaaaacacaattcatacttaaacttttttttgctttctctaaatgtaattacatatatatagagtcatcctgtatctcgttattaatacttcatataactgttccttgtcaa

SEQ ID NO: 132002 - DNA, 464 bp, Arabidopsis thaliana
  unsure (1)..(464): unsure at all n locations
aaattggtgaaaattattacttgtgtccaaagttactgcatttttagggtgtggttatatcatattcattgtaagagagttgctgaatcaccccaaaaggagttggattgaacaaatagtatatcaaggtcctacatttatttttctaaacatattatcacaagtgatttagacaagagagtttaacgaccctaaagaatatattatgagatcacaagttccttgcaagagaagattacatgacagatcctaagtgtccagagatctgatccaccaagaatctaattgagtgtgcaatgaaacacactgctaagcatctgctcgttgctgattcagtcatcactttaagagcaactgcgntttgaggttaaaacgagcatatctacgatgaaggatcacagaaactggggaaattcccngaccggcatagcaaataggaaaggtcttgacgtaactcggggttt

SEQ ID NO: 132003 - DNA, 599 bp, Arabidopsis thaliana
tgggccccccctgggtcgaggtatcgaaagcttgaatcgaattcgggccgcgtgcctcaagcttctcctagatttgagatttctaatggaaccggttctggtttggtggctacggttaaccgtcaacaaccggttagtgttagtgattttgatcagagatcgaggtatttggatttagctcttgcggctatggatgagcttgtgaagatggctcagacacgtgagccgctctgggttcgaagctcggattctggttttgaagtgctgaaccaggaagagtacgacacaagtttctctcggtgtgttggaccaaaacaagatgggtttgtctcagaagcttctaaagaagctgggactgttatcatcaatagcttagcgctcgttgaaaccttaatggactcggaaccggtgggcggaaatgtttcctagcatggtctcaagaacttcaaccacagcgattatctctagttggcatgggagggcgaaatggtgcacttcacctgatgcacgcagagcttcaactgctgtctccactcgggccggtaagacaagtgtcgttcttgcggttctgtaaaaagcacgcggaaggtgtctgggca

SEQ ID NO: 132004 - DNA, 463 bp, Arabidopsis thaliana
  unsure (1)..(463): unsure at all n locations
ggaatcatatagatctcttgaaactagatcatcggagctggaaatcgagnngacttctcttaaaggcaagatcgaaaacttagaagatgagcttcacgacgtgaaggaaaatcatcgagaagctgtagccaaatgccaagaactcgaggagcaattacaaaggaacaaccaaaactgcccgaattgttcagtaatcgaagatgatcctaaaagcaaacaggacaatgaactagcggctgctgcagagaagctagcagagtgtcaagagactatattacttctcggggagcaactcaaatccatgtgtcctcaaacagaaccacggttgcttcttcttccaaggccaaggacaacaagccctaaaccctgaagaagaggaatacgcaacttccacaaatcctcaagacagcaaattgagttcgccttcagacaaggatacaccatcgatgaatacaatgaaatt

SEQ ID NO: 132005 - DNA, 652 bp, Arabidopsis thaliana
  unsure (1)..(652): unsure at all n locations
cccncccctcgnganttgggaagtggccgaagataaaaaaanccaagtacccccgntgttggannccctctcatggacggggnttgggttcaaaanncnaacaacctccttcagctgtgaaaaaaatggctctagttgtaacctgggtggggatgcgaagacgccttgttcactttgcttaacttcatttggccccaacaanttttgagacatctcctcacgtcattaacgcagtgatggaacccattgaaggaatgcgagtcgcattaggagcagctgtaattctgaactattgcttgcagggtttgtttcatccggcgcgcaaggtnccgcgaagtgtactggaaganatacaattctttatacantggtgctcaggacacccttgttgctgcttacccggttcttgaagacgagcagaacaatgtgtatagccgaccggagttgtcgatgtttgtgtgaaagaaagattctggattcgatgtgattctattactctctagtcacctgtagttgttggtattgttggctttattgcaaaggtttgctttgtatgaaacacagaaacgtttcttttctttttctgataactaggaaacctatgttcactnttggttatttcttattggcctaatttcttaaggctnagaac

SEQ ID NO: 132006 - DNA, 419 bp, Arabidopsis thaliana
  unsure (1)..(419): unsure at all n locations
attcaatgtagatgcggctttcgaatgcattaccaaaaatgctttcaagaatgaacctgaagaagaaccgtcccttcccgataccattgatgttgccggaggtcagcaacaaagatcaacagggtgtgaatgctaatcaagcaaaagtttgttgcagatacattgttttgtttggcacactcccattttgtaacaatatatttataacttccagaaatgtattttcagattcattttgagttacagattgtaatgaattgggttcctttttcttttggactctatactgataccaaaatccaacttaatttcgtttcaaaaaaaaaaaaaaaaaacaaacccaaaaagcggccgctctagaggatccaagcttacgtacgcgtgcaggcgacgtcaagatcttctatagttgtacctan

SEQ ID NO: 132007 - DNA, 480 bp, Arabidopsis thaliana
  unsure (1)..(480): unsure at all n locations
ctctttaattatcttcgatttaagagattctttcgccgtcggcgaagatgctacagcatcagatcgtacaatctccggcgagattagggttaacaggtcctggctctccttccgtacaaaatccgacgcctactcgtcatggccatccaacctcttcttcatcttcccaatctcagcaccaacagatccaacaacagcctaatctacttccttcctccaccgtcgccgccgcttcctcagcctcagcttcggcggctgtttcatcctccgccttgctatcgctccttcctccattaccgcgagctcaagctcttctccagcagatggcggttttannatctaagctcttcgacggctntcccaatcggagctatctgggtctnagnttttccgtggntttttcccttngtncttttcntaaaattggtaccacctncggcggnggttnaaaacctagtcctttattcanggaggngatct

SEQ ID NO: 132008 - DNA, 287 bp, Arabidopsis thaliana
attaggtacaacttcatctttcgaggttgattagggtttttattcgaagctgttgtatagttctttaaattggtaatttatcttttattgtctccactttatggttatcttgacacattctcccatttacttgtcctaattttctttcatcgagcgtagggctttaatttgtccaagttgttattgaatttttaataagcaaagctcacatgtacgaaacactcaacgtgttacttcatgcacgttgccaaacagtacgatagaaaattgaaattcaccatccaaaa

SEQ ID NO: 132009 - DNA, 812 bp, Arabidopsis thaliana
  unsure (1)..(812): unsure at all n locations
tgcaggtaccggttcggaattcccgggtcgacccacgcgtccgggtcaagaagaggaggcttcacggctatacgaggaaattgtgaaaaaccacaatagcacagatgctctggttggtcttgtgactacacttgctcgtgtcaatgttgagaaagcagaaagttatgagaaacagcttaagcccctaccaggtttgaaggctgttgatgtggataaactagaaaatacctatggtgcaaaacccattgaaggcgctgctgcttcatcgagtcaggaagaagtgaagaaagaaaaggcgaagaggaagaggaagagaaagccaaagtatcccaaaggatttgatccggcaaacccaggtccacccccagaccctgaaaggtggcttcccagaagggaaaggtcaagttacaaacccaagaggaaggacaagcgagcagctcaaatccgtggctcgcagggtgcggtgaccaaggataaacaagaagcagctccttcaacttcaaagtcaaaccaagtggccagttctaaagggaatgcacctgcgccttcctctaaggcctcaaaaaagaagtctagaagatgaacgaaacaaccctttaagattgtttcatctgttctgagaaaacaaaaacaaagagtacttagccccaaaatttccattgttctttttctttttggattcatcaagttttagttgtcttgacccatttaagattttggttaattttttgtttcacagccaaaccccaaagggcgaaggctttagaggatccaagcttagnnnnnnnnnnnnnnnnnnnnnnnnnnnnnnn

SEQ ID NO: 132010 - DNA, 394 bp, Arabidopsis thaliana
acttcatgttaattccagaacgatctgaaaaatattccataaatcaattttatttaacaaatgcaaaagccattagtacgtaaaattaacctataaaaaaccagaggttatttattgtcttgatttttgatctgcgataacatctgctgagttttgagttatacaaaccactcaagtctcaacattgagattttttcaggtccatttggataaaacaatagttgaaacccataaagatagtgcgcgtcaaaagtaaattatacattgagactcaaactgtgaaaacgatcggatacaaattacatgtcaattattattacttaaagttcattttatagcaggtataccaaaaagttaagtccaaattcgcagttttagaggaattttttactac

SEQ ID NO: 132011 - DNA, 390 bp, Arabidopsis thaliana
gttaatggtgaaagggacaccttacgataatgtagatgacttaggtgatagggaggatgatgctggaccgttgatctctgagaatgtgattggagtcgttcatgatcatttcataacgtttcatctagacatggatattgatggaccgatgaataattctttggttaaggttcatctagagaagcagagagttccaacaggaaaatcgccaaggaagagttacttgaaggtcaagaagtatatagccaagactgagaaagatgctcagatcaagttgagcctatatgacccatatgaattccacattgtgaacccgaaccggaaatctcgggtaggaaacccggctggttacaggatcataccgggtggtaatgcagcgagtttgcttga

SEQ ID NO: 132012 - DNA, 823 bp, Arabidopsis thaliana
  unsure (1)..(823): unsure at all n locations
aacttatcgaaatttttttaaaaagtatctaaccaaatgcaatagaaaacaaaatatgtgacgacaaatataaaaagtgtttttattaaagataacattaaagaaaacaaaaaggtatttaaagctaactaaaacacgtcattaaaaggcatgtaaatattgggaaattggatggccgtgacataaaattcctnaccaaaggaaaaaccggacaccgaatcttgttctcccaccgatcaccaccggagatatggaatcgccgattactcaaccccaaatgtttagattgcagtttcttcgtcttcttcatagtcgacgatcaccccaagttccattaatagccgattcttcaaatcctatcgagaatcctctctttcaagctgatgttccttctaccacagcaatagagtcttgtccaaaagaaaacattggtaagttaaaagatatgcttaaagaagaaaacattcatttgcacactgaggattcagagcaagggaaattacctttgcttattttaagcttgaaagagagaagtgaagaaaaaaggccagcgattgtgtttatgcatggcacaaacacaaacaaagnattggttaaggccatggcttgaagcatatgcttcgcggggatatgtagccatcggtttagnctctcggtaccncggtgaaccggcttgtttcaaaacttcatatcgnggtgntcttatatcancttngggnaatnggacactttgnctttagctttgancctnatggggttgtcnaacngntgattctncccaggggtnttngcccaaagntgggnccggntncctgggggntgc

SEQ ID NO: 132013 - DNA, 842 bp, Arabidopsis thaliana
aaggcttatattcgtgatctaatctctccatctgaatacgaaaccgagtgccagaaactcattgttcacttcaagacattatctgcatctctcaaagatatggtcccaaacattgagagatttgcagagacgtacaagatggattgctcagctgcagtttatcgccttgtgacttctggtgttccagctactgtggagcatagagctgctgcttcggcttctacatcaagctctgcttctgtggttgctgagtgtgttcagaacttcatcacttccatgggttctttgaaactcaacatggttgctgttgatcaggtgtatccgttgttgtctgatctctcggcttctcttaacaaactaagtatattgccaccagatttcgaggggaagattaagatgaaggaatggcttttgaggctgtcaaagatgggagcttcagatgaactcactgtgcaccacgctcggcaacttcactttgatcttgagtcatcctataactcgttcatggctgctttgcctaatgctggtaattaaccgatgtgccactagagactgatgtgtgttcggtttattttgtttagtttggctttatgtagttataatgatggctttaggaacaaagatttttgtttcatgacaatttgctacatatattttggggatgaatggtcgtagaccaaacaagcttttccttttgttgtgtaaaagatgatgccaatccagaaattgtttttttcatgaagtgtaatgtatgaatctaactcttttgtgctgattattggctttatatcgttacatgggtggctttataaaaaaaaaaaaaaaaaaaaaaacggcacgag

SEQ ID NO: 132014 - DNA, 631 bp, Arabidopsis thaliana
  unsure (1)..(631): unsure at all n locations
taaaangggaagcttttcccngcnaaaaaagnttnagcccttcgncnaaaccgcgcccccggantaccctttattacaggnaaaccttaacccccttanncgttttccganggttnattcccaaaanccntaatccnctaccgccgaanaaacctnnaggttccggtggcaatttccttaaccctcancgcncgaaaaattataaataccttctttgccaantttgaaaanctaattcccanggatcatcaccagcaagcatcaatatctccttcatcatcaagtgaagacaacgatccttttgtctcgggcaagaagctgtccttgaatctcaagcatctcctcaagctcatcaatcagttcatcgtaagatttcaacagtgttaaatcaaccgcacgaccaaccgcaatgccttgcatttgcactttagttcgacttcttgatgtttgttgcttcttctgctcactcattgaggttggagtgatgggttcttgacacttggcagctccacaagtatccatcggttgcttgtcttgagggattggagcaggagaattgcttgtgagatcaaatccaaacaacctatagctacaattcgttggaggaggaggagtctcgggtttgaagctg

SEQ ID NO: 132015 - DNA, 403 bp, Arabidopsis thaliana
  unsure (1)..(403): unsure at all n locations
atcacttacaagatgagagtcccactaatagatttcttgagagtgcttaggactcattctttctcttaggggtgcttcagttgctgcagatgcgagcggggaagcaaaactttaataagtatgagactgatagtggtcacgcacatccgccaccaatttatggtgccccacccagctacacaacaccaccaccaccaatttacagtcctcccatatatccaccaccaatacaaaagcctccgacttatagtcctcccatatatccaccaccagtacaagtacctcccaccccaacttatagccctcccatatatccaccaccgggaccagggccccccacaccaacttacagtccttccatttatccaccaccaatacaaaagcctncgaccccaacttatag

SEQ ID NO: 132016 - DNA, 484 bp, Arabidopsis thaliana
  unsure (1)..(484): unsure at all n locations
agagaagcttgggaagcttagtgacattcagtgcacaccagaatctcagctcagggttatcgcagaggctgggctccagatcattgaatgcagacgggtactgaaatggacatatgcatatggatactatctacaagatcatgctaagaaaccattttttgagtatttgcaaggggaggctgagtcaggtttggagaggctccacaaatgcgtagagaaggatatagaggtgtttgaacttgctgagggccccttcagaggaattcaatcatttccggacaaaattaactggtttaaccagcataacaaaaaccttcttttgaaaatcttggtgaaagctcttggagaattggtccttcctgatgtgggttcacaagctggtagcagnaaancccggntaacnctnaacctttttgcaaggcaaaaggcggttggggaagggtaaaggaggtcccaaattgnggggtccncagnancccgnttg

SEQ ID NO: 132017 - DNA, 589 bp, Arabidopsis thaliana
  unsure (1)..(589): unsure at all n locations
tcattnatttggcttgcnaacccngtttggaaacccattggtttgcccggnaattttggaaaaaattttacatgaaggccatgattttaggctgcttccgtttggagctggaagacgggtttgtcccggtgcacaacttggtatcaatttggtaacttcgatgatgagtcatttgcttcaccattttgtttggacacctcctcaagggactaaaccggaggagattgacatgtctgaaaaccctggactcgttacttacatgcgtacccctgtgcaagcggttgcaacgcctcggttgccttcggatctgtacaaacgcgtgccttacgatatgtaaatgtcactctgatctaccttttgttgctgctgctcatgctcttgttgttgtttgtagacatgtttcttgtggtttatcatcgaaaaacttttgatgagatttgttgtatcaattctctcaaggagaagtaaagaagccatcttctttgtcaaaaaaaaaaaaaaaaaaaagnnnnnnnnnnnnnnnnnnnnnnnnnnnnnnnnnnnnnnnnnnnnnnnnnnnnnnnnnnnnnnnnnnnnnnnnnnnacaatc

SEQ ID NO: 132018 - DNA, 843 bp, Arabidopsis thaliana
  unsure (1)..(843): unsure at all n locations
aacgttgaaggntcagtatgatcttagtgaggatactatcattggncttctatgggatatnatcacggcagggatggacacgacagctataacagcgcaatgggccatggcggaggtgatcaagaatccttgagggcaacaaaaagtgcaagaagagttcgacagagtgggttggacttgaccggttcttaaccgaggcagatttctcccgcttaccttacttgcaatgcgtggtgaaagagtcattcaggctgcatcctccaacgcctctaatgctacctcaccgaagcaacgcagatgtcaagatcggaggctatgatatttcccaaaggttcaaacggtcatgtgaatgtgtgggctgcggctagagacccggctgtatggaaaaatccatttgagtttagaccagagagattcttggaagaagatgttgacatgaagggtcatgattttaggctgcttccgtttggagctggaagacgggtctgtcccggtgcacaacttggtatcaatttggtaacttcgatgatgagtcatttgcttcaccattttgtttggacacctcctcaagggactaaaccggagagattgacatgtctgaaaaccctggactcgttacttacatgcgtaaccctgtgcaaacagttgcaacgcctcnggtgccttccggatctgganaaacgcgtgccttacggatatggaaatggcacccnggatcnacnttttggttnctgctggcaaaacncttggtggtnggttgaanaatggtccttgngggtaacaccgaaaacttttgngnaatttgtgaacaaanccncaaggggaggnaaaaccanntntttg

SEQ ID NO: 132019 - DNA, 916 bp, Arabidopsis thaliana
  unsure (1)..(916): unsure at all n locations
ctgtctgactacaagaatgcattatccatcttagagagactggttgagcccgacagtcgacgcacagctgaattaaacttccgcatctgcatttgtcttgagactggatgtcagcctaaggaagcaataccatattgtcaaaaagctttgttaatatgcaaagctcggatggagaggctcagtaatgaaatcaaaggtgcatctggttcagcaacttcctcaaccgtctctgaaatagatgaaggcatccaacaatcatccaatgttccttacattgataaatctgcttcagacaaagaagttcagatcggagacctagctgggtctcgctgaagatctagaaaagaagcttgaggatttaagctaacaagcaaagaacccaaagcaggttcttgctgagtaatggggcatggaatcagctaagccaaatgccagtgacaaggttgttcctgctgctgctgaaatgagctcttctaggatgggaactgtgaacaccaatttcgggaaagatttagagtcgcctacagtctcaaccgctcataccggtgcagcaggaggaggagcagcatcaggtgttactcacttgggtgttgttggaagaggagtgaagagagttttgatgaatacaacctcgattgaatcaagtgcatcaaagaaaccagctctagagttttcagacaaagcagatggcaactcctcttgaaaccggaaaaaggtataaaaattcctgttactagtgaagtatctaacctaagaaaactgagaaaaacatttggtatcttcctcatgaatcttccaagactagattttcaggttcatgttaaaaaaaaaaaaaaaaagnnnnnnnnnnnnnnnnnnnnnnnnnnnnnnnnnnnnnnnnnnnnnnnnnnnnnnnnnnnnnnnnnnnnnnnnnnnn

SEQ ID NO: 132020 - DNA, 834 bp, Arabidopsis thaliana
  unsure (1)..(834): unsure at all n locations
cttgcttcagataaattctttgaggatcgtatacctcatatatgcaacatatgaaaattcgctgttcttaaaaaagatcattcgttcatggcgattggtggttcctgggatcccacagatggcatggacccatcagttgatcagtcttccttaattcagacaatgctgagacactcaaaggataagcttcatcttgatctgagtaactgccgtcactggaatccattcctagagatacattatgacagagttggtacagatggagtgtttagctacaaagagatcacagtactttttgtccccgatttatcagaatgtcttccttcatttgatgtttggagaacccaatggttggcacacaggaaggctcttactgaaagagatcgactactctctcaggaggttaagaaagatactgttgaagtaaccaaggatgcagagaaaaagtcaccaggagatacttccggcactccgacaactggaactaagaagactgttaaaaagatcattaaaagagttgttaagaggcctgtcaacgatggaaaagcaactggtatgaaaggtgagaagtcggatgttcctgaacatgttgccataccagagaccacagtcccaaaagaagagtccactggtacatcttctaacaaaaaaatagtgaaaaaggtagctgaaactggagatacctcagatcccagtgctaaggctaatgagcagactcctgcaaagacaattgtaaaaaaaaaaaaaaagnnnnnnnnnnnnnnnnnnnnnnnnnnnnnnnnnnnnnnnnnnnnnnnnnnnnnnnnnnnnnnnnnnnnnnnnnnnnnnataatc

SEQ ID NO: 132021 - DNA, 737 bp, Arabidopsis thaliana
aagagatgggaaacatgctcaatatcatttgattgaatagttgacccagctccttgttgtttgcagaaaccctccacttcaattggtattttttcacgaaaagcaaacatgagataacaaatccagtctttcactaagatttcgaatagctgtcccgcattcaagtggattatgtttcgcctcttactcggagaaacgacgagcaaacaattcccaatcatggcccttgcggatcggatcatccatataatatacaaaaagaaactccagatatttgatatctgtctcttgcaatgagatatcaattccagcgacggtttcattagatatcttacaacaaaaacccctcttttttccgatccagtttcttcaccaccgcgaactccagtttgattcaggcatgatacacttttgagttattgggagaacccaagtactctctttcggatcccggaaacagactctcagagatcttttttccttttgtaagatacaggagcgaaacaatcaacctattgatattgcaagacccaaaagattcttccgatgtatcatttctgggtccaatggaattcataggtataggaagaagccctttcaaatagagatttttgctttcgaccatatttcgattgttaatacgatatagaagggccgctactacaaatagtactacacccttgatcgtgaaatatcgattgcttgttgaaccctgtgaattgcgcaaaagtaggata

SEQ ID NO: 132022 - DNA, 605 bp, Arabidopsis thaliana
  unsure (1)..(605): unsure at all n locations
caaaataaaagcacacgaattttcaaatctttctcttctctcgctctctcgaattcttctctctgttcctcgtagatcccctctgtgtccgttttcgtcttttcgaattccgaagatctcaaatgggtgaggatgcaatctcaggtaatctcaagaatctaacgatcgacacaagagattcagaaactcttgtggtatgtttcggtgaaatgttgattgattttgttcctacggtgggaggtgtttcattggctgaagcaccagctttcaagaaagctcctggaggagctcctgctaatgtagctgttggtgtctctagacttggtggctcctctgctttcattggaaaggttggtgatgatgagtttggaagaatgttagctgatattctaaggctgaacaatgttgacaactctgggatgagattcgaccataatgcacggactgctttggcctttgtaacggtaagaggtgatggagaaagggagttttngtncttcaggatccgngtnctgaatncttctttggatctaagctttncaagacctcancaaaggccagntnttcacttcggtccttcattttattnggnnccttccgtttac

SEQ ID NO: 132023 - DNA, 778 bp, Arabidopsis thaliana
  unsure (1)..(778): unsure at all n locations
ggagtgggaatggctggtccttatggtagtcaagatccaaatgacccttttaatcaacctccatctccaccaggcttctggatatcatttctccgtgtgatgcaaggtgctgtgaatttctttggccgtgtagcgatgcttatagatcaaaacacacaggcctttcacatgttcatgtctgcccttcttcagctatttgatcgtggcggtatgttatatggagaattagcaagatttgtactgcgtatgcttggggtgagaacaaggcctagaaagatgcagcagccaccacaagggcctaatgggctacctttaccacaccagccacatggaaaccagaactacctcgagggggcctaaaactgctgcaccaggtggtggcggtggttgggacaatgtatggggcaactaagttacttctttcattacccaaatccttcaacattgctttaaaacaccatgacaaccagttggttaccgatagaagataaaccgtgtagcagcctgcaacacagattgggatgtacgaaaaccagatgtttgtttgcaaattgagtctcttcttctcttctctctatctctcagtattctctgattgtgtggtaaaggatagatgtcgtactctacaaaatggaaagtgaagttttaagtgtttgttaaagacctttctattgatatatatttataataaaaaaaaaaaaaaagcnnnnnnnnnnnnnnnnnnnnnnnnnnnnnnnnnnnnnnnnnnnnnnnnnnnnnnnnnnnnnnnnnnnnnnnn

SEQ ID NO: 132024 - DNA, 378 bp, Arabidopsis thaliana
agaaaccttaagaaactgttaaataaatccaaacaatttgttaacatatgcaatggatcattattgactgcttatctcaccattccacattcggctatatgcaaattatatactttaatgtctttatgaaaatagagttaaaatattcctttaagattcagcactaagcatatcctaagcacaaatccgactttattacatcatcgtattcataaatacaacacaatatattacaaatacactgatacacaacccaatactgtaacgtaaaagcccatgagaaagagaaacagtttaactatcaactgttgaattatccaaaaagtttaaactacatagagaaatctacctaaaattgtatatatactgattataaca

SEQ ID NO: 132025 - DNA, 639 bp, Arabidopsis thaliana
ccggtccggatttcccgggtcgacccacgcgtccgacaagatagcggatcacacctcgcaccggttgatccctatctcgtcggtcctaaattggcgtccttcatattggacaagaaggctggtcctctccataaagcttctaagtatctagcagtccatctcaggtttgaaattgatatggtggctcattctctctgttacttcggaggaggcgatgcggaaaaggcagagcttgatgcttaccgagaaatgcatttcccaacgttggcaaatctaacaaagacgaaaaaaatgccatctccagacgatctgaggacagaaggactttgtcctttatcacctgaagaagccgtgcttatgcttgcgggtctgggttttagtcggaagacacgtgttttcgtcgctggtgcgaatatatatggtgggaataaaccgttatcagatgtaacgagtctctacccaaatctagtcaccaaagagaatgtcctctcacaaactgagctatagcctgtcaagaacttctcatctcacgcagcggttcttgatttcattgcatgcgctgcttctgacgcctttgcgatgacggattcacggagccaattgtcggctctggtctcgggttataggatattataacgg

SEQ ID NO: 132026 - DNA, 535 bp, Arabidopsis thaliana
  unsure (1)..(535): unsure at all n locations
agttgatgatggtgatgatatctcttcacttctctactccgccgctagcttttctcaaatctgattccaattccagatttctcaagaaccctaatcctaattttatccaattcaccccaaaatcccaacttcttttcccccaacgtctcaatttcaacaccggaacaaatttaaaccggcgaactctgagttgctatgggattaaggattcaagtgagacaacgaagtctgcgccgtcattagactccggcgacggtggcggcggaggaggtgacggtggagatggtggtgatgatgataaaggtgaagtggaggaaaaaaacagactttttccggaatggttggattttacctcggatgatgcacagactgtgtttgtggctatagctgtatcgttggcgtttcgttatttnatcgcagaaccaagatatattcctcctttgnntatggatcctactttttaatgttggagacagnttaggttgcagagaaggtgagtttttatttcaaggnagncnttgtncaaatnanaatt

SEQ ID NO: 132027 - DNA, 707 bp, Arabidopsis thaliana
aaaaagccacattaagttcttactctgctgcattaactgatggctagatgcatggcttacaatcaaaatccacaaatgttggctctatgcataacagtagcagtaatgttccttggtgtgagatcagaattgagtcaggatataaagggatgtcaggatgcgatgtctgatctctactcttgtcttccttttgtcactaacaaagctaaagcaccagactcaacatgttgcagcacactcaaggtaaaaatagacaaagggcagaccaggaaatgtctatgtactctagtcaaagacagggatgatcctggtttggggttcaaagttgatgccaaccgtgcaatgagcctcccttccgcttgtcatgtccctgcaaacatctctcaatgcccagatcttctacatctgcttccagattcaccagcctctcaaatatttaagcaattcactgaatcttcttctcagactgttggacataaagcggtctccacaagctcaagcatcaaaggaagagacaacaagcaatttggtttaatgatggctggtgctctctcaatatggtatataatgtaaaatcctctgtgatctaaagttgatgaacacaataaccaaaatcattatacgagtcatatctactagctgaagcagatgtatcatggctattatctaaggacttattaagaaaaaaaaaaaaaaaagggcggccg

SEQ ID NO: 132028 - DNA, 709 bp, Arabidopsis thaliana
attccaaatggaagctatgctctcactgcaggccactgtgtacaatgcagctgtgttctcggaagccgaagtatgtattgtgagcctgcttctatatcagtctcttgttccagtatgagatgtagaaacagcaacttcatgcttggtaacattacttcgcagcagagtagctccgggggtaaacttactactggtagttacaacggttcccctagcggcactatcttgaccacgttgtccatgtctcttcaacctcgatgccctggaccgcaacaattagcaccgcttatagccccgcctgataatgttccaaaggaactgatgtatctaccttcaccttcaccttcgccatcaccagagtttgatgatattgctggtggaggatcatctatagccgcagtccccgcggcttcacctggaggagctacggtttcttcaagcaattcaatcccgggtaatccagctaatggtccaggcggaagtatttctatagcttcttgtccattgagctattactcattcattgcgttactcatccccattggttcttgcttttttgttttctaagtttgaatgcaagacaatctcatgaacactgctagtactttggtttgtcattgttaaatttgtattgaatgcctggccggttgacggtttaataacggtttaaaattgtccggttcacagtcaaaaaaaaaaaaaaacaggc

SEQ ID NO: 132029 - DNA, 624 bp, Arabidopsis thaliana
  unsure (1)..(624): unsure at all n locations
nnnnnnnnnctctatacgactacgatagggaaagctggtacgcctgcaggtaccggtccggaattcccgggtcgacccacgcgtccgtacggctggagaagacgacagaaggggaacgcgagatcttgattagagagagttcttgcaaaaagggtctctgtatttagttattaaattcttcaatcttgtttctgtaaatttcggatatttttgagaacaagcaaagatgtgtagtttggctacaaatctgttactaccatcgaagatgaaaccagtttttccagagaaactgagcactagctcactctgtgtcaccactagaagatctaagatgaagaaccgatctattgttcctgttgcaagattgtttggaccggcgatttttgaagcctccaaattgaaagtgttattcttaggagttgatgagaagaagcatccagcaaaacttccaagatcttacactcttactcacagtgacatacccgctaaattaactttagctatatctcaatccattaataactcctcaggtgcagatggggccaataatggtcccggacgaagtgtgggcgagtggacaaagcgaaggtaaatgcncttcatgtcattgcacttagcgaagca

SEQ ID NO: 132030 - DNA, 433 bp, Arabidopsis thaliana
ataccgggggggactcacgcatgcgcgcaacaaaaaagagagaaagaaaaagtaaaccgaaagcgaaagcaagcgggaggtttcgtgggtttctaagttacaagttttgattacgaacacgcaagaataacgcgagatcttgattagagagagttcttgcaaaaagggtctctgtattttgttattaaattcttcaatcttgtttctgtaaatttcggatatttttgagaacaagcaaagatgtgtagtttggctacaaatctgttactaccatcgaagatgaaaccagtttttccagagaaactgagcactagctcactctgtgccacccctagaaggatccaagatgaagaaccgatctgttgttccctgttgcaagattgtttggaccggcgatttttggaagcctccaaattgaaagtgttattcttag

SEQ ID NO: 132031 - DNA, 511 bp, Arabidopsis thaliana
  unsure (1)..(511): unsure at all n locations
nnnnnnnnnnnnnnnnnnnnnnnnnnnnnnnnnnnnnnnnnnnnnnnnnnnnnnnnnnnnnnnnnnccacgcgtccggtgactttagagtctccctcaagagcaatcaatggatcagaattcgtacaggagaagatcgtctccgatcagaaccaccaccggcgggtcaaagtccgttggttgctccgaactacttcaaatgaagtatctcagctccggtacgatgaagctcacgagaaccttcactacttgcttgatagtcttctctgtactagtagcattctcaatgatctttcaccaacacccatctgattcaaatcggattatgggtttcgccgaagctagagttctcgacgccggagttttcccaaatgttactaacatcaattctgataagcttctcggagggctacttgcttctggttttgatgaagattcttgccttagtaggtaccaatcagttcattaccgtaaaccttcaccttacaagccatcttcttatctcatctcta

SEQ ID NO: 132032 - DNA, 646 bp, Arabidopsis thaliana
  unsure (1)..(646): unsure at all n locations
cgtccggctgaggaaagcagcttttgagtgtgtgtttactctggtggacagctgccttgatcaagttaatccgtcttctttcattgttcctttcctcaaatccggactagaagatcattatgacctgaagatgctttgtcatcttatactctccttactagcagataaatgcccatcagccgtacttgcagtactggattctcttgtggaaccactgcataaaacaataagcttcaagccaaagcaagatgcagtgaagcaagagcatgaccgtaatgaagacatgatcagaagcgctcttcgtgctatatcgtcactggatcgtatcaatggggtggactatagccacaagtttaagggcttaatgggtgacatgaagaggtctgtaccattgtgggagaagtttcagacaatccggaatgagtaagtttttgtgtatgttgtcttcattaaacagtgatcgatgatgattttctattccaaaaaagggtacaggcgaaagaaaaagaaagactcgataacttaaatttctcaatcggcgaagaagaatttttttaaaaaaaacaatcttcattggaccaaaaaaaaaaaaaaaaaggggggcccgcccnnnnggnnccaacnttccggccccggggcgtcctaa

SEQ ID NO: 132033 - DNA, 392 bp, Arabidopsis thaliana
gaatctttttacagaaacacgaacaagtttcagaatctggtctgactctctgtagccttctcgtttaagagtcattgtacgtattcaaatctacatttctttgccattgttggaatctccgcctcgatcgtttcttatcaaaggatctggtattcgatttttgctatcgatcgtttcaaagcatggtctaatgatgatcctgatctccgactgatccaataacggttaagcaacgctgtttttgatcccccattgttgtttgccatcgatcaacactcagaaataagttggagttttgttcataaagaatggcgtttaatacggctatggcgtctacatctccagcggcggcaaatgacgttttaagagaacatattggcctccgtagatcg

SEQ ID NO: 132034 - DNA, 546 bp, Arabidopsis thaliana
  unsure (1)..(546): unsure at all n locations
nnnnnnnnnnnnnnnnnnnnnnnnnnnnnnnnnnnnnnnnnnnnnnnnnnnnnnnnnnnnnnnnnnnnnnnacgggaaaagaacaaaatcaaatctagcaaataaaatggatcggccgccgcagttgcaacgtactcatggtcatcaccaagcacaggagccaataaggattcaccatccagaggaagaagggcatcatgaaaaaggaccatcaaaagttctgaagaaagtgaaggaaaaagtctagaagatcaagaatgttcttactaaacatggacatggtcatgagcacgatcgtggagaacacatccctgacgatcacgatctagaccaagaagacgatgaagatgactacaacgacaaccaactccacggcggtgcaccagcacgaggaaaagctcatattccggtgaaggaggagatagtccctccaggatcgaaagcttttccagttagtttctcctcacatacaaaaccctctgagccagtgagaggagttggccacgaagcaatgtctcgtcctataaaacactcccggtgtaccgg

SEQ ID NO: 132035 - DNA, 724 bp, Arabidopsis thaliana
  unsure (1)..(724): unsure at all n locations
nnnnnnnnnnnnnnnnnnnnnnnnnnnnnnnnnnnnnnnnnnnnnnnnnnnnnnnnnnnnnnnnnnnnnnnnnnnnnnnnnnnnnnnnncggccgccagagattgagctctcaaggcagctcggtgcttgggctaaggtgctacatgggatggaaggttactgtgtgaagtctttggctgaagctctcgaagttattccttacacactagccgagaatgcagggttaaaccctatcgccattgtgactgaactcaggaacaagcatgctcaaggggaaatcaacgcagggatcaatgtgaggaaaggacagatcactaacatcttggaggaaaatgttgttcagcccctgcttgtgagtaccagtgcgatcactttagcaactgaatgcgttaggatgattctgaagattgatgacatcgtaactgtgaggtagtgtggtagtttctttcaaaacaggtcccagaacacttctattgctctatctaagcttttgtttcgtttttttcatgtgttgtgcttgcacaatggttttgaacttagactcccttttccttaaaagcatcaatgtttcttattattcgatgatgctatgacataaatgcttataaactattcacaaagtcgttgattcagtctatcacgagtttctaagtttttttacatgaaggcttactagagtcaggacctcgcttggcgtacaagggacccacccgctgatatatt

SEQ ID NO: 132036 - DNA, 567 bp, Arabidopsis thaliana
  unsure (1)..(567): unsure at all n locations
nnnnnnnnnnnnnnnnnnnnnnnnnnnnnnnnnnnnnnnnnnnnnnnnnnnnnnnnnnnnnnnnnnnntgccctttttgttttttttttgcttgaaagtactaacgaaataaaaaggcctataatcacacaaatcagactgtacaaaaaaagggaaaaaaacttaaaagcatcaatgtttcttcttattcgatgatgctatgacataaatgcttataaactattcacaaagtcgttggtgcgggctatcacgagtttctaagtttttttacatgaaggcttactagagtcaggacctcgcttggcgtacaaggaaccagccgctgatatattagaaggcagagagaccgtcgcagagagaggttggaaattagtgtttccaacgaaccagtagagagcccatttgaggttgcagagagtatactttagtgctttggtccaactctcttgcttggtgaagctctgtgttattgaataccccaatactttgtccttttcgatcttgtatggaaggttgaggcaattatctggtggaatattgttctcttggtcctttgaatttgcaaaa

SEQ ID NO: 132037 - DNA, 588 bp, Arabidopsis thaliana
ctttccttccctctctctctcttactctcccaagacaataatgccggacgttggatctgagcgtgtttggttcactctcactgaaaaagcaagacaccgccaccttctccggtaagctaccgtcaaccaaacaacgtttttcgtcggtatcagctgcttgtccttcctttagaatctactactacgacggagccgccggtgccgtccctttcgaatgggaatctcatccaggcacacccaaacacccctcctctgagctacctactctgccacctctcactcctccgccgtctcatttctctttctccggcgaccaaatccgccgccgttccaaaaagtccaccaagaaaatcctcgcactaatcccgacaaggctcttctggctatcgggcgatcacaatggtaaggctaagaaactgtcggcttcatcaccaccatctctgtcggagagagtgttgatcgacgaaaatgagtacgatctgttcaagtttcaaacagaaaggaatgtcatgcgaagattttcatccttcgactcttctgcttgactacccaattcagagatcacaatccacttcctgcttcggaatc

SEQ ID NO: 132038 - DNA, 533 bp, Arabidopsis thaliana
  unsure (1)..(533): unsure at all n locations
cgcttctgttgactcctacatgaacttgcagctaggaaacaccgaggaatacattgatgggcaattgacaggaaaccttggagagattttgatcagatgcaacaacgtcttgtatgttcgtggtgtgccagaagatgaagaactcgaagatgctgatcaagactaacatgtgctgatgacactgaattctcaagtttgtgtttttactttgaaagtaacaacaagccatttagttttatgccatactaaacaaaccttcctgttgttttttttaaccatcttcaatttacggcctgttataagccatgatatgttatgtgatcctcgagggatgttaccttcacgatcttcatattcttcttcgagttctggccttcatttgttcacttataatactctgtgatgtaatacttatatgttctaaaatcgaagtagtttccgcctgaaaaaaaaaaaaaaaaagnnnnnnnnnnnnnnnnnnnnnnnnnnnnnnnnnnnnnnnnnnnnnnnnnnnnnnnnnnnnnnnnnnnnnn

SEQ ID NO: 132039 - DNA, 379 bp, Arabidopsis thaliana
tgaaaatacatttagaaactgataatatcggttgaggtctattcgggttgtggctggttctcgaaggtaggtgagacctgatattgaacctgaatttaccgacaaattatgtatacgtattatttcgagttacatgtatccgtttgagtttcgatatttcacgtatctgttcaggtttcagatcctacacgaaccaaaccaaaatcccaaaataaacactttagatccactcgaaccaaagcgaactaggtttttcgggcttcggattttatggtcatgcctagttttgtcctttgaaacattaaaattagaagtaaatctacatatacatttttgcagtcattttagcaaataaattttgtacttgtatttacaatgt

SEQ ID NO: 132040 - DNA, 721 bp, Arabidopsis thaliana
  unsure (1)..(721): unsure at all n locations
gcgcccaccaaagtctgtacttntgtgtgttgttgttcttctagctaactaacaaataacgtggagctccgagaatttgtttcaaaagatatgttccgggcagtcattcgtggcttgggcatggagtccaatgccattaacagccctgatttagttaatatatgccgtgaaatatatatctatctctctgacagagacccagctcctcgccaggttttggtttcgctcccgtgtctcactcccaacgacttgcatgcttttgaagaagctacagccaaaactagcagccccaaagaacaaaagcagcttatgaggagcttgttgttgctaggtactgggaacaacttaaaagcacttgctgctcaaaaaagtcagaatgttatcaccaatgtcacagcaagaacgcggctacccgcaagcgctccagaaacaattggagcgggtgttttgtgggatgaagagttcgtacaatgattaaagaatcgtacatagtataaacagaatttatttgagatgccatgtaatagtagagaagcagatttctgtttatgtccttacctttacttgttaaattcataggtagaaagaaagaacctctaaccaaagcttccatgtcataagcaaagtttttgtgattaaaaaaaaaaaaaaagggcggccgctctagaggatccaagcttacgtacgcgtgcatgcgacgtcatagttcaactatagtgca

SEQ ID NO: 132041 - DNA, 400 bp, Arabidopsis thaliana
aggccgggggcgttccacgcgtccgatttcattgagcaaaagataaatttactaaaatagacggaaatgctgttgctctcacgatcctgtggatggatgttccctaagtccaagaatggatggatgtctaacaccatcatgttttgtaagaaattcttgaagcaaattcctcatctttaacgcttcctccatgtaattatcctgaataaaaatggcattataagaaacttaatatcaacttgaagtatcgaaataactagaaggctgagcaaaaagaacaagtgcatacctgattcatatcgattgtctgtaaaccttctccacgggaaaaaatgatagcatgattttggttttctggctttccttctccaagaatagcaggtccaggaagcctaatcct

SEQ ID NO: 132042 - DNA, 389 bp, Arabidopsis thaliana
cactaagaagaagcagagaaaatgagaaaccttagcttcatcgtcttatttctattgaccctcttcttcattcatcatttgggtgatgcttctttgctagtgaagtctcttcctggttttgaaggtcctcttccttttgagctcgagactggatatgtgagtattggtgaatctggagatgttgagctcttttactactttgtgaaatcagagaggaatccagaaaatgatcctctcatgatttggctcactggtggacctggctgcagctccatctgtggattgctcttcgcaaacggtcctttagcttttaaaggggatgagtataatgggacagtacctcctctagagttgacatctttttcatggacaaaggtggctaacatttt

SEQ ID NO: 132043 - DNA, 382 bp, Arabidopsis thaliana
gtaaataaaaaattagtgatgataaaataataaataaatatttaacccgtgttatatcaatccaaatgcgctccactatataacttgtctcatgatatttttattattatttgttttttgggcaaaatattttaattattttagaagtttaaatttggaaagatttaaatgattttaagttaattttaagttagtgtgtagtatattttagtttagatttgaaaagatttaaatgatttttgtgactatttttctttttgttttctaaattttaataacaaaattgatttatattcagatttgagaataaatttattaaaatattaaatgctaatagcattggattgtaaataagcctaatcttcaagatttatttcataaa

SEQ ID NO: 132044 - DNA, 771 bp, Arabidopsis thaliana
  unsure (1)..(771): unsure at all n locations
gccganaaaaccncaccgnncctnnaccttgaaaatggtngcctncttgagactgcccgagtttgcnaattgagggaatgnnccagnaaagtgactgnaaccttttcaaatcctaacccgttncaggtttggnaatggagctgagacacgngaaattactcaancttgctggataaaaaccgtgatttgcgattgtcagaacctttagcttcttcatttcagcaatgaagcttggcaatgcatagtctaatgaggagatattaagaactaaagcctcaacattggggcaatccatttccaaccatttcgatgagnacaaatcatccgtatagatagacaaaagtcgagcattaataggttgatttaaacactcgtccggaaagttgtcctctcgtatctccaaatttagtttctttctttgcatgattggttccaattcactttgaaaaatagccaactccctcagaatattatgttgagtgactaacaactcattgtaaaaaccgtcttcgcgcttatttgtcctggtagtaagtaaaacaaataagttcatgatcaaatggtagatggcaagaaggtgcaatgaaacaaatgttgtaaaaaacaacaccaacgtacccgagatgaacaagtttaagcagattctgggaagcaagctcattaaggtataacatgaacttgttagtactagaactacctctaccatataattccatccatatgtcaattataagcgaagcacgtatcttttggtcctgaagaaatgaaccc

SEQ ID NO: 132045 - DNA, 376 bp, Arabidopsis thaliana
gtggtggttctcaactattggaagcaaaagaaggattatgaagacaggttgaagattgagtaggcgggggcagatgaaaggaagaaaatgagggagttggaaagggagatggagggaattgaggaagaggatgaggaggttgaggaaggtacgggtgagaaaaatccttacttacagatggcgatgcagttcatgaagtcaggtgcacgtgtgagacgagcatcaaataagaggttacctgagtatcttgagagaggtgtggatgtcaaatttacagatgttgctggacttgggaagattcgtcttgaacttgaggaaatcgttaagttttttactcatggagagatgtaccgcaggagaggggtcaagattccag

SEQ ID NO: 132046 - DNA, 301 bp, Arabidopsis thaliana
tagaactttaaatccattctctcttagaaaaagaaaaaaacaagtggcggatcatcaacttcgtgtgcgtcaacaacaaccaataatgaggagtctccatgaatcatcaccatcgactcggcagatagtgagattcgtaacggcagctacgatcggcctatcactcctcgtgctctcaggactaacactaaccggaacggcgatcggtttgatcgtagcgacgccgctgatggttctgttcagccccgtgttggtacccgcagttataacaatagggcttttgacgatggcattcctattc

SEQ ID NO: 132047 - DNA, 367 bp, Arabidopsis thaliana
gccaactaaatttgccatacttatatgcataaactttgttagatggtgtctactgcacagactggtgtccttcaatatcagaactataataatttacacggcttggacgataccaagaacgtttttccattttatttcaaacagtgggaaagcaaaatataatggaattcagacaaaataagattttggctacataggtgatagatgtcacgggttctacaaatatatatgcttgaacggtacaatgaaaaaacgtctatatgattttcatatttctgtctctcaaatgttcgcgaggtggccgtattgaactttgctcatagtcatactcatatgcatcaaatacgaattattttcccttagctat

SEQ ID NO: 132048 - DNA, 392 bp, Arabidopsis thaliana
ggggcgacccacgccttccgggaaaccggctttaaaccctttattcaacctaagaaagaggtttcaaggaggcttcccaaggctcttcccgtcgatcctgcatccaagtttccttcaccgttacctacttttactcgaggtgatggttttgcgaaaggaaccattgacttaggaggtggtctcgaagttagtcaagtttcgacattcaacaaagtttggtccacttatgaaggaggaccagacaatctcggagctacattctttgaaccatcctcaatcccttccggtttctccatccttggctactacgctcaaccaaacaaccgtaatcttttcggttgggtactcacagctagagatctctcaagcaacaccttaaaaccaccagtaga

SEQ ID NO: 132049 - DNA, 603 bp, Arabidopsis thaliana
  unsure (1)..(603): unsure at all n locations
caagtaatccaaacccccccctttggattttgggcctaggnttnaaaancnagagnagaggttaaanattccattaaaggctgttccaaanatagaagctacttggttggttagttttnagggaaactgtcatcatncccgtagtaggnccagtagaggaaggagaagtaattgatgaagataaaccacaagaacttgaaagctttccactcgaatccaaccatagagtagatgatnagagaatagtacgtggtctgaatcaagacataaggtagttcacaagtcacctgggagatagcataaggtatagctgagtacatcccagcagctttttctctgtagaacactgttctttccactgccaccattggttgtactgttgagcagttgtttatacccacgaatacaactgctgcgtagattgctccgatcaccatcgttagatcttgtacgtttgatctcttacctccgatttgccagaagacagagccgatcatgagagatgttgccaatgtgaagatgaacctgacaaggttgtagtcaggagatctccaataagtccaccactgcttccatagacatgatttgaattgtccccatgtg

SEQ ID NO: 132050 - DNA, 322 bp, Arabidopsis thaliana
gaaggcgcgagcctcgccacgcgattcacaaagggtctcattgtctcataggtagacttcgaataagcatgtatggtctacactacactttcacgtccatgagtccaaaaagccataactttagtcttcttctgaaatagttgcttcctaataatttaaaaaatattggatgcattggctgcacgtgacttcaaaatatttgtatgtatattttgaaaagagatatagaacaaaacttggacaaaactacatactaaaaaaaaacaaatattaaacaaaaaaacaaaaaaaaaaaattgttggttatccctatcacttttgt

SEQ ID NO: 132051 - DNA, 383 bp, Arabidopsis thaliana
catttatatctttgtctcagtcctgctttgttggttgagaatggaaagtttcttctttctgcaaaacgcatgggaagaactacatacaccgagtacgtgatctctatgcacgccgacaccatttcgagatcaagcaatacctacattggcaaaatcaggtctaattttctggggacgaagtttataatatacgatacacaaccagcatacaacagcaacatcgctcgagcggtccaaccggtaggtcttagccgcagattctactcaaagagagtctctcccaaagtacctagtgggagctacaaaattgcgcaggtttcttatgagctaaacgttcttggtacccgtggtccgaggagaatgcattgtgcgatgaactcaat

SEQ ID NO: 132052 - DNA, 396 bp, Arabidopsis thaliana
cttaagggcaatatcttcaatagagttctgaactttggaagcatattgggatatcaaagtgattttctacttttagttgtgaagctagtctctcctctgtccccaaaacaagaaacaatttgcaaagagaaagcaaaaggtttttgaagaagacccaattaaaaaagatggaaattgcaagtcaagaagatcatgatatgcccatcccattaaacactacatttggtggtggtggtagtcatggtcacatgatccatcatcatgatcatcatgctgctaattctgctcctccaactcacaacaacaacaatactactcaaccacctccaatgccgttacatggtaatggtcatggcaacaattatgatcatcatcatcatcaagatcctcatcatg

SEQ ID NO: 132053 - DNA, 368 bp, Arabidopsis thaliana
cttcattatcatcatcaatggatgagataaaaccaaagaaagaagagaattccaaacgacgtcgtgacgtcaaacccatttgccgtgaaactggagaccacgtccattatcttccaacatgcaaaaccaagcccaaacccacgcgtactcatcacgcgccaccaccgatcctcgactcaatcttcaaagtcactcacaagccacactactacgaatgcaggaagaatcacgccgctgatatcggaaccaccgcttacgacggctgcggcgagtttgttagctccaccggtgaagaagattctttaaactgcgccgcatgttggctgtcaccgtaaacttccaccgtgaagagttaatcccggagaacg

SEQ ID NO: 132054 - DNA, 468 bp, Arabidopsis thaliana
  unsure (1)..(468): unsure at all n locations
ctttcgctctacattggctctgtgttttttgaattatctattgatttccattagggttttctcacttctttgatcgattgaattatatatgttccgtcaatccatggcgtttcctccaccgatccatggttccgatgcaccgccgccgccacagccgccgtcggtggtgaacgggattgaaacctctagacggcagcagcaacagattgcagcagcttcttcttcgccggtgaaatctcatccgcttcataacttccctttgtctgatctcagatgggctatgaatcacgccaatacacaccggctccgcaaagcatcgagtagatcttccgcttcgtgaagctaatactcgggaaaggaaatctggtgattgaggaggtgacgagcttcaggtcttcggtttaatttagaccngnaagagaaggaacgggnttgtgtagggttcnccgantagancngncgnnaact

SEQ ID NO: 132055 - DNA, 725 bp, Arabidopsis thaliana
  unsure (1)..(725): unsure at all n locations
ccacgcgttcgacaaattccattatccattttctttgtcactaaaatacaccttactttgtgttttatccaattcatggcagaaactagatgcacaatgctaaagtctagaaatgttttggggtgtattccgaaataattaatagttaggtggttcttttgaaatttcttaatgattattgtataatgctgtcaagatgacgtggagacccatgggatgacgaagttttcactggcacgatccattcttcatcgattcaaactcttggattgatttcagagatcaaaagataacactttctcagatcttaaaattgtttgaattcctgctcttaaaggtttttgattgtgcaattttttccgtaacaatggcttccttggagatgaatgacctaaaaaagatagggctaggtttgactggatttggtgtgttctttacattcctgggagtgatatttgtgtttgacaagggactcatagccatggggaacatcctcttcttagctggtgtgactctaaccattggaatcaacccagcaatccaattctttactaaacggcaggattttaagggnnctatatcatttggnttggggttcttnttgggtgtgtttggatggncnnttttcgggtgtgcttcttgaatcanatngggnncccttntnntctcaagngggttttggccacaantnccggccttcctcaaagngaccccctttaggnngg

SEQ ID NO: 132056 - DNA, 386 bp, Arabidopsis thaliana
agactcgctgccagtttcctccgttgtttacatctcattcgggaccggtgcttacttaaaacaagaacggatagacgagatcgcttacggtgtgttaaacgccgacgttacgttcttgtgggtgattagacaacaagagttaggtttcaacaaagagaaacatgttttgccggaagaagttaaagggaaagggaagatcgttgaatggtgttcacaagagaaagtattatctcatccttcagtggcatgtttcgtgactcactgtggttggaactcaacgatggaagctgtgtcttccggagtcccgacggtttgttttcctcaatggggagatcaagtcacggacgccgtttacatgatcgatgtttggaagacgggagtgaggc

SEQ ID NO: 132057 - DNA, 280 bp, Arabidopsis thaliana
gtccgggccggacccacgcgtcggcacacgcgtattggattaatcttttcggggccaatttctttctgttgtgtgtccgtttctgaataatgctcttactaaaaaaagagaagatcatttttgatgtatccttctctggatttgtatgtatgatcactatctcacttacataagcttctcttgatatgatttcaaatatattgttcttactatttcttttcataattattttgtctgccgtcataccgcttatctcatgctaattttagaacattcaaaa

SEQ ID NO: 132058 - DNA, 1272 bp, Arabidopsis thaliana
  unsure (1)..(1272): unsure at all n locations
nnnnnnnnnnnnnnnnnnnnnnnnnnnnnnnnnnnnnnnnnnnnnnnnnnnnnnnnnnnnnnnnnnnnnnnnnnnnnnnnnnnncgccccccctcgagtgcgacggtatcgataagcttgatatcgaatacgccataaacaccaactcataacaaaaaacaaagaaccagaagtctaggcacaaaatgcccacaaccatcatacataaaccaagaagcttcaaatgcaactacaaagagagtttgcttatttaggcttttaattatacatacaaaccaccaagtcaccatattgttcactgaaggacaaggcactcggcggccgtcccatttgtgatcggacctccatgggttctgttgcttttctggttaacattgccactagagttttgctgatgaactatggttccttcaagatcctcctcttggttactacaacctatggcttcaaaggcgagagcagtaacctccttaaacctttcctccgacagagaagcttccgcaaggagcctccacgcgttatcctctgaagcaccttcgtaatcctctttcctcttcagtaccatgtgaccacttatctcccacacggctgggttcacttgtgtttccaatacctccgggttaatttaacctagagcctgtttctccgcgtaacactgtggcatttaagaagatctgccttcccaacaatccagcaggatgaagaatgtttgaaaggaatgtttgttgtttttgaaggcaaacaccagcagtcctgaaacaggtatcagatagtccttgcatagaccttccaccttcaaaagagaagacctctcacagggtaactctagaagctctgagattttgacaccactaacagtggtagttatcttcttggtaggagctttctccagtgggaaaggcatggccaagggatatgcctgaaagtggagatgattgatagtggcaaaagcacccaagctgttgtaaccgagtctgaagtatggattagcagcctcagcagccatgtgaactgcaagcaaaaggcttttgtgatcgatcctttgaggcaagcagtcaagaacacgaggaatcagcagcacatggccatactctatcggactaacctgttaaaaacaacaataaagaattaatcttttgctagcgaaaccaataaaaggaagaaaaaaaaaaccaagctctctgcacaagagtctttacattgatggcaacaacactgggagaattctcagggtcaataggcatgcaagggaagaactgaacttgggcattt

SEQ ID NO: 132059 - DNA, 377 bp, Arabidopsis thaliana
ttataacatatgtatgtatacaaccttttataaatcataaatcaacttaaaccacaatgataagtacaacaaatttatccaaagatatgatactcatataatataaacattgtatatgcatttgttgagatatgatatatcatatatgtatatgtcatatttgatattcataaaaaaaaaaagtatagtatgataatcacaatcaatatactttgtgccctcattgaaagctaaatgttaagatcatcaagctttgatgatcttgattacaaccatgttttattattgttaagcaaaagacccaaaattttaatatcaagttttcaccaccgtcacaaagcgatcctttatggtaaacttctatttaactctaaaaa

SEQ ID NO: 132060 - DNA, 381 bp, Arabidopsis thaliana
cggaagacaattatgatgatgtgttgccgccgttgccggtgccatagtggtagtagttatacaagatgcgttaaaactcgggcatctaccaaatcctaccattgggaagaaactgaaaggtggtgaaaatggtgttgtaaatcgaaaggcgttaaatcgagagaagataattactctgcaagaagatgttgaaaagttgaggaagaagctgagacttggagaaaacattcaccgagcacatgggaagggcatttagtagacctcttggagcacttccccgccttcctccgcgtctacctccatcgggtttggagtgactcgcggaagtggctgttttggaagaggaaatggttcgcttagaagaacatatagtgcattgta

SEQ ID NO: 132061 - DNA, 455 bp, Arabidopsis thaliana
aaaaatatataattcatttcaccaatgcaccatcagaagttgaaaacataacaaaagaaaaaatcaatacattcgactatggaacttttactcccacacgcttcaaactcatgtcctctcactgttcttggcttcttagaacgagccgcctctgtcttcggcgactctccttcactcctccacacaaccactgttcatacttggtctgaaactcattctcgatgtctccgtatagcttcaactctctcttccgcttccctcggaatcaaccgcggccaagttgtctctgttattggtccaaacgtcccatctgtctacgagcttcagttcgcagttccgatgtcaggcgcagtcctcaacaacatcaacccacgtttagacgctcatgcactctccgtccttctacgtcacagcgaatccaagctcgtgtttgttgactatcactcaagctcttt

SEQ ID NO: 132062 - DNA, 379 bp, Arabidopsis thaliana
gggcaaaacatagcttatgatgtgatcatatgatcccaaaatattcatgaaccgtgtcgcgagattcatgtgctatgttgattaaaaggactactttcgttctttcatctattatccatcaatgcattgattttttttccaaaaaaatttatctaccagactttcattaacaacataccaaggaaaacctcgttgaaattaataacctatttcactaatatgtcaaaatgcttgaaatgatatatatttattttattatattggcttcacttgttacaacttgctaccatatcagttgatgtgtattagtttcattgttgtttatcacatcatattttgttttattgttgtatttgctagccatgaagttaaatcagaa

SEQ ID NO: 132063 - DNA, 407 bp, Arabidopsis thaliana
gcccgcaggaactgggccgggatccacgcgtccgaaaagaaaagctttctctgggtttttcttgattggccaattacacatcgccctttctctcttctctcgctcaccttcgcttgctttgcttgcttcatctctttggtctccttcttgcgttttctatttactacacagaccaaacaatagagagagactttaagctatagaaaaaaagagagagattctctcaaatatgggttagtccacaattttcactaaacctcttcttcttaggattgtttttagggttagggttttgaggtgaggagagcaagtatgcgggagtttcatcctttttgagttactctggattcctcaccctctaacgacgaccaccgtcgccgccgccgccgtctcgacgaatatgctct

SEQ ID NO: 132064 - DNA, 386 bp, Arabidopsis thaliana
ctgctaatgttgatctgagtgatgacgataatgtttaaaatcgcaaaagctacgttgcggagcagaaactcaagcgtcgcgttcgctcttctactctatccaagctcgctctatctccaggcaaagtaaagtggttaagattgagagaatggttgagaaagaagacatgcatgtaactcgtgttctattctgcggtcctcacttccctgattcctacaatttcaccagagaatacttgcaaccttacccttttattaaggttgatgttgtccattaccgcggtgtccctgaggttattaagaactttcatatatggggggcaatggctatgcaaaatgggttcaaatgttatatctcgtgcaagcaacataaagcttattatgcag

SEQ ID NO: 132065 - DNA, 746 bp, Arabidopsis thaliana
agggttttcaatctcgggttcactttttgaaaaaacaaatgggggctggtgaaacgaaaaactcgaatttacttccaaatcttgggctaatgagatagttacaaaaattgaggctgcggcagcacctatggggtttgatgtcaagacaaataactacaagatgaagctgacaggagagaaatcaggccgcaagggtcagttggcagttgccactgaggtttttcaagttgctccatctctttacatggttgaaatgcgaaaatcagggggtgacacattggaatcccacaagttttcacaacgacccttcccacgggacttaaggacattgtttggaaaacccatcgacgaagcagaaagaggaaggaaccgatggtggtggtactaatggtgccatggctaaccggacaattgcaaaacagtcgacataagctgtttacttttttctaatatagattttgttcgttataaattactatagtagtacggagtggttttgaagttaatacaaaaggaagcgtcaagaagtggagcagaagcagtttgaaactatattggggaatggggattattgatattttaatcatgtttgattccatggaatgttgtgaatagcatatgcgtgttgcgaggttcttggcttgaataaaattaaccggagcggccgcgaattcgatatcaagcttatcgataccgtcgaccgggaggggtggcccgaaacccgattcgccttatacgaatggtcc

SEQ ID NO: 132066 - DNA, 514 bp, Arabidopsis thaliana
  unsure (1)..(514): unsure at all n locations
aaatttatcaccccgtgcttctgatcacggtgggattctctccgatcggtggcatatcgtggttcatactccggtggatctcacggcgtaataatttatcatatctgaatcgcaatcttattaaccatggctcctccggccgcttcacagcgttatccgtcaccgtcccaaccttcagggaaaagcgaagtgtcagatctgaaaacccagcttcgccagctagctggaagcagagctccaggagttgatgattccaaacgtgacctctacaagaaagtaatatcgtacatgactattggcattgacgtctcatctgtatttggagagatggtcatgtgctcggcaacatcagacattgtcctgaagaagatgtgtatctttacgttggaaactatgcaaagggcatcctgatctttctcttttgncgataatttctgcaaaggggttgcaagatganggccnatgatccgtgggttgnttgagggctgtggtccttacgngngcaaccntnttc

SEQ ID NO: 132067 - DNA, 1215 bp, Arabidopsis thaliana
  unsure (1)..(1215): unsure at all n locations
aggatttccataatatgaagattaggctgaggcccagcatctggagtgtgccaagcgtcttgttgtagataaaagcatccagactgcatacatccagacaatcagatctgctcagcatttcatatatatcgagaatcagtatttcctgggttcttcttatgctaggcctacctatagagacgcaggagctgacagtcccattcctatcgagttggcactaaagacngnnagaaaaaacagagctaaggaaagatccaccgcatatttccccagtcgacccacgcgtccgggcgacccaaagtctggccctgtgcaagaaattctatattggcagagccaaactatgcagatgatgtatgatgttatagcaaaagaactgaaagcggtgcaatcagatgctcatcctctcgattaccttaacttttactgccttggtaaacgagagcagcttccagatgatatgccagccaccaatggcagtgtggtatcagattcttataatttccagcgtttcatgatttacgtgcacgcaaaagggatgatagtagatgatgagtatgtactcatgggatctgctaatatcaaccaaagatctatggcaggcaccaaagatactgaaatcgccatgggcgcataccaacctaatcatacatgggctcacaagggaagacacccacgtggccaggtgtatggatacagaatgtcactatgggcagagcatttaggcaaaactggagatgagtttgtggagccatcagatctggaatgtctgaagaaggtgaaccacaatctctgaagaaaactggaaaagattcatagacccgaaattctcagagctacaaggtcacttaataaagtatcctcttacaagtagacgttgatggtaaagtaagccctcttcctgattacgagaccttcccagatgttggtggtaagatcattggagctcattccatggctcttcctgacactttaaccacgtaatgtgaatgttcaatgtaaatttcagcatttgttttggggtttcttttgatcctgaataatattagctgaaagtgttgtttgagttgttgtacatttaactgtgttgtttcttttttatacattcttttgtgattgtcgtcaaaaaaaaaaaaaaaaagggcggccgctctagaggatccaagcttacgtacgcgtgcatgcgacgtcaagaatcttctatagtgcgtccca

SEQ ID NO: 132068 - DNA, 835 bp, Arabidopsis thaliana
  unsure (1)..(835): unsure at all n locations
aattacttaaagattacgacgaatggattaaaaaacagcaacggaactccttaaacgcaacttgttaatctattaccaatgttttgtcaaacggccgaggcaggatttgttgggtcgttttggccgtttgagattacagcgtgtattagagatagctctgaattactgcaaaaagtacaaacaattaaatgaacaaaatagatttgattcacttgtatactttggccttttgagacgtttgtgtttgctttgtattaaaagtgcaatgaaattactgaaaaagtacaaacataaataaggtcaagagagatttgattcactcgtaaactttagtctttcttgtgacaaaaatacagcacaataagattacataactttttcgtcatcagtcaaaagtctctaatcctaaaggccaacccagtacgaacggccattggtgttatgcatcggagatggagtaggtgaagacaccgaccattcataccaaacctttgaggaaccacaacacctccaaaagtgtacttctaatggagtatcagggtgaacctccacaggcttcctcaatgggaaaaagattgggaaccagctgaacatgtttggtgttgctgttgtaggctcgatcccaagatgaacatctttataaaggacggaatcaaaatagccagcgaatccatgcaccaaagctgagccagcatcgcttggtagactgaactgaagcttcttatagcgttggttgttgactttcgttgagaagtttggatgagtaaatgtgaaaacagactgggaaggagcaagctntgctacactatgcagcttgacacataagcagtttcaa

SEQ ID NO: 132069 - DNA, 534 bp, Arabidopsis thaliana
  unsure (1)..(534): unsure at all n locations
gatcgaagaacgataattgaaacacacaaatttgcttgaatcaaagactcttcttcttcgttcgttcgtttcagtgattccaaagattccaaatttgtcggtgtaatcttcgttgtattcagaggtgtatgtatatgtattgaaatcgagaatggatctgttccgagtttggtcagggatggatttcttagcttggagaggaatggcttacacacttcttcttctcaacttcgtctttgcttgccaacttcttcttctccaacctctcgtttccgctctagatggtcaatcggtagatgctgctgagttattcgagagagcttcacaaagtatcaagggttaaagcgttatagtgatgccctcgatgatctgaatgcagccattgaagcaggccctgcggtttcagaaggttatttaaagcgtgccctgtgcttcgcaatttttcaaggacggggcctcttagatagtaccaggaatactggatcaaatcaggggtcgatcctggnaagcctttnaagttacaaggaangggct

SEQ ID NO: 132070 - DNA, 451 bp, Arabidopsis thaliana
caactagtttaagtgttgaattgcatagagaagaaaggttttgagtagcaaaagagtaaaactagatctttaggagaaggtaaaagaagcaattgatggcgacgacagtgggaagaaacatagcagcaccattgctgttcttgaatcttgttatgtacctgattgtgcttggtttcgcaagttggtgtctcaataaatacatcaacggccaaactaaccacccaagttttggaggcaatggagcaacaccgctcttcttgacgttttcgatattggcggctgtggtaggagtagcgtcgaagttggccggagcaaatcatattaggttttggaggaatgatagtttagccgctgctggagcttcttccatcgttgcatgggctatcacagctcttggcatggggttggcatgcaaacaaataaacataggaggatggagaggatggagact

SEQ ID NO: 132071 - DNA, 829 bp, Arabidopsis thaliana
aaaggagacccgatggtggttccacgaggataaagtataaacctcgatcaaccaagaaaaatgtaaaatagtccaaaacagtctttgagctttgttgtcttttttttgagttaattgggtttaagctgtcccaaacccatttccaaaatccgtgatgtataaaaacaacacaataaatttgactaattttgaatcttctactctaattttaaaacccctactaacaaaagacccaacctaatctctctgatgcttctctattaggtcatatatatacatcaggaagaatatttctcaactactactttcctcttggttttgtcctgtgtcaccatgaagccgctgacgaagaagacgacgacggaggaaacaaagacaaagatgggttttgaaagattctctgaccagtagcgagtatgtgtcgcggatcaaactcagcctttaagcttctgaaccgatcccacttgtccccaaaatgagccacccactcttcctgtgttgcgtggtgaggaagatactgcttcacattgatcttggcttggtcacagaactccaagatccgacggttatgatctttcagattctctagcttctgtgtctgtataccggacgttaaagctgatctcaatacagccaccatatataaaacttccttatactgcgtcacggctgagctactctcgtcccatctgacaataacattaaattactacacgtgaacaacgacaatatctatattaatgtaatacatcaatgatgtgcggagggttactagagatcagattggtctacgagaatctgattgggacccacccaccatgagttctat

SEQ ID NO: 132072 - DNA, 551 bp, Arabidopsis thaliana
  unsure (1)..(551): unsure at all n locations
taggtccactatagaagagctatgacgtcgcatcgcacgcgtacgtaagctcggaattcggctcgaggcggggccaaatggagatttctgaggccatggacatcagaacaagacaagggttgcttaatgccctagcgggaaaagttggcaaaagaatggacagcctcctggtgcctttagaattgctatgttgcgtgtctcgtaccgagttctctgacaagaaagcatacttacgctggcagaaaaggcagttaaacatgttagcagaggggctcattaacaatccagttgttggatttggagaatcaggtcgtaaggcaactgacctgaagagtcttctgctaaggattgaagaatcagagtctcttccatcctcagctggagaagtgcaaagagcagaatgtttaaaatctcttagagaagttgctatctcacttgctgagagaccggctcgtggtgatttgacgggtgaagtctgccattgngctgatggctatcatttgaatgtcagactatatgaaaaattgcttctctgtgtctttgacatattg

SEQ ID NO: 132073 - DNA, 405 bp, Arabidopsis thaliana
gttccggggtggacccacccttccggaaaaatggaggagtcacgagaatcgccggcggaacacggctactacatgccggcggaatgggattctcatgctcaaacttggatcggttggcctgaacggcaagataactggcggcacaacgctttacccgcacaacgagtgtttgcagatgttgcaaaggccatctcaaagttcgagcctgtcactgtctgtgctagccctgctcagtgggaaaatgcaaggaaacagcttccagaggatataagagttgttgagatgagcatgaatgattcttggttccgcgactctggaccaactttcattgtacggaaaagacccgtaaaagctccagtttcttctcttaaccgaaacattgctgggatcgactggaatttcaat

SEQ ID NO: 132074 - DNA, 372 bp, Arabidopsis thaliana
caaatgcataaaaaagaaagaaaggatctcccatttgttgagctccatgctgtccggaggattcctctcgattttattagcccaaacctcttgtcagcttgttgacagcactgccccattcgattccattatttttagtacttttgggtttcatttgcaagaattgtcattttgaggagttcaaaaatgatgattttagtgttaacgtgtgatgacattttttgctaatccactagcacaaatgaatcatatcagcccatcgatataggatggaatagttttttttttcttttgtaaaatctaccaaaccccgaaataatgttagcaaagacaagcacccttaacatatccaatattctggtatagactcat

SEQ ID NO: 132075 - DNA, 392 bp, Arabidopsis thaliana
  unsure (1)..(392): unsure at all n locations
tcgctagaggcttaccattaacaactcccccattctnagacagaaccattctcaatgctcgaaaccctccaaagatcgagaatctccaccaagaatttgaagagatcgaagataaatccaacatcaactctctttacaccaaagagccaactctctacagatccttctgctttgatccagagaaaatcaagaaacttaagctccaagcaacagagaacagtgagtctctcctcggtaactcatgcacaagttttgaggctttatctgcttttgtctggagagcaagaaccaagtcgttgaagatgttgagtgatcagaaaacgaagcttctcttcgccgttgatggtagagccaagttcgagcctcaactgccaaaaaggtacttcggaaat

SEQ ID NO: 132076 - DNA, 534 bp, Arabidopsis thaliana
  unsure (1)..(534): unsure at all n locations
nnnnnnnnnnnnnnnnnnnnnnnnnncaaaaagctatttatttttcatttgatcataatctcaaagcggcgaaggttttcttttgatcattatgatcatgacataaaacgtaacataaatcacatattctctcttacaagttacaatccttgttttcccctatctcgtgtgtctgacaagttaacgaaacaaaacccaaaaatctttcaaaaatactcataattagattacgtactaaatcatctttttaatcattgaatttcttctctaccgcgatggcggaggaggaactccgctgagaaacgccgagaaaaaggcgagagagctgcttggtttgaagcaaggcaccgcatgtccagctcctctgaacgtagcaaacgttaaaccttcgtattcttgaagccacccacttacctgtttttcatggtaccatggcctccaagctgtcttgatgggtaattcgagtgcgtttaagctataacgagtcgcaagtactggaactcttccgtctgggtcaccactgtaaacccatat

SEQ ID NO: 132077 - DNA, 932 bp, Arabidopsis thaliana
  unsure (1)..(932): unsure at all n locations
tataacgggtattacggggtgataaatagtcgggaggtntgatgacccccaacgggggttcccggaaaattaaatttctttcccctttttttaaacccaagaaagggttttgtaaaaaatttctttttcagaaaaggggttttgcccatattttgaaaggaggagagaaaggtctcacatacatatgtggggaaattgaccagagagggtttttttatgaaggtcgagtttttttttttgaaaaaaataggtggggagaatcggcattattttgtttgttttagggaggattgtttttaggggaaaaagggccggattctgtgggggcgtaaagagtttaaaaaaaagcggggttcttcaaccttngttgcttccacggcgtgcttcgcaaaacgaaaggacctatttccttcccggattattacccggtccctttgtcaggcgggcggggaaagaatttataaatttcggaggagaattgttgaatgcccgttaaccctttaggggaagagacaggagggagagcattgttttttagtaaaaacatatttaaaggagaaggtgggggttttgtgcggagggtccgtgcaccagggaaatttgggtgggttttgaagggttaaaaatttatgaaaaaggatgcattttttgttttttacagttttttacacacaaaggtggcccttttgtgtggtgatgcaaaggtggtatgcaggtttgggttaaagcgggggtggtggactcggtgcttaggaaatcgcttgagtcggattttctggatgcaacggtatagtttggttacagctctgtgaatattagaatgttctaaaagatcaaagcaagccttggattatgagagggctctgttctttttaantattaaaaaaanattttttnnggggcggccgctctagaggatccaagcttaggta

SEQ ID NO: 132078 - DNA, 849 bp, Arabidopsis thaliana
  unsure (1)..(849): unsure at all n locations
gtggaatgtacgatacattcaccagaacagtatgnatgatacgcagctctatcgactcatataggaaagctggacgcngcaggtacggtccgaattcccgggtcgacccacgcgtccgactattttcctttttaacaaaagcttctcaaatctttcaaaggtttccaatttacgaagaaaggatctacaacatataatcactattaaagaatgagttatctgaacaaagtgtggatggcagcatcgttcgtagctgttcaaggaaacgccgatcacggcgtcaagttaaaaagcggtctcacctctgctcaccgtctccaacgaagactttcctccgatctccgtcctctcgccgccgcagatctaaccggcgactctctcccttcggaagaaagacgtcgtacctcttcttccactcccgatgagtctctccgacaagtcatgtacctcaactgctgggctcaaggctaaattcagataatgatggtcgtggctcgctcatgaactccgctgaatcagaatttttttctgatgcaaactgtatatagtttggttcatctgtggtggttgactcgtgcttatgaaatcgcttgagtcggattttctggatgcaactgtatagtttggttacatctctgtgaatattagaatgttctaaaagatcaaagcaagccttggattatgagagaactctgttcattttctatatcttaaaaaaaaaaaaaaaaggggcggccgctctagaggatccaagcttacgtacgcgtgcatgcgacgtaatagctggtngatagtgtcactcgttnnnnnnnnnnnnnnnnnnnnnnnnnnnnnnnnnnnnnnnnnnnn

SEQ ID NO: 132079 - DNA, 751 bp, Arabidopsis thaliana
  unsure (1)..(751): unsure at all n locations
ggaccactatagaagagtctatgacgtcgcatgcacgcgtacgtaagctcggaattcggctcgagtttttaacaaaagcttctcaaatctttcaaaggtttccaatttacgaagaaaggatctacaacatataatcactattaaagaatgagttatctgaacaaagtgtggatggcagcatcgttcgtagctgttcaaggaaacgccgatcacggcgtcaagttaaaaagcggtctcacctctgctcaccgtctccaacgaagactttcctccgatctccgtcctctcgccgccgcagatctaaccggcgactctctcccttcggaagaaagacgtcgtacctcttcttccactcccgatgagtctctccgacaagtcatgtacctcaactgctgggctcaaggctaaattcagataatgatggtcgtggctcgctcatgaactccgctgaatcagaatttttttctgatgcaaactgtatatagtttggtcatctgtggtggttgaancgtggttatgaaatcggtttgagtcggattttctggatgcaactgnaaagttnggtaaatcncgggganattagaatggtccaaaaggtcaaaggggggcggnatcctgnancccgggggggccacaagtcaaaangggccaaccggggggnncccaactttggccccctaaggnggggaattccggcttgggaaanagggaaagggtccnggnaatnatccgccaatccnnaaaaaggggg

SEQ ID NO: 132080 - DNA, 607 bp, Arabidopsis thaliana
  unsure (1)..(607): unsure at all n locations
agttggagagtggattttgaattgaatagtggaagttataccacaatggtatttttggatacaaagggtagcgatttcattcaagaccgattgtgatcagaggagattaattaatacaatacaaaatgaccaaaacgaaccaaaaagcacagcaaataactaagacaacccagtacaggacgataaagacctctaatggcggctcttgatctctctctctctttctctctatataattccttgtctacttacctctagttaagtgcagtcttcttcttccgcattctacaacctcaagctttgcaggtttgtagtagactttgttagggctctacaaaagtactcccttatccctggggattggtcctctgcaccagctcggttctgncaaggcattgaaccccagtttatcgaaatgccccagggtgaacatgatacaagcttgccccagnggnatcnctnggatngtccggaaaggccgaaanggccccaaacttccaacgaaannccgngaaatgggattccagggnggtaagccccaagagaatgaccgggcctaaaggcttganccatgganngnagccggggaaaccccctaaccaaccnt

SEQ ID NO: 132081 - DNA, 675 bp, Arabidopsis thaliana
acgaaccaaaaagcacagcaaataactaagacaacccagtacaggacgataaagacctctaatggcggctcttgatctctctctctctttctctctatataattccttgtctacttacctctagttaagtgcagtcttcttcttccgcattctacaaccccaaagctttgcaggtttgtaagtaagacctttgttagggctctacaaaagtactctcttatcccggtattgttctctgcaccagctcgttctgccaaggcattgaactcagtttatcgaaatgctccaggatgaacatgatacaagctttgcctcagcgacatcgcatggaatgcttctgatagctcgtacatgtctcctatactttccaacgtaatatcctgagcaattgtgtattcacagagtcgtttcaggccctccaagagatactgatccgctgctcttagaagatcttttgatatctcatttgttatgtcgacagatccagtgtatataaacctcatcattaactcaaacacctcccatttgatatttggaatctcaatatctctagcgtctttttctctgtaaccaccatcaaacattgcacgaaatgcatctgaggatgccagcagacaaattctgtgtgcatagaatgtccttccttcgactagaaaggttacatcagacggacgc

SEQ ID NO: 132082 - DNA, 367 bp, Arabidopsis thaliana
ccacgcgtccggaattatggagcaggaccctgtactctcttccaacaataaatccataatggacgagtttcgtggaagttttgaagtcaaggagaatccaaagttgaagaaggcttctaagagattgttgcgggataaaccatcgggttcagatgatgaagacaatcgcatgattacttatgacgccaaagagaacaaaattgatatagtcggagatgcaaacccaattcaagattttgaagccatgatatcccgcagagataaaactgactggaccgagaaagcaatcacacaaatgaaaaacctaataatgaagcttgtagaaaattgtaccgacgagggtgacaaagcattggaatgtgtactc

SEQ ID NO: 132083 - DNA, 826 bp, Arabidopsis thaliana
  unsure (1)..(826): unsure at all n locations
cgatagagaaaacgtacggagtaaaaaatggagacttatgtttatgcgattggagaggacacggcagccacaacaacgacggcggagacggctgcaaataagaacaagaagaagttgaaagtgatggttgcgattgatgagagcaagaacagcttcgatgcgttggaatgggctgtggatcatctcagagttgttattagtgccgaaccggaaaccggtcaagaaggcggtttacttacgttgcttcatgttcacccaacgtaccttcaatatatctatccttctggtggaactgcttcggcggtgtatgcgacagattcagtgcccgaaccaatgaggaaagcacgagaagagagtacgacaaacttattcacacgggcattggagatatgccgaggcaaaatggtgaagacagagactatgatattggaaggagatcctaaggagatgatatgccaagccgtcgagcaaacacatgttgatcttcttgttgttggtagccgtggactcggcatgatcaaaagggcatttttagggagtgtaagtgactactgtgcccaacatgcaaaatgtccaattctcattgtgcgaccgcctagagaaacctcaactagtaacacgaaggaacacaagagcaagtgaggaaggaaaccatgttataatagcttctgtttcattccgtttgtactccgtagagaagaaaaaaaagtgtgcagccaataaacaagtttacttttgcaaaaaaaaaaaaaaaagnnnnnnnnnnnnnnnnnnnnnnnnnnnnnnnnnnnnnnnnnnnnnnnnnnnnnnnnnnnnnnnnnnnnnn

SEQ ID NO: 132084 - DNA, 352 bp, Arabidopsis thaliana
taaaaaatggagacttacgttgatgcgattggagaggacacggcagccacaacaacgacggcggagacggctgcaaataagaacaagaagaagttgaaagtgatggttgcgattgatgagagcaagaacagcttcgatgcgttggaatgggctgtggatcatctcagagttgttattagtgccgaaccggaaaccggtcaagaaggcggtttacttacgttgcttcatgttcacccaacgtaccttcaatatatctatccttctggtggaactgattcagtgcccgaaccaatgaggaaagcacgagaagagagttcgacaaacttattcacacgggcattggagatatgcc

SEQ ID NO: 132085 - DNA, 556 bp, Arabidopsis thaliana
  unsure (1)..(556): unsure at all n locations
tggggggagaatctaatgggtttccacgatgaggccccatacccccattgatgaagagtttcgttttaagaaataatcaaggcggtgcttctactcctgttccaagaagaagaaggagatttggacgtcctagatcaagcggaaatcatccccgataagctgaagcgtcccggtaaaaattcgatataaatcattgggtttttggttgtagaaaaacctttgcgattactgaacctggttttgtctttaggtgatatcgatatctctcgggtcagaaccaggccgatgcaaagggaaaggttttgctaaaaaccccccaggcttaggattgtttggttttatgtaaatgtcattttgacccttggctcattgtatactactaagtatggcttcttatgcaatgtcttttgttacttaactcgtggattatttgcttttgcgttgtgatgaagtttgttatttaggaaaaaaccaaaacacaaagggaggccgctctagaggatccaagcttacgtacgcggcgatgcgacgtcntagctcttgtagatggtcacct

SEQ ID NO: 132086 - DNA, 508 bp, Arabidopsis thaliana
  unsure (1)..(508): unsure at all n locations
agggtctcccctangggtgtgtgacaaaccccccagcccaggcatggggcatcancggcgtcaccttcagatagcccctnccttggggggggatcctatggggtctaccaggtgagcgccattaccacgatgcatgaagagttccctttgcagcaatgattgcaggccggtgcttcttactccctgttcccaagaaggaaagaaggagatttgggacgtcctagatccaagcggaaatcatcccgcgataagctgaagcgtcccggtgatatcgatatctctcgggtcagaaccaggccgatgcaaagggaaaggttttactaaaaacccgagagccttaggattgtttggttttatgtaaatgtcattttgagccttggctcattgtatactactaagtatggcttcttatgcaatgtcttttgttacttaactcgtggattattttcttttgcgttgtgatgaagtttgttatttaggaaatcgaccacgtataaatattttatct

SEQ ID NO: 132087 - DNA, 367 bp, Arabidopsis thaliana
ctctgatcaaccctcctcctccgccgctgctacaaacactttaatatatgttgccaccgtccttccatatatatatagtccacttaagatctttccactcatttataacccaaatttgttctgtttcataaatatgtgtcttccatttcgacccgtctcgaaaacatattattcgtcttcttcttcgactatcgtgacgcgtatggtaaactgcatactactttttgtattcattttgttggtctacctcctcatctcggcctcaagacttcaatctaaaaactctattcatgcatacttctcatcttctgatcaagatcaatctcagagcccgacaaaaatcgagcacatcgtctttgggataggc

SEQ ID NO: 132088 - DNA, 602 bp, Arabidopsis thaliana
  unsure (1)..(602): unsure at all n locations
taaaaccnnaaagccttcttaggnannnanaaagctttaagcagccnccttnaaggggtannaaaaggtcccccaacccaagccctaggtttccttaatggnaccnctaacctcagaagcccattcccccccattncctttgccctaacaccaacaggcttcttcctaggaacagcaggagaagctgacacagctatcttgccatcagttttagtactgtcctgagaagaactctcagaaggctgttcagaaacttccatagaaggaaagttaatctcacgaacgatacgtttcattttccttggcttaggaaccttaagctcttcctcatcactagaggaatcatcagtagcataaggatcattcacaataatacggactttcctcaaaggttgggtttcttgaggaagggacgatagagtgtttctcttagctctcttcttaatctcgctactaacaccactcaaagactgttcctttctaatcgcaaccattgttaaacccactcctcaaaaattccccgaaaacagaaagaacaaaaaatcactctaaaaagtcaaaacttttttggtatcaaaacctaaaactctcaaccgactatg

SEQ ID NO: 132089 - DNA, 436 bp, Arabidopsis thaliana
  unsure (1)..(436): unsure at all n locations
ggtataacaagttttcgaggattgtaaacgaagaacttgactccaagtgcggtgcagttcttgatggtttacttagtaacggtaggcttaccttgggacagtttattgaaagagatagagattcaggaaatacgataggttctgaagcaatcagagattctcttcagaaattggttgctgcccgttttgttgagcgcattccttctcccgaacctgttcttggaaacaaagaaaaagagccggcaaagagaagaggcgctaaagctgccaagattcttaaagaaccagaaaccttggaggaacaagttgttgaagcagcaactcccagtttgacgcaataaggtttccccactttatattcccaaacaaaaattccccaattcntccttttagccgaatgaccatagccccctctctgganggggaagccnttnac

SEQ ID NO: 132090 - DNA, 755 bp, Arabidopsis thaliana
  unsure (1)..(755): unsure at all n locations
actatagaagagttatggcgtctactgcacgcgtacgtaagctcggaattcggctcgagttgctagcttgggggccatctggactagcagtggtcgacggtttatccaatctattgaagtgtcgtctaccagcaacaatacggtgcctttcacacccaagtgcacacgtacgtgccttaagcacgtcagtactacgtgatatcatgaaccaaagctccatacccatcaaagtaactccaaaactgccaacaacagagaagaacggaatgaatagtccgtcctatcgattcttcaacgccgcctcaatagactggaaagccgatatccaaaactgtttaaactgggaagctcacagcttgctctccacaactatgcctactcagtttctcgacactgcggctcgggaactcggctgtactatatccttgtcccaataacgagcacccacttttgtttttggtaaattttagttctctagacaaaacatttggacgtagaccaagaagaatatatatatagtttgttgtatgtaatgttgtaatgatgagtgactgacgcaatcactcccaccgagcgttggatttgctctcgctcggtgtcttatataactcaacctcttctctgtacattttaaatgacgaagtagctcaatcttttttttaaaaaaaaaaaaaaaaagnnnnnnnnnnnnnnnnnnnnnnnnnnnnnnnnnnnnnnnnnnnnnnnnnnnnnnnnnnnnnnnngtctgctcaatc

SEQ ID NO: 132091 - DNA, 380 bp, Arabidopsis thaliana
aaaaaaactcaaattctctgatctgatctaaaagcttccaacaaatggcggagactgcgaatacagatctagaacgaatcgatggagttcgtatgacatggaacgtctggcctcattccaaagctgaagctagcaaatgcgtgatcccactcgccgcttgcatttctccgatccggcgacatgccgatatccctactcttccttacgcaccgctccgatgccggacttgttccgctgcgttaaacgcttacgcacaagtcgatttcaccgcaaagctttggatctgtccgttttgttatcagcgtaatcatttcccgcctcattatcatgtgatctctgagactaatcttcctggtgagctttatcctcagtacactact

SEQ ID NO: 132092 - DNA, 364 bp, Arabidopsis thaliana
attggaccaaaattgagaatcgctctgaaaccaaacatggagaagccggcgtcatcggaaacttccgggatttcctccgtcgtgcatcccaatgacggcgttcatcccaatgacggcgttcaacgccaggatcacgccgtccttcccgaagttctcgagcatcctggagctgagcagatagcagatatgtctgaggaagaagtaaagcgcacattagaagctgtagcatctactgggaagttctggcaggactgggagatactaaagggaacgctatcgtactggttgaagaaggttctatcggaatattctgacgcaaaaatgacggatgagcaacaaaaggaagctcttggagaaccatatt

SEQ ID NO: 132093 - DNA, 536 bp, Arabidopsis thaliana
  unsure (1)..(536): unsure at all n locations
ggcaaagaatttgcttcagtatatgttcaactctcttgcaaaaacaaggtgtcgattatgggagaaggatgtggagataaaagaaatgaaagatcagttcaaagaaattgttggtcttctgaggcagagtgagttgagaaggaaagaagcagaaaaggaattaaaattgagggagcaagcaattgcaacttcattaggtacgccgccgagttcagtgaaacatgtagactgaagacttgagcacaccttctccaatgaccgtgccagcacagaaacagctcaaatttacgccagggattgctaacggaaaagtgagaggaccggctgcatttcttgatacaaacaagaagatggtaccgatgggacaagtatcgatgaggaaactatcagccgtaggaaaaacagggtgggagacttttggaggttggaagggaagtcaatcacccagtgggtttgttcaatttcaaaatcggaattggcaaaagccatgggggccctctgtgtggaggattaggggcaattgacgggaacacntc

SEQ ID NO: 132094 - DNA, 768 bp, Arabidopsis thaliana
  unsure (1)..(768): unsure at all n locations
tttcccagtgagaaatggcgacgaaggaaccagaatctgtttacgagttaagcatcgaggatgcggaagggaacaactttgcgcgcagtcaatacaaagacaaagttcttttaattgtcaatgttgcttccaaatgtgggatgacaaactcaaactacactgaattgaatgagctttacaacaggtataaagataaaggtctggagattctagcatttccttgtaaccagtttggtgacgaggaaccgggaactaatgaccaaattactgactttgtttgtactcgcttcaaatctgaattccccattttcaacaagattgaagtaaacggagagaatgcttctcctctgtataagttcctgaagaaaggcaaatggggaatcttcggcgatgacattcaatggaactttgctaagtttcttgttgacaaaaacggtcaagctgtacaacgttattatccaactacttcccctcttacacttgagcatgacataaagaatcttctgaatatctcctgaatgatgaagctttgttgctgaatcgtattgtatttgattatgaacctctctcattcaataaagagccatgacattgacttggattgattagttctgtttgagagccaaatcggttatttagataaaccagcacttattatctcaaaaaaaaaaaaaaaaaagggcggccgctgattagtgagtnnnnnnnnnnnnnnnnnnnnnnnnnnnnnnnnnnnnnnnnnnnnnnnnnnnnnnnnnnnnnnnnnnn

SEQ ID NO: 132095 - DNA, 670 bp, Arabidopsis thaliana
atggacttatattgaatttgaatgtgtaattcaaggaatgggagggggtcatctcatttttggatctgcaacgaatgaattcaagagataagagaattaaggatacccaccaagaagactaatccaatccataaagatgtaccagaaaatacaacatttttgttactcgaccaaccatcaggagacgcaaatacaacgggtccactaatcagtaagattaatgaagtaataattaatgcaaaaactgccaattggaaagcaatagtcatgtttttaatcctccaagctattaacaaaagaatatacaccatttaatcctcttacccactaaaaatttttaataaataaagggattttatcatgaatccgttgattcgagatgacttagttccaatttctttttaccacttttagtctattcggacatgaagttaaaggttcttttttacttcacaaacgggtatactggatcgcgtatctcatttatttatatagccagatttatagacctattaaagaaagtcacaccctatatctttctctacatagtgatcgtattaactcatagggctatgttctatttggcgaaaaaaaaaataaaaactcgagccgaattccgagcttacgtacgcgtgcgttcgacctcataagtcttctagagttgtaccta

SEQ ID NO: 132096 - DNA, 376 bp, Arabidopsis thaliana
cggacgcgtgggcaaaatacatgcttcgttattatgaaactgttttgagggtaggagaaagatacgagcgatgttttctcactagcattctcaccagctcatgttgcaagctttgtctatgttgggagcttatagatcgctcctccattagcttcgaaatggttgaatcagcctgcaccagatttaaactctttagcacagttacatatagcacggaagttatggattttaaaatttgataagcagacctgttttaacttggattcaagagcatccactttcagcttcatctcctcaatgtctttaaccaacttaagttcatccaatcctctgacattctggccatctgttttctgcagctggacaacatctctct

SEQ ID NO: 132097 - DNA, 859 bp, Arabidopsis thaliana
aaaattttgtaacggcccaaaaggttttttcccgtgaaaaaattttttgtcgcaacttaaaaaaggttttaaaccaatttgggcaagggcccctagatttgggttgcgaagccaaggccaagaaaggtccaaaatccaggccttaaaccggtcattgggtccaccaatgtgggacgcttattgcgggcaaagctcagtacgttaaattgggaaaacgcctccggcttaaatctcacttcgaatgagattttcttcaccaaccccaccctcagaaaattctcccaatcccatgtccgggtgattattccatccatctcagcgaaaactcattgcttatttacccatcagggacaaattgtactttcaacgtgttgcattgcagacagtgctgaatagagtgaacaccttcacaaacataacttacaagaacgaccccacaatcttcgcctgggaacttatgaatgagcctcgttgcccctctgatccttccggcgacaaactccagtcttggatacaagaaatggcggtgtttgtgaagagcttagacgctaaacacttggtggagatcggacttgaaggcttctatggtccctctgcccctgcgagaaccagattcaaccccaacccctacgctgcacaagtcggaactgacttcatcagaaataatcaggttcttggcattgattttgcctcggttcacgtctatccagattcctggtatgttttttaatgcaaaataccaagaaacagagactgccctgaatctgaaaacagagaacagctgaaaaatgcagtaaataatttgtgaactgtaggatcggacgcgtgggtcgacccgggaattccggtccggtactgc

SEQ ID NO: 132098 - DNA, 137 bp, Arabidopsis thaliana
gcctgagctaatgactcgtcttctccagcactatggaaacagccacgtgcctttgcgtcttgtatcagattcctccacacagacttgctattcatcaaagttgcctcatttccaagtatccataagcagaacctatg

SEQ ID NO: 132099 - DNA, 800 bp, Arabidopsis thaliana
  unsure (1)..(800): unsure at all n locations
gtaatttgaaaaccccacagaagattgcgattatggacatcttattctgtttcatagaatttgcttggtcctacaattcatattctaaccttagaacacgtatgaatcacattcccacagagaggccacctctaaaccttctccggcaagagctggaaggaacccccccatattttggacgtcttgcaaaagacaacttttgggcttgcggatgatgcatctaactcggaagatagactagaaggtgcagcagaagaaaaattggtatcgttttgtgaacaggttttgaaagaaacatctgatctccagtcccctttgggggagactactaacatggatgttcatcgggtactggagctacgttctcccgtgattgtgaaggttttggaaggcatgtgcttcatgaccaccacaatattcaggaagcccatgagagagttctaccctctgctcccgaggctcgtttgctgtgaacagatggagataagaggtgccctagccaaccttttcaaagcccaattgaagccccttttgccacagtaaatgatctatacgctatgatattgtggcaaagcaaaaccctcccaattgtcatttacttccccccagtttttttttttttttttttctacaattggattgatttttctccctgattaaagaggcccctccccgttttnnnnnnnnnnnnnnnnnnnnnnnnnnnnnnnnnnnnnnnnnnnnnnnnnnnnnnnnnnnnnnnnnnnnnnnnnnnnnnnnnnnnnnnnnnnnnnnnnnnnnnnnnnnnnnnnnnnnnnnnn

SEQ ID NO: 132100 - DNA, 465 bp, Arabidopsis thaliana
  unsure (1)..(465): unsure at all n locations
aaaggatcccttgatgggttcggcccacttctcacaggatttgtcgttggagccaacatccttgcaggaggtgccttttctggcgcctccatgaaccccgcccggtcttttggtcccgctttggtctctggaaactggactgaccattgggtatattgggttggaccgttgatcggtggtggactcgccggtttcatctacgagaatgtcctcattgaccgtccacatgtcccagtcgctgacgacgagcaaccattgttgaattaaatgtgtttgaaactgtgctatgcacgtcacataccctattagctaatcattaatgtattattgatccccaaaaatcgtttcaataatgtattattgatcccaaaaattgtttctttctgtcctataagatgtatctcttttaagttgcacccttaatctattaattccaattattaaaggaanaactttctgttaacc

SEQ ID NO: 132101 - DNA, 703 bp, Arabidopsis thaliana
tgttagtgaaagatcttagtgcaattcaaatttcagtctcttttatgggaccataatactctgatttgaaaatcaaacttcatcacctcctttcctcaatttcaggggttaattctagtgtttttttcattcacatgaatttggtttagcttctttcgtttataccaaagaaatctagtcaaatgttacatacaatatatattacaaatgaacataaacgacaaaccatcatcactccaagcactagacaaaaaagagtaagagaataggctagagactaattaaacatccaaatctaaccccaaacaattcaattctaaaagctaactcaaaatactagattaacttatcggaccaagtagtcaacgccaagaggaaacggtgaggagaggcacattgttccaagccaaggagatgaaacctggctccgattcaacaagtgaatacaatgtactataattgtagttccatagtagcagcttcgcttggctaaccgcgtaattactcggtttaaccggctcaaatccagctttctccatcaacactctccattgttctttctcctccattaacccaaaccgggttcccggtttattattatcatcatctgatcggaccaaatccataatcctcctaccgaacagcactctctccactctcagcctttctttcgaatctcgatccaaattcggttcaagcgatt

SEQ ID NO: 132102 - DNA, 932 bp, Arabidopsis thaliana
  unsure (1)..(932): unsure at all n locations
antaaaaacnttnaggccccccttccggaanttggccggnttnnnccnanccggggnaaaacagggnccacaaaganagnggtttccccgattacctttggaantttctttaatcctggacctnctataatcagaaaacaagcncccattacccttatgcctcaatatccccactaaaccggtcaaaacctgtaaaagattcaaatngaaaaacacagagatcatgtacaatcatgggatgtggtaaatagagctttatgtaacagttttctaaccgcattggccaagtttcttcgaacatcttcaggtaccaactcaagaaccggaggaagnacaaagcttatgttcatctctagttgacctctgagccttgtgtgctttcctcttcggtcagggtacaatgctcctttgacttccaaactnaaatcagctggttccattactcggtcaagcccttgaagctcccatttcgtcatgttgagctcaagaactttggttatgtgtagaggtacgtctgatgggtaatcctgaccgttggatttgcatctaatccgcatgaccaccactggacacgcagtgaggaagaaaaattttattggtaacatttggattctccattcttcctcattaagcctatagtttttgggtttatccggaaacattgcttcgaaaacccttgatttgtcttccaaatattcatcaaacaaggcctgaggagactcgtggagagcgatatcggttgatattttagaggaatacttggcggattttacaggtgacaagtgacacttcactctccaccgttttgatctaacctgcccacaacttccgatccccttctgtcgtcttctcgcagcggacgcgtgggtcgacacgggaattccggaccggtacctgcaggcgtaccagctttccctatatgagtcgtatta

SEQ ID NO: 132103 - DNA, 375 bp, Arabidopsis thaliana
gaaaaaaagaacgaacgctagtctattaaatactagaaacacaaaaaaagggcggtctacataagcttcgccgtgaaccatttctatcagctgtagcaaataactaaacttcatccatcgaaatatgaagtgaagactagatatgcctaaatactttcttttctatggataaaaaaagatttaattgatagaggaagcaccgtaaagatcaattggaaaggttttggaccgacacaacaagagctgtttatttatatcataatatgagataaatcttaggaatctacttatgtaatagagtaatccccgaaggtattgagcaccggtgtagcatcacatcctaaagacagtaagtctttttcttttttatgaagt

SEQ ID NO: 132104 - DNA, 379 bp, Arabidopsis thaliana
tgtcctcccaaaatggtgacatgtcattaagtgggagggacatggggggtatgcatgggttttagtgtgaagatatgggtgcaaaacgaacatctaatgttgcttcaatgttctccaaaatggtgcagagcaatcatcaatcctttggtcgctctcttccttcaaacaacgttccaaaggatagcttacgtcacgaggaacaaatggctggaagtggggagggcgatgcacccaaggtgactgttaagagagttgagaatggtgcttttgatcctcaagaggtagctcccaaaggggagcaacaatcaccttcaagatctgatcgtttagttagaggtgggttaaataacaaggagtcagcgaatcacttgccgcattt

SEQ ID NO: 132105 - DNA, 979 bp, Arabidopsis thaliana
  unsure (1)..(979): unsure at all n locations
gggaagatgactcgaagctggtcgatggaattactgagaagatatcaaaaaagttgttcacggaaaaaccaaggaatgatagtatcctaattgggatcgaccaacacatgggggaattgtatcccccacgcgtccggaattcgaatgaagatgttcaagtcattgggatttggggaagaggaagtaatggtagatcagcactagcaagccacgtttaccaaaacatcaaacatcacttcgaagctcattgttttctcgaagacgtgagacggatttcgctacatttccgtgactctcatttacaagatgagcttctttcaaatatgcaaggagaaggtttgacaacaaagaactgtcataggtgtcttaagactatcaaagcacggctaaggaacaagaaggttcttcttgtggcgaacgatgtagacaaacttgaacaatttgatgcacttgctgaagaatttacctggtttggtcctgggagcacaatcatcattaccccccaagatagacaattgcttatttcatcagtagtgaggagtgtctacgaaggtaagctcttgagatgtcacgcaggtcgtgagctcttgaggtcaaatgcctccaaggaaggagaaggagacgaccctgtggggttcgaccagtctacatatcgagccatgtatatatcacgtcatgtgtttttgaccttgagatatattttcactttgttgtgtgatagaggtcaacttagagaaaggataaangcaatagtacatagtctttagattcattaatccttttagatacaaggtgttgtatttaggtcgaataagttggttagattcaggaatattaacttaatgtgtttgtttgttctatagtgaatgttacgccatttttttacatatggatgtgccacttgtgtatggatttgtgtactatccatttggtaaactattttattcttaagacggttcacaacaaattcatttaaact

SEQ ID NO: 132106 - DNA, 381 bp, Arabidopsis thaliana
aaatcatcttcaaacccaaaaccaaatcagatcataaagaaccaaaaataaaagccaaaacgtttttagacatggcactcacaaaagagagaagaagcttgttggtttcaatggtgttggtgttcttcttcttcaactgtcaccatcttcaagtcacgagttgtccagatcaggcgacgacaaactgtacggaccaggacaggaaattattggagtttccattgaatttggagtaccttgaagctgagtttttcttgttcggagcgttagggtttggtcttgataaagtcgcaccaaatctaacaatgggagggccaagtcctattggagctcagaaagccaatctcgatcctttgacaagagatattattttgcagtttg

SEQ ID NO: 132107 - DNA, 650 bp, Arabidopsis thaliana
  unsure (1)..(650): unsure at all n locations
aannaaacccncccccccggacacctttncaagtttggggtcaaggcttncccgatttccccggngnnccnttttttaaacccccnntttcccnccagggaccngatttnggggggttnagggccatgtggcccattgggatgtccactatcccttctcttcgggcacgagactgtccaagtaaagagaaagaggctcttaactacctctttctcatcgtccccttgctcaatgttgctattcccttcttttggaaatcatttgctcttgtctggtctgctgacacggttgccttctttgctatgtatgcctggaagcttggatggctggaaagaacagagtagggactactcgtgaatcatgatgggattagagcatgaagattctttgtcttttcttccttagaatggtacttcattcagcttatcgtgttaggtacgtgggtttaaggcaaatgaatgtgaacattgctctagaatgatatatgaactagccccttaaggaatatttcttgtaaatcttaaagttctgagatgaattattgttccaaattaggaaaaaaaaaaaaaaagnnnnnnnnnnnnnnnnnnnnnnnnnnnnnnnnnnnnnnnnnnnnnnnnnnnnnnnnnnnnnnnnnnnnnnnnnnnnnn

SEQ ID NO: 132108 - DNA, 651 bp, Arabidopsis thaliana
tgaggcttaattttaatgaaagtattaaatttgtccaaaaaaaaaagaaaaacaaatatggaaatgttgggttggtataagccaaaccggaaatctctataccaaaaacaaaaccgaaaaattcatgaaagagagttttattctttcagacttctggattcctctagagaagctgagaaataccaatttttcttctatacatgtcgcttctcctaacttctccagaattttattattgtctctgctcaaagctttcacttgccgttgaacaaacgaagaatggaggagaacgagcgcttgtcgatgaagaggcaagatattgacagagtaacccatgacttctctgatttttccctctcttctcccgccaggaagattcgtcgtctggatgtggatttgccaccgattatggaggaagaagagattgatttaccgatgcaagatacggtcgcggaagaaatcgagcttgagccggttaacgatgagagagcaattgttctatttaagcctcttcattatcatcagccttcttctggaaacgtatttgttgatcgacacttgatttctgggtttaagaatagatttcttcgcgatgtatcgatagctgatgataatcagtatgaagatgagagattaaacaagtgtcaagct

SEQ ID NO: 132109 - DNA, 551 bp, Arabidopsis thaliana
  unsure (1)..(551): unsure at all n locations
nnnnnnnnnnnnnnnnnnnnnnnnnnnnnnnnnnnnnnnnnnnnnnnnnnnnnnnnnnnnnnnnnnnnnnnnnnnnnnnnnnnnnnnnnnntgttgtcgcccttttttttttttttttgtgagaattatgaacattataacatcaaaaatccaaattcagaaacattactatccacaaattagaggccaagatatacaacacagttatttaacttggtttgacatctatactgaaaccaaaacataacccgaatcatccaaccgttcttccacgggaagccggtttacataaacataccatgataccaacatcctccacttgaaagaacacggttggaacttaacttttgttgttcaccacataaaacctaacataaccaatcaatacaataaacaaccgaatatacttttatgaatttgaatttacctcttcgggcttcactccaccaataataccaatagatgagccgataatcggggtgttccgccgcattaacttagagggatttagcagggcggatttcaattccttgaatgatcaagccacactt

SEQ ID NO: 132110 - DNA, 829 bp, Arabidopsis thaliana
  unsure (1)..(829): unsure at all n locations
gccaggccccgggaagaaaagctggattcctctaaaacgggcgcccctttttctttgggtaactttgcttaggacccctagggcggttnnnccnttttncccgaacaaaattgcaaaagctctttttagaagaaaacataaacgttaacaagaccaaaatagacaaatcgaactatcaaaaatttatacctgttttccttcttttgtagccttttaaccaaaatcactcgtacaatttcttggccgaaagagttctgagggttttggttttgtcctttgtagctttcgcttcatacttctcgctcaacgctatagctttagccacggctttcatcttccttgcattctttgttctcttcatgtttgtcgggttacgagaaagagtagctagtttcaggtatccggtttccgtagctactttcaagtctccggtttccgtagctagtttcacgtcaccggtttccgtagtgtccatggctacagccacagctttcatattcattgcaatcttcgttctcttcatcggttttcctttcctcgtgctcatcaagctacgagcacgagaagctagtttcccgtcaccggtctccgtagtgtccatcacttgaggagtagcttcagagacgctctgagattcagaaacgtccatggaagcttcctcgtctctattcttcttgttcctcttcttcgtcattgctgattaggtcagacgcacgacggcacgaagcaaagcaacgagagtagagagacggaaatcgatcgaattttagaatttcaccggacgcgtgggtcgacccgggaattccggtcgggtactgcagacggccat

SEQ ID NO: 132111 - DNA, 373 bp, Arabidopsis thaliana
ggaagtgagattacactcgcttttttgtttatgccaacacttacactcgcttaaattatatatttgttaggtgtatgaataacatatagttcctttccacatgtaaggctttttcatttgattattttaactaaattggttaaggtttctttaaatattcttagaaaatctccaagagatactctagaacttaaaacacataaagtattatgtattccgaaagcaactttgctttattgttatattttactaacaccaaataaaaatatccttggagtgaaataatgattatccggcatctaaaatctgttttaatctattttgaaaaattatatggatccatctccggataataaaattttggatccatcga

SEQ ID NO: 132112 - DNA, 372 bp, Arabidopsis thaliana
tatctgtcaactctatcgcttgggctcctcatgaactcgcactgggctgagcttgcggtggatgggagggaaacatatcagttttctcggctcgagctgatggcggttagggacacgacaaagatagaccaagcacaccctgctggtgtcacttcagtgtcgtgggcacccgccacagaaccaggcgcactcgttagctctgctatgatcgatccggtctacaaactagcatccgccgggtgtgatagcacggtcaaagcgcgcaagttctcgaacgggtcatgcaaaacggattgtttcccggctctcaacaagcacacggattgggtccgcgatgtggcttgggcaccgaacttgggtcttccaaagtca

SEQ ID NO: 132113 - DNA, 380 bp, Arabidopsis thaliana
accaatacgacgtcgtttattggatccagcattggaattcacccatcccgccacattgctatcccactgacgacaaagattgacaaaaaaaaacctaattttcattttcagctctcttcacactacaaacctcttaatctggtgattttgatgggtccaagtaagtttccttatttcttcttctgattcttgttctcacgcagtgtttgcctttaattctactccatcagttagctttctttgtttctcgttggcaatgttagaattgtgtaaaaagacaaaaccacctgggaactgttttgttttctagtttgagaatgtcgtgtttggactgtattgagttccgttttaaaccctgttgtgttctacttgtttaggtt

SEQ ID NO: 132114 - DNA, 506 bp, Arabidopsis thaliana
gagttgacgttctctcctctgatctacgttcagatgacccggtttaaatgcggaggattagggttgggcttaagctgggccaatataataggagacgcattctctctgttctatgccttcaacctatgggctaaggccattaccggagaaaagatttatgccccaacaacaccctttataggagagagaagggtccaaagccccaacccgaccggtaaagatcccgtttcaattaaaccggtcgaaccgcggttggtgatctctgggtcactccaaacgacaggaaattggcgaattactgtttcaatctcgtcagtcgccgatcagatatcaccacattttccggcgaagggagatgactcgattccggtgttcgagattctcgccggaatcatatggaaatgcatagctaaagttagggtagagccaaagcctgtaacggttacgatcattaaaaaagatccgaacggtctgaaactttaatgcggtttcgaaacagtcaggtg

SEQ ID NO: 132115 - DNA, 757 bp, Arabidopsis thaliana
ccggccgaaattccggtcgcccacccgtcggagggtctttttgagggcttgcgccgacgaattaggcgacgtaggtgacttggatacgaacgtggcatattcttcccaatcacatagagagtctcatttctttgtaaataattggcgggctttataatgatgttttcattctttaatttgaaaaaaaagaacacaagtaaacttgtttgggtcgccaagagcttattctccgcaacaagcaacgtgtaagagcaaatagcgtattaaacacgtcatttaatcttggtaaaagaagctcatacacaaaagagagagcacttcttttttctttgcttttttgttggatgaaacctgtaacattacagtacagaaaaatcaaacaaaggggcaaataggaatgtgcatcattcattagacagctttttaatctgtacaatgataattgtgatatcatctgtcctattctcatgctccaaccacagtttatatgattccgctgctgctgcagcgcatccatcgcgcggatctgcgtatctccccaccatatcaacaacagcttggcttggaagaaactcgaaaatcccatcgcttgcaacaacaaagaacaaatggttaggcgagagatgaaccattgacacttctggctctgcaataactccaatgctctcagctgtaaaatcaccaacactcctcgtgaatgcggttcccggatacatcccgttttgtacccaaagtctcggcggatctcctccttcac

SEQ ID NO: 132116 - DNA, 595 bp, Arabidopsis thaliana
  unsure (1)..(595): unsure at all n locations
tgggnttttgggaaaggcggaattttttnntaattggggngaccccntggtttgaaaaaancgncnncaaatgggtnaaccgggnggntctncngtcngnaaacncaaggtgccaggatcagngtttcccttttacaccaaatcccccttggtcaactcctgccaatggttcccaccttaanccaacccgatcaaaatgacctgcaagtcccgtccgatcttgtgtcccgatgtatcgctacattgcttatgattcagaaatgtacagagaggcaattcccaccaagtgaagtagcccaggttctagactcggcagtggcgagtttacagccttgctgctcgcagaaccttccgatctatacagagattcagaagtgcatgggaatcataagaaaccagattctagccctcgtaccctcctaaagtaagaatcctaaaaccataacttaacctttgtgtctcttcataatgcttgtttctctttgtaaaatcaatatctccttatacaaaatccttttatataccccatttatttggagtgactcacaacagtttctcgatttcacatttatttatatgtaacacatcatttgtt

SEQ ID NO: 132117 - DNA, 1097 bp, Arabidopsis thaliana
  unsure (1)..(1097): unsure at all n locations
ctcactatagggaaagctggtacgcctgcaggtaccggtccggaattcccgggtcgacccacgcgtccgtacggctgcgagaagacgacagaaggggggtgaagtgagaagctagtatcaaaccttttcgagatggcccgtgaaagtgctccctcgattatttttgttgatgagatagattctttgtgtggtacacgtggagaaggaaacgagagtgaagcttcaagacgtatcaaaacagagcttctagtgcagatgcagggtgttggacacaatgatgagaaagtacttgtacttgcagcaaccaatacaccctatgctcttgatcaggctatccggcgacgttttgacaagcgtatctatattcctctcccagaggccaaggctcggcagcacatgttcaaagtccacttgggagatacacctcataatttaactgaacctgattttgaatatttaggccaaaggacagaagggttttctggttcagatgtgtctgtttgtgtaaaagatgttctgtttgaacctgttcgtaaaacacaagatgcaatgttctttttcaagtctcctgatggtacatggatgccatgtgggcctaggcaccctggtgccatccagactacaatgcaagatctagcaacaaaagggcttgccgaaaagattattccaccaccaatcaccagaacagatttcgagaaggtacttgcaagacaaaggccaacagtgagcaagtctgaccttgatgtccacgagagattcacacaggagtttggagaagaaggttgatagatttgacattcccatcaagcatctttcacaatcatattattattagtctcttcaccatctccttatgtatgtactgagaagcaaaacaaaatctcaaacccatgtttgatttcttcccaaaacattgaatttgctttatttctcgaattgtgtaaaaaaaaatgttctgaacaatgttttctatttattatgtccccaaaggtctccccatgggcaaactccatccctgctaaaggggtgaaaccgggttggaacccttnnnnnnnnnnnnnnnnnnnnnnnnnnnnnnnnnnnnnnnnnnnnnnnnn

SEQ ID NO: 132118 - DNA, 749 bp, Arabidopsis thaliana
  unsure (1)..(749): unsure at all n locations
nnnnnnnnnnnnnnnnnnnnnnnnnnnnnnnnnnnnnnnnnnnnnnnnnnnnnnnnnnnnnnnnnnnnnnnnnnnnnnnnnnnnnnnnnnnnnnnnnnnnactataaaacccttacacacatggtgttaaagttttaaccacgccattatgacaaaacctataaggaatatagtttccgataggcttgtttcaccaaaatggtgtgaaaccctcaaatatatggaggctcataggcatgtgtgagagaacaggttcctaaaataaaataaaaagtgacagtcaaaggctcaaagctgtaaaacaacattgaccatgcatgtcattcaaagtactaatccgcacttgtttttttcagacatctctctccactgtctctctctccactgtctctctctcgtcacactaaagaaacggatttatttagacaaaggaaatgtgattcaaagaaggaacaggtcaaggtgttcagtctcatcgtagaaatcagatacgtacacaccgtctctgtatgggtcgattaatgagtagtcgtcaaaagccacgaagccagacgtcgagtcatcacaaggtagttcatcaatactcatcgtctcatcaatctccatgtaacaactaatcaattccttctctttcatgttaattgtcatcatcttctcttcatcaacggcttctcttggttgttctgccaatatcactgtcttgatactctctagtccgtgttttcttgacgagattccagcagcgagct

SEQ ID NO: 132119 - DNA, 726 bp, Arabidopsis thaliana
  unsure (1)..(726): unsure at all n locations
gcctgaagtacccctcgttgctccatcggtgaactattagcggaagaacgtggtattagacatagggatagagaggctnnnaancaacangcgaggaatgaccaatgggcggttcgtgttgcacactatgttccttggcttactcattggtagaactcccagagctggttccctggatcaagtgtcgtggctcgcaatctcggtatgttgtccaaagcagacaaagagatcatgtttaagctcggcgctgcaaggagccaacatgaggcacaaataaggcaacaaggaacacacgagacattgcaccgtgacatgattgttggatttggaacttgggagttcgatccaatggagctcgagaatctgttcccgaacaatgaaggatcagtgcacttgtggcagggagatgatgatgtgcttgtccctgtgactctgcaacgttacattgcgaagaagctgccatggatccattaccatgagattcctggagcagggcatttgttcccgtttgctccaggtatggttaataacattgttaaaacgctcttaaccaatgatggagtgaagaagtaaacgatgtcttctctctcaaaaagttggctagttttggttttgtaacatgcattgctatgatattttgaacccgggatcagagagattccatgagaatcccaagtttctcttgggtgctggaaaaaattgggggggngtttgaaaaagggctgg

SEQ ID NO: 132120 - DNA, 427 bp, Arabidopsis thaliana
aaaggcccggggcgatccacgcgtgcggcttcaaccatttatcattatttccagtccacaccgctcgagaagagggtgcctgtgcttttagggtgtgtggagtgtatggaatgtatcatttcttggatatcctgctagggccatcttaccttattcgcaagcccttgagaaatttgctccacacattcaacaggttagtatggagagtaatggaaagggagtctcaattgatggtctacctctcccgttcgagactggtgagattgattttggtgaacctggaacaaatggtcaacacagcttttaccaactcattcaccagggacgcgtaatcccttgtgatttcattggcattgtgaagagtcagcaacctgtgtaccttaagggagaggtggtcagtaaccacgacgagctcatgtcaaacttt

SEQ ID NO: 132121 - DNA, 480 bp, Arabidopsis thaliana
  unsure (1)..(480): unsure at all n locations
attcaaagcttcaatattttcactagggttctttccctttcgcttgttctataaattgtgtggtgttctttncaattctcacggacgaacaaaccccaaggcaacgagctcatgattgagattgtggcttttgagtaaatgattcactgctcagctagagacaatggtgttggtaacccatctcttgcagggttcacatgtcttgtctccttggagttcgccaacatggaccagaggcttgtgtttaaagagacctgcttacgacagtgcactttgttgagagggaagataagcatttacgattgaagcaaaaaatgttgtttttgggtgcggtcccctcgctacaaatcctgcttaggttatgtactactagtttgagactcatactctctctgtgcgactgtactctagacgtagtatatgtgataatgtgctctatacgctgagactatctgtagctagagatctgtagatctgaga

SEQ ID NO: 132122 - DNA, 664 bp, Arabidopsis thaliana
  unsure (1)..(664): unsure at all n locations
tttttttttntttatcgtgaaataaactgggattgttctaaaaagcattctacacattggcgtaagagccattctttttgtacatgtgagaggaaaaactctaaaatcctcaccatttttctttacaccattctctgccttttatctcactcactcatcagcctaagggggatctttggttctatgtatagtcaaaacggtaagaaactacacaatgtacagattttgcggagaacaaaacaaagctctctctcattatttctccgcagatttttggtttagatcttacctaattctcaaaacgttatggcagagccatccaccctagttaagctgtacaacacttgcggccttacgccaccagaggctggggtaatgactgcaaagccattctcctctctccagcagcaacgagtttttcaacacgggcaacgatatgctttccgtaagtgtatttctttagagcattcagatgcactttaatacgagtcagtatcagttcacgctgttggtcatcacatgtctccaggactttttgcactacatagtttgcaaactgatccttcatcatcgcctgaagaggctcgttttcatcagttcggacgcgtgggtcgacccgggaattccggaccggtaccgcaaacggaaaggcaatcaaatttcc

SEQ ID NO: 132123 - DNA, 572 bp, Arabidopsis thaliana
gttttcaagacttttcattcatcattaatcgcaaaaatcaatcggtaacaacatcgatttttttttttggattgaaacttccatatttgttttaaagacaactctacatattggcattgatatgagccgataagaggatacatcaaacaatctaaaaaacctatctttctttaaaagcaaatatctatctaattctacggagaggcagaggcagagtctgaagaaagacgagagagctcgttcatgagaaagatgatacgagagtggtaatcacgagcctggtctaaagattctgcttcaagctcggctagctgtgagcagagacgctcctccgcttcttccgccacctgtgtccgccgccacaactgcaacatctctttcttcatctcctccacagctttctccatctctccgttcttccgtcgtagctcgtccacttcggaagccgccaccgtcacatagtttcctcctttccccatttttaagaacttttaaaggttttctaaagccttctccttttggttattttgcgccgctttgagtttttttgtccccttctgtcgtcttcatcg

SEQ ID NO: 132124 - DNA, 600 bp, Arabidopsis thaliana
  unsure (1)..(600): unsure at all n locations
nnnnnnnnntagctctctacgactcacttagggaaagctggtacgcctgcaggtaccggtccggaatccccgcgtccgcccacgcgtccgtacggctagaagacgacagaaggggaatcacaaacacaaatgagccacaaaaacgaagacatcatatcaagaaacgacgatgagcttcactgcttctctcgtctcttatttgacgtctccctcactcgtctcgctcaaccatcttcctccttccttcttcctcccaaccaaacttgtcaagccaacaagcctcactcattcacagcctccgagattgtccgcatcctatggtccagctgcaaaagctgctacagccaacgacgttgttccagaaacagctccgacatcagcgtcggaggtcgtctccagcttctacgccgccgttaacgtccatgatttatcctctgtcacagacctcatcgctcaggactgcgtctacgaggatctcgtcttctcatctccctttgttggccgaaaggcaattcttgatttcttcggaaaattcatttgaatcaacaaggtcgggttctcaatttggggntngntggttttnnaacagnaggcttttna

SEQ ID NO: 132125 - DNA, 692 bp, Arabidopsis thaliana
cgcaacctctatacgattcacttagggaaagctggtacgcctgcaggtaccggtccggaattcccgggtcgacccaggcgtccgtacggctgcgagaagagacagaagggggagccttcagcttcgaggacgggctgaagcttgtaaaacttagaggagaagctatgcaggctgctgcagatgctgctaagagtgccatggttagtatcatagggttggactcagaaaaggttcagcagttgtgtgatgcagcaaatcaagaagtagatgaagctgacaaagttcagatcgcaaattacttatgtccgggtaattacgcagtatctggaggtcttaaaggaatcgaagttgttgaagccaaagctaagtcattcaaagcacgaatgacggtgcgtctagctgttgcaggtgctttccacactagtttcatggaaccagcagtctcgagattagaagctgcattggcagccacagagatcagaagtccgaggatcccagtgatctcgaatgtcgatgcacagcctcatgcagatccagacacgatcaagagatactggcaacgcaggtgacatctacaggccaatgggaggacacagtaaagactctttattccaaggacttaaaagcacttctaatcgggacctggtaaggtaattgccggggtattcaagagagtagataaaagcgcaagt

SEQ ID NO: 132126 - DNA, 467 bp, Arabidopsis thaliana
ggctggaggctgtataaaacgcgacagtgtcgtggacatgatactctacccctctggtatctcttttccttgggttttacgatgctgacttctgtcgctttcactgctctgctcggtgcttccgcggtacttgctaccccattcacccgtacccagaggacttgtggcacacatatcagcgacgatcaggttgcccaggatgagaggtatttcgaggccaacagcgcttctcttgacgtcgacacggcggccaagggaaaggttcccgttctcaatgtttactggcacgtcgtccaggccaacaagactttagagggaggccatgttccaaagtcacagatcaaagcccaaatcgacgtgttgaacaccgcctacgtacctagtgggctccaatggaggctcgccgagatcacccacacgactaatgagggctggttcaacaacgctggtcccgacaccgatgaaca

SEQ ID NO: 132127 - DNA, 718 bp, Arabidopsis thaliana
tttttaggtacacactatagaagatctatgacgtcgcctgcacgcgtacgtaagctcggaattcggctcgagcttggcgacgagtctctaatatgagagtaggtcgtgaatttgcagcagctggtgtaattgatgggaagatttatgtgattggaggatgtgtagttgataattgggctcgatcgattaactgggcagagatgtttgatataaagactcaaacttgggagccagtggctagtccaggtatggaggttcgtgagaaatggatgcacgcaagtgcggttatggaagggaaggtttacgcaatggctgatcgaaacggtgttgtttacgaacccaaggaaaagaaatgggagatgcctgagaagaggcttgatttgggatggagaggaagagcttgtgtgattgagaacatattgtattgttatgattacttggggaagattagagggtatgatccaaaagagaggatttggagagagctgaaaggtgtggagtcacttccaaagtttctttgtggggctacaatggctaatcgtggtggaaagcttacggttttgtgggaaggtaaagctggtagtggtggttctaggagaatggagatttggtgtgcggagattgatgttggaaggcgtggagaaagggagatttggggaaaaattgaatggtctggtaccgtgcttacggttcctaatgaatctgccattgtgaattg

SEQ ID NO: 132128 - DNA, 385 bp, Arabidopsis thaliana
  unsure (1)..(385): unsure at all n locations
gacgagaacaattacttccaacggagaatggcctcaattgtcggaattcgaacaagattcctgagtttcgggaagctttcacaaatctcttcttcactgttgagaatacacaatcctcgtaatcatcagaatcctcttattctccctcttccttgtttctctgccgctcctagtcgtcatcgtcctctgatttggcttcgctcatctccgcctgtgtcctcgatgaccactcaggctgaatctgggtcttcccagcaatccgattcttccaaaacggtgagagtggtgataaagggaagagtacagggagtgtgctacagaaactggactgttgagaacgctgagcagctggggataaagggatggggttangaaccgcagggat

SEQ ID NO: 132129 - DNA, 706 bp, Arabidopsis thaliana
  unsure (1)..(706): unsure at all n locations
tggaagccctcgggaaactttcccnnccccggtggtgccncnccttnanccngnctttngaaacnctccgggtnaaagcccggggggcccnccctgggggggggcccaatggttccnttttccaaaggagcttgnaagtnttgcaaanccattctcggggaagctctcccgtggaagtggctccctcaaaggaaccaacccattactttagtgtttctagctgctgcaggagccgctgctgcagctgttctatcttccaacccggaggttacaaacgagctgaagaacctggtggactcattggagctgcatgaatacatcaacaaatacactgaggttatctccacagctttgaagaagtaagagaaaagaaccaatcaaaaacctgaggatgatatagagaggtaactcttaatatcatcggtgtagagaattacttaaaagttaaagccttttactctccaagatacaaaattttgaacatcttgaccagaacttaggggttatggaggtgaagagaataatgagagttttcgtttttataatcacagagtctgttcaaagttgttgaaggttttttttagactgtttaatttgtttctgagataatttatatttcttcttttttccctgatgccaatccagccatttctgtttaccacatgtttgctttggattnnnnnnnnnnnnnnnnnnnnnnnnnnnn

SEQ ID NO: 132130 - DNA, 1112 bp, Arabidopsis thaliana
  unsure (1)..(1112): unsure at all n locations
nnnnnnnnnnnnnnnnnnnnnnnnnnnnnnnnnnnnnnnnnnnnnnnnnnnnnnnnnnnnnnnnnnnnnnnnnnnnnnnnnnnnnnnncggccgcttacattccctgcatcatctgcaagagtaaaggctacagagaggtttgaggcaatatatcccttgctgaaagaagtggctcttgctggtgcaccaggaagcaaggcgatgaaacaagtcacacaacagatattcacttttgctctgaaattagctggagaaggaaatcctgttttagccaaggaagctacagcaattgctatctggtctgtgacccaaaactttgattgctgcaagcactgggacaatctctacaaggagaatctggaagctagtgttgctgttcttaaaaagcttgttgaagaatggaaagagcattcggtcaaactatcatcatcaccgaatgatgctctcactctcaaccgaactatgaaaagcttcaggcctaaagaaccgaggaggtcatcactgagggaggagccaatgcttctcttttacaaagaagctgacaagtcttgcaaaacgatctcggggagactctcccgtggaagtggctgcctcaaaggaacagccattactttagtgtttctagctgctgcaggagccgctgctgcagctgttctatcttccaacccggaggttacaaacgagctgaagaacctggtggactcattggagctgcatgaatacatcaacaaatacactgaggttatctccacagctttgaagaagtaagagaaaagaaacaatcaaaaacctgaggatgatatagcgaggtccctcttctcctcctcggtgtagggncttccttgagagttggagccttttcctctcccgggtgcgggtttttgtccctcttgtcccgnncttnggggttacccccgctaaagaaggaaatgagagttttcgtttttataatcacagagtctgttcaaagttgttgaaggttttttttagactgtttaatttgtttctgagataatttatatttcttcttttttccccgatgacaataaagttatttctgtttaaaaggaataacccccaagggcgaacgctctagaggatcccagcttac

SEQ ID NO: 132131 - DNA, 600 bp, Arabidopsis thaliana
  unsure (1)..(600): unsure at all n locations
ggaggaaaaatggcgatggctttgtccaacccgaccacaagcactaacctctaccactactcaattctctcgccgttctcaccgccgtatcaccttcaccgtcgaaacaccgtcctactagcgagtccccgccgtttacgccgcctcgccgtcgctggtggtcctccttctcctccaggccctgatccgcctccgcctgaggacaccactcagctagaaggtcttgtgggagctgtgacaagggttcaagaccgcgtaaagattttcctcgcagtgttcttttggatgtttctcttcttctgggttatagtcacagatgggacgggtaaaggcaaaggcaagaagggttcacgtttcaagtagtttccatatatgaaggaggctttggtgattatctactactccaagtacctctatactgtatataatatcaaggcttcaaagggatcaaattacctgtataaacttcaccaagtaagcatcttccttgtacatcacttattcagatgataataggaaacaataagatcgtgttatcttcttggtcaatgctagtgatatatagtcctccnnnnnnnnnnnnnnnnnnnnnnnnnnnnn

SEQ ID NO: 132132 - DNA, 411 bp, Arabidopsis thaliana
ggtcgaccatttttgtttctgagttgttcttcttgattagctttgtccgcttggaaccaaacatggcgagtcttggccatatagccagagaatcatcagacatcacacgcctcgcccagttttacaaagaggtgtttgggttcgaggagatcgaaagtcctgattttggagacctacaggtggtgtggctaaacttaccaggtgcttttgcaatgcatattatccagagaaacccttcaacaaatcttccagaaggtccttacagtgctacctcagcggttaaggatcctagccatctcccacatgggtcatcatatccggtttctctgtcccaaatttcgactctttccttcattctctcaaggagaaagggatagaaacttttcagaagtctcttcctgatggaaaagt

SEQ ID NO: 132133 - DNA, 639 bp, Arabidopsis thaliana
ctcaattgcttgataccatggcctcatgttccagaagaaatgagttctgtagcccatgatataatagaccgatttttaacagaagatccacatcagagacttggagctagaggggcagctgaggtcaagcagcacatcttctttaaagacatcaactgggacacactagcaaggcaaaaggctgcatttgttccggcttcagagagtgcacttgacacaagttacttcagaagtcgctactcgtggaacacatcacatgagcaatttttcccaagccgtgacgttccagattatagtgatgctgatagcatgactaacagcagtggttgctcgagcaatcatcatgaagaacgggaggctgaacaatgcgaaggtcatgcagagtttgagtctggcatacctgtagattactctttcagtaatttctcgtttaagaacctctctcagttggcgtctatcaactatgatcttttatccaaaggctggaaagatgagccacaacaaattccgcatcacaagtaacatccatttcctggatgttttttctcgattcttttggtgttcagtcagtgtaatgagtactctgccattaccggcgtttgtttgaaaactctgtaaaagtaactcgttcgtttctgt

SEQ ID NO: 132134 - DNA, 386 bp, Arabidopsis thaliana
  unsure (1)..(386): unsure at all n locations
gatacacgataaagattgcacaatttctcaataaatagatttacacatttcctcaacataaccaaaagatccaaactacccttctctgatcaaatggattgttcattcataactacaaacgatctccgaagaatgttcaagacgctcgacaagaaccaagacgggcttgtgaccctcgacgagctcctttggattcttgataagctcggttcggccgaacacactcccgatgagcttgaactgatcgttggtaaacagagcctcgatttaaacgagttccttcggttccactacgacgcttgttttagatagcaaaagggatctaaggaggatatttgatgttgntgctgntaattgatgaagcgntttcaaagggcggttaaatg

SEQ ID NO: 132135 - DNA, 365 bp, Arabidopsis thaliana
  unsure (1)..(365): unsure at all n locations
tacggctgcgggaagacgtcagaagggtacggctgcgagaagacgacagaagggtacggctgcgagaagacgacagaagggtacggctgcgagaagacgacagaaggggttaatgctttgattaatgttactgagacaactatcgcttcaggagatgataaaggctgcgttaagatttgggatacaagacagcgctcttgctctcatgagtttaatgcacacgaggattacatttctggcatgacctttgcatctgattcaatgaagctagtggtaacaagtggagacgggactttgtctgtctgtaatcttagaacgagtaaggtccaatctcantcccaaattttctgaagatgaactacctt

SEQ ID NO: 132136 - DNA, 389 bp, Arabidopsis thaliana
cttcatgggcaagtcggcaagacttcgccggagccagacctcatcgccggagaatgtcttgttgggtaaagatagctccgatgatccttacagatccgactcagagactgaatcaaactcgagctccgggaccgagtcgaacatgagctctgactctacaacttcgggcaggagtgtcggcggatgatacgaggcttcgtctgattctctgcttcgaacggaactcgcggagatggagatgatcaaggctcgtgaagcagcgaggttggaagctgagaagagaacgttggaaatggaagtcgacttgactcagatggtgcttcagactcatttgcaagcgatgtcgtcgttacccgtcggagagcataagatttatcaggcacagagga

SEQ ID NO: 132137 - DNA, 766 bp, Arabidopsis thaliana
  unsure (1)..(766): unsure at all n locations
tcgccacnnnnnnnnnnnnnnnnnnnnnnnnnnnnnnnnnnnnnnnnnnnnnnnnnnnnnnnnnnnnnnnnnnnnccacgcgtccgtacggctgcgagaagacgacagaaggggggaggagaaaaggtagtgccaatattagccggcgattcagatggagacggtggtcgataaagatgttctgaagtcttccggggctgagcttcttcccgacggacgtcgaggtttacgcatccatgactgggagatcgaaaccctccgcggcacgattctcacttctctcgctgtcgaagagtgggaaaaaaagcttaagacatctcacttacctgaaatggtttttggtgagaatgcattagtccttaaacacttgggtagcaacactaagattcattttaatgcgtttgacgcactagctggttggaagcaggaagggcttccacctgttgaagttcctgctgcagcacaatggaaattcaggagcaagccgtctcagcaggtgatactagattatgattacacgtttacaacgccctactggggaagtgaagtagttgagaaagacaaagaaacgggtgaggcaaaagctaatccaaagggggatgctactcttcagtgggagaactgggaagacagattgatttggctgtctttcacttangaacctattctcttctatgatgagggtagtttgtttgaagatgactggctgacaatggagtgtcacttctgactgtgaaagtgagagcgatgcaagctcatggtcctc

SEQ ID NO: 132138 - DNA, 740 bp, Arabidopsis thaliana
  unsure (1)..(740): unsure at all n locations
nnnnnnnnnnnnnnnnnnnnnnnnnnnnnnnnnnnnnnnnnnnnnnnnnnnnnnnnnnnnnnnnnnnnnnnnnnnnccacgcgtccgtacggctgcgagaagacgacagaaggggaagacaaaaaagggtaatttgaaaattttcagatagaaacagtcccgtcaccggcgacgatgaaatggttgctcgtcgccgtattgacctctcttacgatcttctccgccttaacacagtcccatctcctccatggatctccggtcaattctctctgcgctgatctcattcatcccgctaattactcctgcactgaacacagtattcaaacaaaggatggttacatattagctcttcaacgtgtagcttctcttggtccaagacttcaatctggtccacctgttttgcttcagcacggtctctttatggctggagatgtgtggttcttgaattcaccaaaagagtcactaggtttcattcttgctgatcatgggtttgatgtttgggttggaaatgttcgtggtacacgttacagttatggacattgtaacttgtctgacactgataaggagttttggggactggagttggcaagatttggcatgtatgacttggcagaaatgattcagtatctgtatttcatttcaaactccaaattttccttgttggacattctcaggggacttcatggttttggctggtttactcaaccgatgttgcggaaatggttgatcccctgcgttgc

SEQ ID NO: 132139 - DNA, 380 bp, Arabidopsis thaliana
tacggctgcgagaagacgacagaagggtacggctgcgagaagacgactattgagagctaaaatccgagattaagaatggcgaatcaaggagcgaagaaacgaaaggaagagaacgccaaacacatggctaagctccgtcgtatcatcatcgcttccaatgctgtgtatttcgttgtgaggatgttgattttctactcaagctttacttggaaacattggatcggtttagtgataacttcgctggcttacgcgtttccttataagcagcttgatcaaatggctaaacctagtgttactgatgatggtgagcttattgatggtggatttgacatggacactggtggaatctgcggatatttgcacgatgtcatctatatcac

SEQ ID NO: 132140 - DNA, 638 bp, Arabidopsis thaliana
  unsure (1)..(638): unsure at all n locations
gtcatcaagaagcttcgatatctcaatctatctctactcattctctcttaaaaaaaaaaaaaaatcaaaaatttctggagtagtttctcgagccatgaccgcaaagaacgctgtgttgcaattgagtattcacgaggagagaaccaggaagaaagcgcttgtcaccgtttttcgattttcaggagttacttcgataacaatggacaaaagtgggaaaatgacaatagttggagaagttgatgtaccagctgtcgtgatgaagctaaggaagctatgtaacacagagatcgtttcagtcgatgatgttaaaccacctgttaaaaagcctgaacctgagaaaccagctgaatctattgcatatcctgttccgatgaactacgcgtaccaattcaatcctgcctatgcaaattcttactatcatcaaccatacggaaattgtagagtggtagacgaaccaaattgtgtgattatgtgattgttccagtgttatttcaattaatgctcagttatttaacacttatagttttgatagaaatatgtaattttttcttagatactgttgtaatatgtaattttttgtcaacgttgtaacatccatttctcttgcccatnnnnnnnnnnnnnnnnnnnnnnnnnnn

SEQ ID NO: 132141 - DNA, 642 bp, Arabidopsis thaliana
ggaaattgagagagagtagaacactaaattagtaaaatggctgcaaaagcatcaaatttagttgctcttcttctctttttgtttcttctgcttctatctatctcctcacaagttggactaggcgaggccaaacgcaacctacgtaacaatttgcgtttggattgcgtttcccatccctctcctcctcctcctcatcgttccatggcccctccaatttttgtaccgccttctacatcacacaaaggacaaggcccataaacaaaatcatacaagtaaccgagaagaagtgatcaaaatttcataccaaaaaaagaagtgatcaagattccatatagagaaaagagtattgtgtaagaagaagggtcaagatttttcttttattgggtcaagcttttacaagttgactattataaattatacaacttattgtgtcttatacaggttgaaccttttcagagcatgttggaattttaaatcatatattgtgaatatatatgaatatgttggatatcttatataataaagtcattttagataaattgattattgcaaaaaaaaaaaaaaaaaaaaaaaaaacaaagcggccgctctagaggatccaagcttacgtacgcgtgcatgcggcgtcaagctaatctatag

SEQ ID NO: 132142 - DNA, 726 bp, Arabidopsis thaliana
  unsure (1)..(726): unsure at all n locations
nnnnnnnnnnnnnnnnnnnnnnnnnnnnnnnnnnnnnnnnnnnnnnnnnnnnnnnnnnnnnnnnnnnnnnnnnnnnnnnnnnnnnnnnnnnnnnnnnnnnnnnnnnnnnnnnnnnnnnnnnnnnnnnnnggagatttagaaaaaaaggaagctccaagagatggcaagagttgttaaaatcgattctgcagagtcatggaatttctatgtgagtcaagccaagaatcagaattgtcccattgtggctcatttcactgcattatggtgtattccttctgtgtttatgaactccttcttcgaagagcttgcgtttaactataaggatgctctgtttctaatagttgatgttgatgaagttaaggaagtggcaagtcaactagaggtaaaggcgatgccaactttcttgttcttgaaggatggtaatgcgatggacaaactcgtgggcgcaaaccctgatgagattaagaaacgggtcgatggtttcgttcagtcctcacgtgttgttcatattgcttaagagagatttatagatacgagcagaatactataataaagtttgtgtaaagtgtaattagtttgtaactttgggatttggtttgtgttaaatatcaagtgtaagtgtaaatttttataaaagcaagctttgttaaaaacaattaaaaaaaaaaaanaaagggcggccgctctagaggatccaagcttacgtacgcgtgcatcgacgtcagg

SEQ ID NO: 132143 - DNA, 484 bp, Arabidopsis thaliana
  unsure (1)..(484): unsure at all n locations
tttncccnnttaaaaacntnccgtnaaccctttttccggggctgggacccncgntngggggccttcccgggaaaattttaaagggtgggaancnccgggttcaaaattntcccngnttttttcccagcccaattatgggtggaaagggggaaacctggatatgtgccaggctgcttttgcaagggctaaacagctatcagctcccaaggccacgggagcggtgctgtgcggacagaaacaaatggctgaggagataacttcaatgcttgtagctgatggagtctcaaatgacaagctgctcaaaaacttttgacagatatagttcttgtattatcgtataattttactgtttcttcacatcattattcttttgatacgaaagtcctcttcaaggcctctctaattcataaacacacagaattttgtagtcccttaaaaattaatactactgtgttgattgtccccccaacattcttttttgttt

SEQ ID NO: 132144 - DNA, 615 bp, Arabidopsis thaliana
ttttacgacagaagggggctgtggccgtctccaacaccatttcgaagaccagggagatcgaagcaaaatggagaaaggaaagggaagaaaggaagaggtcgtgaccagggagtacactatcaatctccacaggcgcctccatagctgcaccttcaagaagaaggcacccaatgccattaaagagatcaggaagtttgcattgaaagcaatgggaacaaaggacgttagagtggatgttaaactcaacaagcagatatggagcaaaggtatccgaggtcccccgaggagaattagagtccgtgttgcccgtaagagaaacgatgatgaagatgccaaggaagagttcttctccctcgtcaccgtcgctgagattccggctgaaggattatctggtttgggtactaaggtcattgaagaagaggggtgaaaattggtgaatgtacactcacacaaccttatctttagatgaaaagacgaaacgaaaagactttgcttgttttgatcacttacctattttggtcatttatcatttcttatgttttaagttctatagacaacagatttggtactactcatacgagtttgatcttttgagtcgcaaaaaaaaaaaaaaaa

SEQ ID NO: 132145 - DNA, 740 bp, Arabidopsis thaliana
  unsure (1)..(740): unsure at all n locations
agtacggctgcgggaagacgtcagaaggggggtcaaaacatgaaccaacattatccatcttccccggtgagacaaccgccatctcaacacgggttcgaatcttcagcagctgcagcggttgcagtgatgaaagcgagatcaaccgcctttgcgaaacgtagcttgagcttcaaaccagctactcaaacagcaccacagtcgaatctctcggattggggatctccaaacgggaagctggaatggggaatgaaaggagaagagctgaataagatgagaagaagtgtttcctttggaatccatggaaacaacaacaataacgcagctagagactacagggacgagccagatgtgtcatgggttaactctttagttaaagacagtactgtggtgtctgagagaagctttggaatgaatgagagggttcggataatgtcgtgggctgagcaaatgtacagagagaaggagcagactgtggtgtaaacacacacaaagatggtttcttatatatattgcttttgggccatctctgcaaatttgattctttaatttttgtgactttctttagttgttactgttattagtagtatatggtttgttgtcactacgagtctacgtgatgaaaagatagaagttaattgctttaaaaaaaaaaaaaaaaacccaaagnnnnnnnnnnnnnnnnnnnnnnnnnnnnnnnnnnnnnnnnnnnnnnnnnnnnnnnnnnnnnnnnnnnnnnnnnn

SEQ ID NO: 132146 - DNA, 571 bp, Arabidopsis thaliana
aatggggaatgataggagaagagctgaataagatgagaagaagtgtttcctttggaatccatggaaccaacaacaataacgcagctagagactacagggacgagccagatgtgtcatgggttaactctttagttaaagacagtactgtggtgtctgagagaagctttggaatgaatgagagggttcggataatgtcgtgggctgagcaaatgtacagagaggaggagcagactgtggtgtaaacacacacaaagatggtttcttatatatattgcttttgggccatctctgcaaatttgattctttaatttttgtgactttctttagttgttactgttattagtagtatatggtttgttgtcactacgagtctacgtgatgaaaagatagaagttaattgcattagtttctatattcgtttctcatcctcttgtaatttatcaaaccatgaaatggctaagcaatccaaaccccaaaaaaaaaaaaaaaaaaaaaaaaaaagcggccgctctagaggatccaagcttacgtacgcgtgcatgggacgtcatagcactctgatagtgcgtcc

SEQ ID NO: 132147 - DNA, 542 bp, Arabidopsis thaliana
  unsure (1)..(542): unsure at all n locations
taaaaattatcaaaagagggcgatccggggtgttgcccagtcccgttttataaaggcgagtttttttcccgttcaacaccccccgagtatgtaattcgtagcccgggaagaagatcaccatagcttctgcttctggttcccctcccgaggtaaaagaaagaaaatagtttgtttttggattttattttcaaaaccccccagtgggatcttcagggatcaacatgatcatcgtttcagtcgtcggcgccttccccacgccaagagagaatgaaggaatccatcgtaagggctttcccccccctcctctcgctttttagggatttatgttcttccctgagttgggatctgtagaactaacttccccataattgtatctcccgaaccgtgatgtagtaatctgagtaaatctaaaactatctcgtggaattgcccccccttaaaaaaaaaaaaaaagccccaaccccaagcgcggccgctctagaggatccaagcttacgtacgcgtgcaggcgacgtcatactcttctatagtgnnnnnnnnnn

SEQ ID NO: 132148 - DNA, 662 bp, Arabidopsis thaliana
  unsure (1)..(662): unsure at all n locations
nnnnnnnnnnnnnnnnnnnnnnnnnnnnnnnnnnnnnnnnnnnnnnnnnnnnnnnnnnnnnnnnnnnnnnnnnnnccacgcgtccgcccacgcgtccggctgcgagaagacgatagaagggggtccgcggtcgggaggaaagggcagcgataagccatgatgatacggggtggtggatccgcgtttgctaagtactgtcgaagagggatgtcatcatctcgagagttaccttcagagaatcatcagatggaggcgaatcgtggttttgccagttacgtatttaaaggggcagtcttttacacgtcatacgccatgagtatgtaattcgtagccgggaagaagatcatcatgcttctgcttctggttcccttggcgaggtaaaagaaagaaaatagtttgtttttggattttattttcaaaacccactagttggatcttcatgtatcaacatgatcatcgtttcagtcgtcgacgacttcccaagacaagagagaatgaaggaatcaatcgtaatggcttttgcttgtttctttcgctttttatgtatttatgttcttaacctgagttgggatctgtagaactaacttcccataattgtatctcacgaacgtgatgtagtaatctgagtaaatctaaaactatctcgtggaattgcaacaact

SEQ ID NO: 132149 - DNA, 558 bp, Arabidopsis thaliana
gttgatatggatgaaagcaaaagggctgttccaacagcaaagggccaagctttggctgatgagtatggaatcaaattctttgagacgagtgcaaaaacaaacctcaatgtcgaaaatgttttcatgtcaatcgcaaaagacataaaacaaagattgacagaaaccgacacgaaggcagagccccaaggcatcaagatcactaaacaagatactgccgcatcgtcttctacagccgagaagtcagcttgctgtagttacgtttaggagtatgattgctctttttcgcctgcaccgggttttttaaatatctggccatctttttcatctcttacgtctcaaatcagagataattctcatgttgttacctagaacgagtaggaaatctcattgatggttgtgatctttatgtctaatttgttatctccataattcctgtacaatgatcttcctgatatggaagactatgttggtcaaaaaactatgtgaaaaagactttgaatttataaaaatgaaaccgttgtagtgtgtagaaaaaaaacaacaaaaaaaaagaataga

SEQ ID NO: 132150 - DNA, 646 bp, Arabidopsis thaliana
  unsure (1)..(646): unsure at all n locations
nnnnnnnnnnnnnnnnnnnnnnnnnnnnnnnnnnnnnnnnnnnnnnnnnnnnnnnnnnnnnnnnnnnnnnnnnnnnnccacgcgtccgtacggctgcgagaacgacagaagggggaattcatgattcacaaaataaccaaaccttcaatttataatcgtttccaatcccaaaatcaagccatggacgccaagaacaccaaagctgatggagccaagaattttggtacgagtggcggaagcagtggttctggtagcacttccgacatcggtaaaacaatggttgctcctggatctggtggacgacaaagcgtttagagggaggcttttgagagcaaccctaagaagttctttgatgatcgtaacttcaaagagaagaaatgaaccgtttaaatgaagagcaagttctcaaaaagtgatgatatatcttgtttcttattttcttctttgttagtgatcctccaaggctccactagttcacacatatggtggagtgaagtaaaataattatcaataataattaataagattcataatttctgttnnnnnnnnnnnnnnnnnnnnnnnnnnnnnnnnnnnnnnnnnnnnnnnnnnnnnnnnnnnnnnnnnnnnnnnnnnnnnnnnnnnnnnnnnnnnnnnnnnnnnnnnn

SEQ ID NO: 132151 - DNA, 637 bp, Arabidopsis thaliana
  unsure (1)..(637): unsure at all n locations
nnnnnnnnnnnnnnnnnnnnnnnnnnnnnnnnnnnnnnnnnnnnnnnnnnnnnnnnnnnnnnnnnnnnnccacgcgtccgcgagaagacgacatgaaggggatggagaagaaaggtatccgttcaaacacgattgtgtataatacgttgatggatgcttacaacaaatccaaccacatagaagaagtggaaggtctttttactgaaatgagagataaaggcttgaagccttcggctgcaacttataacattcttatggatgcttatgctagaaggatgcagcctgatatcgttgagacacttctgcgggagatggaggatttaggtttagagccaaatgtgaaatcgtacacgtgtttgattagtgcgtatgggaggacgaagaagatgagtgatatggctgctgatgctttcctgcggatgaagaaagtaggtttgaaaccttcttcacattcttacacagctcttattcatgcttactcggttagcgggtggaacaaaaaaccttatgcttcctttgaagagatgtgtagggaggggattaaaccggcgttggaacatacacatagtttttgttgcttaaaacatcaggggacattggaagctgttggaaattgaaaactaatgctggaaaaaat

SEQ ID NO: 132152 - DNA, 826 bp, Arabidopsis thaliana
  unsure (1)..(826): unsure at all n locations
nnnnnnnnnnnnnnnnnnnnnnnnnnnnnnnnnnnnnnnnnnnnnnnnnnnnnnnnnnnnnnnnnnnnnnnnnnnccacgcgtccgcccacgcgtccgcccacgcgtccgcggacgcgtgggcggctgcgagaagacgacagaagggggtggctctggtttctccatccaaacaaaaacaacacccaaaccttgtccacaccaaaatgttaaactcaaaatccaaccacacacacacaatttctcttcctctctaccattaacatcgatcagaaagaccgagagagagagggagaagctgattgattatggctgctgcttcgatttctgcaataggatgtaatcaaactttgataggaacttccttctatggaggatggggaagttccatctccggagaagattaccaaaccatgctctccaagacagttgcgccaccgcaacaagccagagtctcaaggaaagcaatcagagcagttccaatgatgaagaatgtcaatgaaggcaaaggcttatttgcacctctagttgttgtcacacgcaacctagtaggcaagaagaggtttaatcagctcagaggaaaagccattgccttacactctcaggtgatcactgagttttgcaaatcgattggagcagatgcaaaacagagacaagggcttatcaggcttgctaagaagaatggagagaggcttggtttccttgcttaggtcttaaaaagaacaaatctttctctctgcttgtgtctgatatatacactcacaactcctcttgttgttcttgtctagatgtattttgtccaaacctataatcttgatttttgttcc

SEQ ID NO: 132153 - DNA, 599 bp, Arabidopsis thaliana
  unsure (1)..(599): unsure at all n locations
aggttcccgttccgcancaacttggatgcattctncggntccaacggnctccgtgancccncaattggtatccgttatgcaaaaatggccngaaaaagatggtggttcccgaaacacaactccaagaactcagggagaaagagcctcgaaagaaagcgaatgcgcaaagaaatgctcttgcatcagcacttaggcttcagaggaagcttgtgaaaacagtcactgagaccatagatgagattagcgatggccgcaagaccgtttggtggaaccgatggatccccagagaggagtgaggacagactctacttacaatatatcatttttcatttcggtttcgatagtgtaaatctcaatgtatatcttattagcccttagtaaaatttctactacttgtaaaatcaagtaatcttaaagaaaaagatgtattgtacctaaatccacaaacttgggagtctctgactctgtttctgaagtttcatacctttgtgtataaaaaaaaaaaaaaaaaaaaaaaaaaaaagcggccgctctagaggatccaagcttacgtacgcgtgcatgcgacgtcatagtctagctatagtgtcagttcaatt

SEQ ID NO: 132154 - DNA, 575 bp, Arabidopsis thaliana
  unsure (1)..(575): unsure at all n locations
nnnnnnnnnnnnnnnnnnnnnnnnnnnnnnnnnnnnnnnnnnnnnnnnnnnnnnnnnnnnnnnnnnnnnnnnnnnnccacgcgtccgacagtgaatcagcaaattgggtaatacagtggatggcaaaaaatgggacagaaaaagatggcggattcatcagatacacaactccaagaactcagggagaaagagcctcgaaagaaagcgaatgcgcaaagaaatgcgctggcctcagcacttaggcttcagaggaagcttgcgaaaacagccactgagaccatagatgagattagcgatggccgctagaccgtttggtggaaccgatggatccccagagaggagtggggacggactctacttacaatatatcatttctcatttccggtttcgatagtgtaaatctcaatgtatatctttattagccccttagctaaatttcctacttcttggaaaatcaagtaatcttaaaggaaaaagattgtgtgggtacctaaatccacaaacttcggagttgctgactctggttttgaagtttcatactttgtcgcttaaaaaaaaaaaacggatctccaatt

SEQ ID NO: 132155 - DNA, 389 bp, Arabidopsis thaliana
gcacaacaccatggaagtttcactaagcaactgaggcattacatttctgagttcgatcccaagatattgcggagatgcgcaaaaccaaggtcacatgaagcaaaaagcctgatagaaaagcagagtttagctctttttggtcctgaggaaagcagcaaagagagcattgtgacatcgttttctagcctgaagaggttgcttcttgaggctgtggcgtttggtacgtttctatgggacgcagaggagtatgtagatggcgcgtttaagctcaaggagaatgaggatgcagaggaagaaacatatagcagtgtttgaagtatgtatgaaccagtttgctagaaagaaacttgaatatcttttttggtggacattgcaatatatatatagat

SEQ ID NO: 132156 - DNA, 730 bp, Arabidopsis thaliana
  unsure (1)..(730): unsure at all n locations
gccctactcctaacaccagtcaaaaatcatctcaagatcagagcccagatcccaaaccgacgacaccaaccgggacgtcgtcgacaactcctgccgaagatagtagtacgacgtggtcaccggtagatacatcaatgatatacgaaggagctttggatcaaaacaaaggatcaccgtccacgtgtcatctttcgttatgtggaatcacagtcacacttgcgctggccttttgtcggatgtggcggctcttttgacacctaactttgtctcccgcgtaaaacactgaagaatgtgggccctcactgacgaaagccttatctcgttccggcccatgtgaaccggttattcccgaacgacgtcggattgggtcagggttgagaaaaaaagttaacaaccccctacagttacgaaaatatccttcattcatgttcatgggagaattcttaatttgggtgaggaacacgtgggcaagaaagtgggctgctggtggagttcataaaaaatgggaatgtttaattgtaaggtcagaatatttatttgatttataatgtaactaggattagaagaatattatgtcccctatataaagcagtaatctatttagtttaaagctatatattgggacctacccacaccccaanannnnnnnnnnnnnnnnnnnnnnnnnnnnnnnnnnnnnnnnnnnnnnnnnnnnnnnnnnnnnnnnnngtacctannnnnnnnnnnnnnn

SEQ ID NO: 132157 - DNA, 480 bp, Arabidopsis thaliana
  unsure (1)..(480): unsure at all n locations
ggagtggacttagacttagagagataacagataaaatggcgacggggacggcgacggagaaaccgaagatcgtgtggaacgaaggaagacatagattcgagactgatgatcacgatgccttcatagagtacaagatgaagaatgacggtaaagtcatggatctggttcgaaccttcgtaccgccgtcaaaagcaggacttggtttagcttcgcatctatgcgtcgccgctttcgaacacgcctctgaacactctttctccatcatccccacttgctcctacgtttccgtatccttccctcctctactcaaaaagtttgagatgaatcagattcttatgaaantatgtccgtgtttttgcaggaaacgttttcttcatcgnttacccaacgtgggcagaatctgggtgcactcaggaggattatttccaagnaccctcaaagtctngcantcttnatcaagtcccttctttaaaagccttt

SEQ ID NO: 132158 - DNA, 811 bp, Arabidopsis thaliana
gctgagatttttacagaagggggatgtgagcattaagttggacgagcaaaagaatgaaagcctcacgcaactcaaagaaaatgagatgttaaggacgaagttgaagcacctggctgatcaatttatgctttcagaacaacaacatgagcaaaggttgaagcagaaagcacttgagctacagatctctgctttaaaaattaaacagcacgaggagaaactcatccatgaacaatctcagatgaaagtttacgcagatcatgtttctcagcttttgtctactgagaaaaatttgcggttgcagctgacttctgatggagataaattccagcagttccaggacgcgttggttaagagcaatgaggtgtttgaaacattcaaacaagaaatcgataagatgtcaaaagcaatcaaagaactcagaaaagaacgcgcattcttgaaaaacaaaactgagaagtcggatatcactctcatagaactcgtcgaagagcgtgaaagattgaagaaactgttggagaagccaaagaaacagaaagccaagcttgaatccctttgcagatcccttcaagctgaaagaaaacagaaagaaactaacagtgctgattctgctgttcaaccatgaaacagagagagactatgaattcagtgttttgctctctttttttctttgtcagagttttgaactaattagcacttcagattacaaaactacaattagactccaaattcactttaaaatgtagaaacatatcacatcatattgattctgctcttttgcgagctaagtccattttatctcacaaaaaaaaaa

SEQ ID NO: 132159 - DNA, 829 bp, Arabidopsis thaliana
  unsure (1)..(829): unsure at all n locations
nnnnnnnnnnnnnnnnnnnnnnnnnnnnnnnnnnnnnnnnnnnnnnnnnnnnnnnnnnnnnnnnnnnnnnnnnnnnnccacgcgttcgcccacgcgttcgcccacgcgtncgtacggctgcgagaagacgacagaaggggaagtagagataaaagaaagtttaattagctcagattcagctcatgcaacgtcctaaattaggtcagattcagtgattagtgataagtagtaacagagagatttattaagatgttgtcgtcgtcaacagtttctttcatgttattttttcctcatgttttcgatccatatgaatgaagctcttggtgctcaaattgaaatccgcaaactcgaagagacgatggtgatgaggaggaacaagaaaggtaatggcttcgtaacctccaaaatagatgttccaccaagcgcatcacaacattgcgggggaggtaaacgttttaagaacatggcgaccactaatcgacatgatgatcagctcagtccacttccaggaggcgtctcttgctccctctgtataggatgcggtaccacccaacgttgtgtaggggccgtaggcaccccacgctcgacgtgcacttgcactataatctggaaacagggggaaatatacctggccatgatcaggcataactttgaatggacatctattgtccatcctatatatgaatgatggcctaagccgaacgggtttgcggttctatctttttccgttaaatgaggggggtggcaaattattttttttagattatttagggggaattaaccctttcgggttttactttttcggcggaaaaaaaaaaaaaaaaacaaa

SEQ ID NO: 132160 - DNA, 445 bp, Arabidopsis thaliana
  unsure (1)..(445): unsure at all n locations
atgatgatcagttcagtccacttccaggaggcgtctcttcctccctctgtataagatgcgttaccacccaacgttgtgtaggggccgtaggcgcgccacgctcgacgtacacttgcactatcatctcgaaacagtgtgaaaatatacctggccattgatcaggtcataactttgaaatgcacatctatgatctattcatatatatgaatgtatgtactaaagccgtagtgggtttgcgttttctatcttttttcgtttcatattattgggggttgcaatatatatttttttatagatttattcagtgtaaaattaatacatatacatgatatatactatatatctgctgaatatggaaaaaaaaaaaaaaaaaaaaaagcggccgctctagaggatccaagcttacgtacgcgtgcatgcggcgtcatagtntaagtatagtgtc

SEQ ID NO: 132161 - DNA, 1019 bp, Arabidopsis thaliana
  unsure (1)..(1019): unsure at all n locations
tacggctgcgagaagacgacagaagggtacggctgcgagaagacgacagaagggggtataaaaaagtgacactctctggactgttgaatttcatagatggtctatggtcaagctgcggtgacgaaaggatcataatcttcacaaccaattacaaagagaaactcgacgcggccttgctgagaccaggacgtatggatatgcacatccacatgtcgtattgcacaccaagtactttcaaagctcttgctttgaactatcttgagatcaaagagcaccgccttttcagcaagatcgaggaaggtattgaggcgacagaggtcactccagcagaagtagctgaacagcttatgagaaatgactctgtagacaaggttcttgagggtttgattgagttcttgaaagtcaagaagatcgaaaacgaacatgataaggccaaaacagagaagcaagagttggagaccaaganaaagcccaaggagggaacagattccgtagtcaagaaagaggttgatgaacagctagtgaggaatgaccgtgttgataaggttcttgagggtttggtcgagttgttaaaagccaagaagatcgaggacgaccaagataaagccaaacatgaggaggttgaccaacattaacttgtgagatatcaatacctaaatcattaaatcgccagttactgtctataatctacagattcatttataaacctagtcctaagataaaataatcttagtgagattgagaccaaaaaagggaaaaaattgaggagatcagataaaacacctctgcatccgagtggtagctgtaaagagaagagcacgtgtatttatacaaaactatgcgtttagcttgttttttctctctgttttttttctaactttttttagcacaatttgttttaagctactaaaaaaaaaagtttgccgacaaaaaaaaaaaaaaaagnnnnnnnnnnnnnnnnnnnnnnnnnnnnnnnnnnnnnnnnnnnnnnnnnnnnnnnnnnnnnnnnnnnnnnnnnn

SEQ ID NO: 132162 - DNA, 781 bp, Arabidopsis thaliana
  unsure (1)..(781): unsure at all n locations
gccggcacgcctgcaggtaccggtccggttttcccggggggagcacgggttcgtacggcgagaagacgacagaagggtacggctgcgagaagacgacagaagggtacggctgcgagaagactacagaagggtacggctgcgagaagacgacagaaggggggataaaaaagggaccccttctggtttgggggggggcananangggcgatggncaagctgaggagaccaaaggatcatgatcggcacaaccaattacaaagagaaactcgacgcggccttgctgagaccaggacgtatggatatgcacatccacacgtcggattgcacaccaaggactttcaaagctcttgctttgaactatcttgagatcaaagagcaccgccttttcagcaagatcgaggaagggattgaggcgacagagggcactccagcagaaggagctgaacagcttatgagaaatgactctggagacaaggctctggagggtttgatggagtccttgaaagccaagaagatcgaaaacgaacaagataaggccaaaacagagaagcaagagttggagaacaagnaaaaagaccaaggagggnaccagattccggtagtcaaggaaaganggttgatgancagcctagtgagnaatgncccgtgttgataanggtccttaagggtttggccganttgttaaagcccagagntcgggggcggcccangttaacccancctgggggggtnnccacnttacttgggganccaacccaanncttaancncnntaccggcct

SEQ ID NO: 132163 - DNA, 404 bp, Arabidopsis thaliana
gaaagaagagatggagaatactttgtcgccgttgttgtcaccgtcgccggcaagtgaagtcgctgcgagagtatcgtctttgttcgtttatccgatcaaatcatgtcgaggaatttctctgtctcaggcagctctcactcccaccggatttcgatgggatcgaaactggttgattgtgaattctaaaggaagaggattgactcagagagtggaaccaaagctttctttgattgaagtagaaatgcctaagcatgcgtttggagaggactgggagcctgagaagagctctaacatggtggttagagctcctggtatggatgcccttaaggtctccctagctaaacccgacaaaatagcagacggtgtctcagtttgggagtggtctggctccgcactagatgaag

SEQ ID NO: 132164 - DNA, 733 bp, Arabidopsis thaliana
ggtctcagcgccgcgttttttctctcctcatcctctcgacgaattcctctcaagcttgcttcttccatttttctcttagaccaatctcgctttcgcatccctcctatgccatcctctcgaaacgagacccatttctgtgttctcaacccagaaaatgccttactacgaatttgaatatgtcaagaacgagacaagggcattctatacaaatgaacagaagacatcttcttatgaaagaaaggaagagtttttcgataaattattccgataagttcagagatgattctatgagtagcgaggagatgcatacagatgctttggatgtggagattattccgccagattcacaggacattcgtaattcacagaactctgctgtctccaacacactacaggatgataggccaaagtcttttagaaataggtttcttgaccactatctacgcagcatcaatcaaggcttttctatcggatttacatctgttttgatcattgttggttccattattgaactcagaagatcttaccatgcctacaatgtaatgccgagtttaagcaaagcgttaaagagatatggcgtataaagggagattggagaaacagaagaacttatagatatattattgtcgtttaaactttagaagtttctgtagctcttttgattagtagattaggcattagataatttgtattaagaaccaaaacacatttccatcataatattagaagactt

SEQ ID NO: 132165 - DNA, 579 bp, Arabidopsis thaliana
  unsure (1)..(579): unsure at all n locations
cnnnnnnnnnnnnnnnncactagagggacagctggtacgcctgcaggtaccggtccgttttcccgggtggacccacgcgtccgcccacgcgtccgcccacgcgtccggctgcgagaagacgacagaagggggagtttctgtgaactcaaaaaaaaaatcaaatcctttttgagtttcaatctctgagagtttctatgaaacaatcgtcatggggttgcacaatcttcatccaattatctctatgtctcatcatctatgtgtctctgcattcgggtcacccattcttcttctctagtgacgacggtgacaatgccacacctctagatcttcatttcatctccgttgccggcggtttcaggcctcttaaccaccaaactcgccttctccgattgatggagaaagttgcagaaacttacaaggccaaatttgttgtgagctcaagtgaacaaggagaagaagatccattcctgcaaaatgcgactcgactgtcttcttcactgaaacttccatggtacactagaatgaaagggatctggatttttcagagagcccattcaaatgccctttggggggatcctt

SEQ ID NO: 132166 - DNA, 792 bp, Arabidopsis thaliana
  unsure (1)..(792): unsure at all n locations
nnnnnnnnnnnnnnnnnnnnnnnnnnnnnnnnnnnnnnnnnnnnnnnnnnnnnnnnnnnnnnnnnnnnnnnnnnccacgcgtccgtacggctgcgagaagacgacagaagggggagaatagagagatagaacagtgaagaagaaatgggaaggatattcacggtggagcttgaaggaagatcttacagatgcaggttctgcagaacccatctcgctcttcccgatgatcttgtctctcggtcgtttcattgccgtagaggaaaggcttacctcttcaaccgttcggtgaacataagtatgggtcctctagaggaaagactgatgctttccggtatgcacaccgtagctgacattttctgctgctgttgtggacagaatgttggctggaaatacgaatcagcgcacgagaaagctcagaagtataaagaaggcaaatttgttctggaaagaggagggatcgtggatgaaatcgatttatcaactgaggtttatatcgatactcatggtagcacaagcgacacagaagattcttaaatgttaccttttttctgtgtgtttgtcaagagcagagcttgttagtgtagaaatctgtagcatgtttatagagatgtgtatcaaacttgttgtgttgtttttatatctcgtagaaattttatgtgaattcgaatctttatttttacccccaaaaaaaaaaaaaaaaaaaaaaaaaaaaagcggccgctctagaggatccaagcttacgtacgcgtgcatgcggcgtcatagctnntagctatagtgtctggttcaatt

SEQ ID NO: 132167 - DNA, 492 bp, Arabidopsis thaliana
  unsure (1)..(492): unsure at all n locations
ggaagaagagcaacgagggcgagagatatcttcttatccatggcggctattgctagtctgcaagcagttaatctcacatttaggcgacgtagcactcgatgtggaattgctgagccgagcggagagccagctccgatggggctgaagactagatacgaggatgggctggtggagagagtgttcatgggtctcttcgcgaggaagatggacaagttcgggtcgaagaagaagaaggacacgaaggagaagggtttttgggagtacgattacgagagcttcgtggaggtgtcaaagagagtnatgcagggacggtccagagtgcagcagcaagaggccgtgagggaggttccttctctctcatgctgcctccctggtgcttccttaaccaanttttaggcaatttgttcccacccaacggaattggcntcaagagttcaaatncccntctttnaantgcctttttttttacttngtggttagcccatcntaang

SEQ ID NO: 132168 - DNA, 776 bp, Arabidopsis thaliana
  unsure (1)..(776): unsure at all n locations
nnnnnnnnnnnnnnnnnnnnnnnnnnnnnnnnnnnnnnnnnnnnnnnnnnnnnnnnnnnnnnnnnnnnnnnnnnnnccaggcgtccgcccacgcgtccgtacggctgcgagaagaaacagaagggggagagagtttaaatagaaaacgaattacttgtgtattcaaaccaaggaaagaaaacgagagaggtacgtagaagaaaatggctgccttatcagagaaagaggctgaagcttatctcgacgcaaggcctagatatccgatcgattggtttaagaaaattgccgcacggacacaggaccacaaatttgcttgggatgttggaactggtaatggtcaggctgctattgggcttgtggagcattacgagaatgtagtggctaccgatataaacgaagcacaacttcaacgagcaatcaaacactcaagaatcagttaccatcacactccaacaacgatatcagaagatgagatggtggatctactcgggggagaaaactccgtggatctcatagttgctgctcaagctgtccatttcttcgacctcaacgtattatacaatgttgcaaaacgtgttcttcggatagaaggaggcctaatcccctgttgggtatacaacgatatcattatctctcatgagatcgatcccataatgaagcgccttgtcgactctactttcccttttagaactcctattatgaatttatcatatgaacgggtcaagacattgacattttcttttgagaccatanggatgggttccgaaggaaagccc

SEQ ID NO: 132169 - DNA, 391 bp, Arabidopsis thaliana
gactgaaagaaaaaaatgaacaaactctccaacgctttctctgtcctggctttcgccgatgaagatgctccaatggcttcttcttcttccactgggaaacaagaagaaagtgtaaatgggtcacttgaggatggagattacaagcaaccacttgtttggattgacttggaaatgactggattaaatgttgaagttgacaggatattggagattgcatgtataattactaatggagatttaacacaatcagtggagggtccagatttagttgtacgtcaaacgaaagactgtttggataaaatggatgactggtgtcaaactcatcatggagctagtgggttgacgaagaaagtgctcctcagtgcgataactgaaagggaagctgagcaaa

SEQ ID NO: 132170 - DNA, 447 bp, Arabidopsis thaliana
tacggctgcgagaagacgacagaagggtgttcttaaaatgggctgcaacgaatctcggatatccatccttggcagagatagaagctgctccaccaacagctgagcttgagcccattcgttctgactattctcagctcgatgaagtcgacatgggaatgacatatgaagagctttcagtctatggaaggatgaggaagatattccgttgtggaccagtatctatgttcaagaatctatgttacaagtggggaacaaagctaagcccagcagaagtagctgagaaagtgaagtatttcttcaaatattattcgatcaatcgacacaaaatgactgtcctcacaccgtcttatcacgctgagagttactccccagaggacaacagattcgatctgaggcagtttctgtacaacagcaagtggccataccagtttaagaagattgacgaga

SEQ ID NO: 132171 - DNA, 597 bp, Arabidopsis thaliana
tatacgactcttatagggaaagctggtacgcctgcaggtaccggtccggaattcccgggtcgacccacgcgtccgtagaagacgacagaagggtacggctgcgagaagacgacagaagggtacggctgcgagaagacgacagaagggtacggctgcgagaagacgacagaagggtacggctgcgagaagacgacagaagggggccgtcaaaggttaaacagtcgaaacaatggagattctgaagcttgatgtagcgaagtttccagaaattgaggatacaatcgaattaactaacccaaagagaaacgacgaagtagaagattgcgacgaccaacagaagcagcagctagctacacaagaagatgaagaggaagacgaattgagaaagcttctgctttcagatattggagaacttccgatttctcctccttcagctacacaagtcaattttgtttcttacttcatcacagattttactaaatcgggtcatgatcaatatatttaccgtcacgctaatggtttgtgtgtaattggattggctcctacgcatatagcttttaaggatgaacgtggaatcactagtgtcgatttcaatgt

SEQ ID NO: 132172 - DNA, 431 bp, Arabidopsis thaliana
ggagactttcgtgtgcttatccaaagacgacgagaggagtcccaagaagtctagcggtatcaatcaaatctcttcttacttgaggagattccttggaaccatcaagaggaagcattatggctggggaacttatttcgtttggtatacaaaacctgtggaacctactgagtcaagaatgcgagctatttcagggagtcgaagatcaagtaactgaactaaaaagggatctaaacttgttaagctcttttctgaaagatgcagatgcaaagaaacatacaagtgcggtggtgaaaaactgtgttgaagagatcaaggaaattatctacgatggagaggatacaatcgaaacatttgttcttgagcaaaacctgggaaaaacacgtggtatcaagaagagtatcagaagacttgcttgcattattccagatcga

SEQ ID NO: 132173 - DNA, 761 bp, Arabidopsis thaliana
  unsure (1)..(761): unsure at all n locations
nnnnnnnnnnnnnnnnnnnnnnnnnnnnnnnnnnnnnnnnnnnnnnnnnnnnnnnnnnnnnnnnnnnnnnnnnnnnccacgcgtccgtacggctgcgagaagacgacagaagggggcacaaaagatgtgttagtagaagaagattggagtgaattgaggaagcctagtgtagtagcttctgaagatttctggactaataccactttagatatggaaagcaatgctcacgggagtgtttcttcaatcagtacaaccaatctgactattgattctcaaggatgtggttccagctctaatgaacctgctgaatttgttaaccatggtcttgtgctatggaatcaaactcggcagcaatgggtgggagataaaagatccgagagccgtaaaagcgttggtcgagaaccgattctaaatgagaatgtgacttatgagagtctacttgggagcaacaagcgatttccgaggcctatacctcttgatgaaatggtgcagtttcttgttgaagtttgggaagaagaaggtctatacggctaaaagattctttttacacatttacaattgtaaagagagctgagaaaaatatatacacccaacaaaaaatatttgttgatggatcaaattttataaaattctcttgatttggagtaatttccccaaaaaaaaaaaaaaaaaaaaaaaaaaaaaagcggccgctctagaggatccaagcttacgtacgcgtgcatgcgacgtcatagtnaactantagtgtcagctaaatt

SEQ ID NO: 132174 - DNA, 737 bp, Arabidopsis thaliana
  unsure (1)..(737): unsure at all n locations
ctactacgattcactatagggacagctggtacgcctgcaggtaccggtccggattcccggggcgcccacgcgtccgcccacgcgttcgtacggctgcgagaagacgacagaaggggattctcagtgtcctgaagaacaccaatcgtcctgtaaaattctggtttattaagaattatctctctcctcaatttaaggatgtgattccacatatggcacaagaatacaactttgagtatgagctgattacatacaaatggccgtcctggttgcataaacagaaagaaaagcaacgaattatttgggcctacaaaattcttttccttgatgtcatatttcctctctcattggaaaaggttatatttgtcgacgcagatcaaattataaggacagacatgggagaactgtatgatatggatattaaaggaagacctctcgcgtatactcctttttgtgacaacaacagggaaatggatggctataaattttggaaacagggtttctggaaagaacatttacggggtaggccataccatatcagtgctctatacggtgttgacttggttaaggttccgagagccagcggcaggagataatcctaaggggcattctatgagacgcttaccagaggatcccaacagtttgtccacctaggtcaggatcttcctaattnttntnagnaanctgtcccatatttctantnncccaagnggnggttttgggttnaancctggtttgga

SEQ ID NO: 132175 - DNA, 832 bp, Arabidopsis thaliana
  unsure (1)..(832): unsure at all n locations
nnnnnnnnnnnnnnnnnnnnnnnnnnnnnnnnnnnnnnnnnnnnnnnnnnnnnnnnnnnnnnnnnnnnnnnnnnnnccacgcgtccgtacggctgcgacgacagaagggtacggctgcgagaagacgacagaagggggattgaggtttttctcttcccctgaatcgctgtgctcgttgtgagagagtgagagatgtgtcctcgagctactcaaacatgccgaaatctgcgagaaggttgtatccaaatacaagtgtccttcttgtcttgttccttactgctcattgggttgtttcaagatacacaaagagactccatgtgctaaaccgtctgatccttcttcaaccgaagaaaagccagcttctccagcaaaggaagtcccggtgaaaagacctgaggaagctaatgatgttgaacagaagacacagcaaaaggctagtgctgcatctccagcgaaggaaattccggtagcaagaccgataattggagaggaagaaaagtatcttttagaaaagacacagttccaggctttcgcttcttctagggaaattccccgaggctctaaaaggtnaaccctcttcagaaactcatctagcaggattgatagtttcttccaaccctttacaggaactccatgaagccctggggatagaaaccttccccgaatcacaaaccagattttttcaacttttccaaaatcaatgacagcaggagtgggtccctttaaactccaggagatcttgcttatgtttccgatctaggttgaaaaaggtcaaaaaagttactcgctttaaaacgcccgtttggttcaccnnnnnnnnnnnnnnnnnnnn

SEQ ID NO: 132176 - DNA, 504 bp, Arabidopsis thaliana
  unsure (1)..(504): unsure at all n locations
aaggctagtgctgcatctccagcgaaggaaattccggtagcaagaccgataattgtagaggaagaaaagtatattttagaaaagacacagttcgaggctatcgcttcttctagtgaaatccgcgaagctctaaaggatgaacctcttcagaaactcatctacagtattgatagttcttccaaccctttacaggaactcgatgaagccatgggaatagaagcattccgcgaattcacagacaagattttatcaaacatttcgaagagtaatgacgaccagtcagtgtagtcgcttcaaaactcccagtagtattcttgcttagtgtattcgttacatagtttgagaaaagtttcagagaaatgtttactggctataaaaacgagccgttttggtttacccnnnnnnnnnnnnnnnnnnnnnnnnnnnnnnnnnnnnnnnnnnnnnnnnnnnnnnnnnnnnnnnnnnnnnnnnnnnnnnnnnnnnnnnnnnnnnnnnnnnnnnnnn

SEQ ID NO: 132177 - DNA, 666 bp, Arabidopsis thaliana
gaatctcggagaagggaggaaaaatggcggccaaaaccctaatcaggtcaggagcttcgttgatgaatcggtttctaacgaagccgacaacgaatatcgtgcagaacaatctcagatcttcttttcaatacatagctcctcagggacaagaaatcccgccgtattttttcccgtcgttgtcgaatctacagagctcactcatttcgcgccctaacgacactgcttcgctccaggaactcaacgaacgtggatttctttacccttctggtcttccttcactcgaattcttcttgccagaagttgatccttcaagtgagccattgcttctgtttcctaagaggacattccaaccaagcactataaggcgtaaacgggaccatggattctttgctcggaaggcaaccaaaggtggacggagagtcatagctcggagaatagcaaaagggcgtcacagagtcccagcctagaatctctctaatctttccattgatgaatctccggttattcaggctagaaaacctgaaacttccatctcctaaataacttgtcttcttatccatgttctcatgtgttgttgatctcagaattgatctgaagttaaaattttaacgatctcagctcttttgtaatggatagtttatatcaatgaatccctttttcctcatg

SEQ ID NO: 132178 - DNA, 497 bp, Arabidopsis thaliana
  unsure (1)..(497): unsure at all n locations
nnnnnnnnnnnnnnnnnnnnnnnnnnnnnnnnnnnnnnnnnnnnnnnnnnnnnnnntccggaactcatgggtcgaccacgcgtccgcggacgcgtgggagacgacagaagggatcccggggtatatacctttacttgtgaacatccttccaggaccgatgattccccaaatgatcgacgcgttgtagaacactacatccccagggcaagtccacggactactctttgggagcatatctgtgttacagatgttctcgactgaagaaagcaaccaccatgtggtcccgagggagacagttgaagcaacaatagtcgcaacgagttgaacgatgaacatagatctcggaggaatcttcatgtagtggccaagtttgaagtctccgacaaagtacaaggcttgagctatactcacagaaccataagtcttaaaagccacattggcaagtggctttcccggatacaagaacccgatgatcagtccgatataacattaagacc

SEQ ID NO: 132179 - DNA, 419 bp, Arabidopsis thaliana
ggaagttgcagagaatctagcgagaccaatggctactctggtctcgtctcaaacttacatctaccattgtcatattagtaaacaagctctttatcaggcaaaagaatcatactctcatcgtagaatttcccgtcataatcacagagaaagactcgatttttctcatagaaaccatagattgacaataactagaaagcagcaacctttgtctttcaacaccgtgtgttttgccgcagacgagccctccgaaatcagtgctgatgctagaatccgtagtgaggttctgtctccgttcagatcagtccgtatgttcttctacctcgcctttatagcaagcggttcattaggaggactaatagccacttctaggctcataggtgccctggcgaatccggctagatcaggtgaagttcttgaga

SEQ ID NO: 132180 - DNA, 555 bp, Arabidopsis thaliana
  unsure (1)..(555): unsure at all n locations
gatgcgacgacagaagggggagtgcaagagtccatactctccatcagagagactcaaatccaattctccttactgcaacagctcaaatttggaatcttttgtaaaaacccagatcagcggatctcgaatggcgaagcacacggcagcgttgaaggtgggactagctttactggccctcagcatgattggctacatacttggtccaccgctctactggcacctcacggaagccttagccgtttcagccacttcttgctctgcttgcgtctgtgattgctcttcgttgcctcttctcaccatcccaactggactcagcaatggttcattcactgattgtgcaaagcgtgatccagaggtgaacgaagacacagagaagaactacgctgaactttttaacagaggaactgaagcagcgtgaagcagcatcgatggagaacacaaacgggtaggcacgggtctnctngaggccagaaggtaacatnatnttccnaaggggnnaggttaggntaatngggnnttggnctttttaagagcaagaagaagcgggaanccntc

SEQ ID NO: 132181 - DNA, 382 bp, Arabidopsis thaliana
gactgtatgttgacaaattgaatagtctctgatgatttcgatcagaagagaagccacggggggaacgctagcacttaaaggacgaaagctgtgttagtattctctccactgtaaaggacaagatgtcccagaagcgaaatcttccttcttggatgagttctagggatcccgagattactccgagtaagtctcattgtaagaagcctaaggatgaaggaccaaccgaagagcacaacagtagaaatgccccttccaacaagtcagaacacgccgagccaagttcatataccactgaattctctaaacttatggaaggcgttgtttttgtactttcgggctttggtaatcctgagaggagtacactgacgtcacaagccttgac

SEQ ID NO: 132182 - DNA, 575 bp, Arabidopsis thaliana
  unsure (1)..(575): unsure at all n locations
ccccgttnccngntnttnncccnnaaggncnccgcggggntcccccgggggntctcaaattccccaagcgtttggtccaaggctggatttccccacggcaaccaagtcctgttggatgttcatcgtgcaattcaaagggtcatgtggaatgcaaatggtgtgcgggtacaggattcttcatccttggtgataacatgctttgccaggttccctcaaggaatacttcatgtgtaatctgctctggacagggttctgctagctgtagcgattgcaaaggaacggggtttcgtgccaagtggttggaaaaacctccagtgccaacataactgatgaacaaaagcaagttaagctttttggtctttgatgatttcttatggaggaaaaatgtttatatattgattcaagtggaacatgaatcagatatgcatatatctttatacatgtgttaagtatatatatgtaagttcatttattcatttccccttgttctgtctgtacnnnnnnnnnnnnnnnnnnnnnnnnnnnnnnnnnnnnnnnnnnnnnnnnnnnnnnnnnnnnnnnnnnnnnnnnnnnnn

SEQ ID NO: 132183 - DNA, 435 bp, Arabidopsis thaliana
aaaaataaaataaaataaaaataagccaaagacaaatttaaacctccgatttcaaccttctcggcgaagaagaagaagaagaagagaaaatgacgatttgcatgtgttgcgattcacatctcgtagcgaaatcgattctaaatccatggaattctcctaggataatgaagctaggtttcgtaccagtcgttcgccgttttccagctactactaccgtcaaggcttcggcggtggattcacctgagagttcttcaaatttcgccaagcgtatggatcgagcttggattatctcacagcaaccaagtcctgttggatgttcatcgtgcaattcaaagggtcatgtggaatgcaaatggtgtgcgggtacaggattcttcatccttggtgataacatgctttgccaggttccctcaaggaatacttcatgtgtaatct

SEQ ID NO: 132184 - DNA, 543 bp, Arabidopsis thaliana
  unsure (1)..(543): unsure at all n locations
nnnnnnnnnnnnnnnnnnnnnnnnnnnnnnnnnnnnnnnnnnnnnnnnnnnnnnnnnnnnnnnnnnnnnnnnnnnnccgggcgtccgtacggctgcgagacgacagaagggtacggctgcgagaagacgacagaaggggggaatccagaggttttgtttctgaatggaaacaagtttttgggagttttgattgtgcctccaacaagtttcttggcatccaacaggaaggggatgcaaagaagtatgtgggtgttccgggcatgaactctatatctaaggccttgtgtaatgagtctggtgttaagagtatgtttggaactggtattgccaagatggaatggttggaagaagagataccatggttgttgacagattcaaaaggagaaaatttgggtcgtttcgatggagtggttgcatcagataaaaacattgtttctccaaggtttactcaagtaactggactcccaccgcctctggacttaagtctagtcccggagttggcgactaatgctgcaaaacattcctggttctacatgcttctct

SEQ ID NO: 132185 - DNA, 426 bp, Arabidopsis thaliana
cccacgcgtccggtacgattctagtgggtatggtgagcctaaactggctctgatcaggcggtggatcaacggtgttgttagtcggaaagtgaaatatctcggtgttttggatgattcatgtgataattatgagttcgagatgcctccaaccctttacacttgtgagaccttagtatacttaacgctcgatggactatccttggctagtcccaagtttgtttctttaccttctcttaaagaactccatctaagtatagttaagtttgccgaccatatggcgttggaaacactcatctcacagtgcccagttctagaaaacctaaatatcaacaggagtttctgtgatgattttgaatttacatgtgtgcgttctcagtcactattgagcttcactcatgttgcggacactgatgaaatgttgaatga

SEQ ID NO: 132186 - DNA, 503 bp, Arabidopsis thaliana
  unsure (1)..(503): unsure at all n locations
ttttacgacagaaggggggaatggctgggcaagaagcaagtcctgcttccttgtttcagttatatgttgattatgggcgtcttacagaggcaactaatttgctacttgagtacatggaatcatttgcttcatcgaaaccagcagaggtattgaagaggaaaaaggtatccggagtttggtttccgtgcacaacagtagaaagactatggtgggagctagagaaaacaatgaactcaggacgaatggtggagcaatgccataagctgaaggaacaacttcatcatgcattactcaatcacttaaaactgcttaaggtggactcaaatgatgctgtatcctctgcaaccggttaaagaaagtcttgattgttccgtgtgaatattattatatctgtatcaaaatcgtatcaggcttttgtttctcgttagtctttgtgtcatcaaaacaaatcttgcatcgttgataaactcgaaagaccaatgtaatctaaattctcttanccc

SEQ ID NO: 132187 - DNA, 512 bp, Arabidopsis thaliana
  unsure (1)..(512): unsure at all n locations
caagtccataggcccgcttgagatcaagattgttgagccagggacattcgataagctcatggattacgcaatcagcttgggagcatcgattaatcagtataagacgccgagatgcgtgaagtttgctccaattatcgagctattgaactcaagggttgttgatagttacttcagccccaagtgtcctaaatgggttcctggtcacaaacagtgggggagtaactaagatggaatgtggaacgtgaagagactctctttgagctagaaggtttgggacttggacttgcaaatgatgatgtcttctctaatcttaattttagtttaatcttttgttcttttttttttgttatccttttaatatccatagtccctgtgggtttgaaaaccagttgtacaaaaggcaaatcatgttttctccaaccaactctcaaaaaaagttctaaaacatccaaatttttctattgtttnnnnnnnnnnnnnnnnnnnngggagtggcnnnnnnnnngtaccta

SEQ ID NO: 132188 - DNA, 501 bp, Arabidopsis thaliana
  unsure (1)..(501): unsure at all n locations
agtgtgtataaacaaggaagggccagtgataagtcccttgggcccttggaaatctagatggtcgagccagggactttcgataagctcatggattatgcgataagcttgggtgcatcgatcaatcagtccaacaccccaaggtgtgtgaagtttgctccgctccttgagcttttaaactctagggttgttgatagttacttcagccccaagtgtcctaaatggtcccctggtcccaagcaatgggggagtacctaaagaggaaaccttggggaagaagaaagactctctatgaagtagaaggttctgttttgtaatccaatcaatatcgacaaaagtgataaattactatgtccgtttgttccaatctaaatcttaatttaattttgccttactgtttttgttttgaaatatgtttagattctagtcacacgtacataccccaaaaatctcacctaagcgactcttttaagtnnnnnnnnnnnnnnnnnnnnnnnnnnnnnn

SEQ ID NO: 132189 - DNA, 405 bp, Arabidopsis thaliana
ggaggacactgtgcagatcactacggctcattcacaggctgtgttttctgattcctacccgccttcgtcttgtgtgtttaaagagaatgttgttcagttcatgaagccattgttggagttttttcagcagattgggtctcctttttgtttgaatgcttacccttttttggcgtacacttataatccgaaggagattgatatcaactatgctcttttcaagccaacggaagggatatatgacccgaaaaccgatttgcattacgataacatgcttgatgctcagattgatgctgcttacatggcgttgcaagatgctgggtttaagaagatggaggttatgatcactgaaactgggtgggcttctaaaggggattcagatgaaactgcagcaacaccagagaacgc

SEQ ID NO: 132190 - DNA, 600 bp, Arabidopsis thaliana
tacggctgcgagaagacgacagaagggggagttcaaaaattcaattcaaagaataatttctttccataaaaagattgttgtggattaacttctttcttaaaagaatctcatacccgtcgaatcttcttcttcaacctttttctgcgtttttaatattttccctacaaaaagattctcaaaatcgttttacataaacccgatcttgtcaatctccagaaacaaaaaaaaaaatggcgatcaagacaaagactagtctaattccaagttgttcatcacctgaggatctaaaacgcgttttgcaaacgctaggttcgagctggggagatgtagttgaagatctggagcgtcttgaggttgttccgttaaaaggagctatgactaacgaggtttatcagattaattggcctactttaaacggtgaagatgttcatcggaaagttcttgttcggatctacggtgacggcgtttgaccttttctctaacagaggtgatgaaatcaaaacgtttgagtgtatgtctcatcatggttatggtcctaagcttcttggtcgtttctctgatggtcgtcttgaagaattcatacacgccagaactctttct

SEQ ID NO: 132191 - DNA, 777 bp, Arabidopsis thaliana
  unsure (1)..(777): unsure at all n locations
tnnnnnnnnnnnnnnnnnnnnnnnnnnnnnnnnnnnnnnnnnnnnnnnnnnnnnnnnnnnnnnnnnnnnnnnnnnnnccacgcgtccgcccacgcgtccgtacggctgcgagaagagacagaagggaaagttgacgagaagagaaacagtacccatagaaactctgctatgtcaaaaaagtctgaaagtgcggttctccgagtatcaccttgcatggatcagaaaggagctgaggttaaagttaaaccagtggagcaaaatgataaggcaaagaaacgggaactacaagagaagaatcaccgcagggacagtgtgacaaagagtgataagccattgggtaatgaagggataaagaaaagtgaaccaaaaaacataacaaatggaagtagtaaagagaagaaagaggagaaaactgaggtgataaagaaaaatggtcaggagaaaccaaagtttgtagagggaggacccagattagagagagaacaagacgttgtgggtactagggattttagagtgcatgactttccaacagcaggcgtcgagaaccttactgctgagaagattcttggcaaacggaaggatccttggacaaacggattgctggatggtgagtccttccctgacgaactcttttttcagtgaaatagatatatatatggcggggcgcccaaaaagagaaagtatatgttgtgtacctaggcttactcttgggacgagtgatggcttatatatatacgttatccattttcccaacaaaagacncttaacgacaagggg

SEQ ID NO: 132192 - DNA, 539 bp, Arabidopsis thaliana
gggtaatgaagggataaagaaaagtgaaccaaaaaacataacaaatggaagtagtaaagagaagaaagaggagaaacctgaggtgataaagaaaaatggtcaggagaaaccaaagtttgtagagggaggacccagattagagagagaacaagacgttgtgggtactagggattttagagtgcaagacttttcaacagcaggcgtcaagaaccttactgctgagagaattcttggcaaacggaaggatcttgagacaaatggattgctgtatggtgagtccttccctgaccgaactcttttttcagttcccatagataatatatatgtcttgtcgtccaaaaaaagaaaaaagttatatgtgatgtaccttatgtcttactcttgataactcattgatgtctttatatattattagtatattcattttcccaaaaaaaaaaaaaaaaaaaaaaaaaaaaaagcggccgctctagaggatccaagcttacgtacgcgtgcatgcggcgtcatagctctatctatagtgcagctaattcaag

SEQ ID NO: 132193 - DNA, 406 bp, Arabidopsis thaliana
ggggaagttgaaaatatgaaaattgtaaatgacactgtaatgttgtgtgggaatctgaatgcagatgaagctacgcaggcgacacctgagcctaataatgcagaaccgtatccagactataacctggtggtcacagagagggaaacaatcatggaggttgatgagccggatccagatgatcaagaaatccagaggatccaagactctgttaccatcatctctaaccgtctcaagaaagccataaaggccttgagaaatgaagtcagccccggtcaagcaaccactgtgttacaaatgcttctcaaaatagtcaggaacatcattgaacaaccaaatgaaatgaaattcaaaaggctgcctaagggaaatcctgcaagtaggcgcaacattctcaactttccagctg

SEQ ID NO: 132194 - DNA, 458 bp, Arabidopsis thaliana
cgggtcgaccacgcgtccgtgcaagagacgacagaagggcagggatcagcggatgttgcttataggactccgctggcaccttatgagaaatcaaagtttttaggtttaatggggaggaggatgtggtggcggaagtggcggagatggaggagatttgccggaaaatggaagatgggcttgaggggttacagagaagagttagagaagtgtttcataggttggtgaaaagcagaagtgagatacttgaagtgattgatcactgattgtaatcttttaactttgttgttgtgaaaatttaatctttgagttaactcttttgattaagaaaagagaacaaattacaggtttttattgttttatttatgtgataatctttgatgtatataaattacaattcgtaattaaagaaagataatgtataccccatgtttaatactaagattgcaaaactattgccg

SEQ ID NO: 132195 - DNA, 605 bp, Arabidopsis thaliana
  unsure (1)..(605): unsure at all n locations
anatagnanaanagttcgtgtccgtnnaancccggactttccccgcgataaactggaccntngacncngaccccttcttgattcccatcnccagtcttttctttctcaccacttcccctcactttctcgggaaatatccccacaaactttcatcatccaccgtcaatacgcagctcaattggaccgagactccgacggctcacgttttcaaagcgtatcttccgggagtggatcaagacgaagtgattgcgttcgtagatgaagaaggatatcttcagatctgtactggcgacaacaagttcatgagcagatttaagcttcctaacaacgccttgacggatcaggtcacggcgtggatggaggacgagtttcttgtcgtgttcgttgagaaagatgcttcttcgtcgccgccacagctgccggagattgaggagaatcgtaacgtgagagttgtggaaatcaccggcgatgatgattaattaagtgttacatgttgtcgagatatatgtgaattaaagggaaacttaaaagtttagtgtactaaatgaacaagttaatcgcttgtttaggttgtgttaaaaaaaaaaaaaaaaagggcggccgct

SEQ ID NO: 132196 - DNA, 554 bp, Arabidopsis thaliana
  unsure (1)..(554): unsure at all n locations
gccgcccgcgacgtcgcgagaagtccactaaaccagaatagagaagaagaagatgtcgatgattccgatcagcaatcgccggagactatctcccggcgatagaatctgggaaccatttgaactcatgaacacctttcttgatttcccatcaccagctctctttctttctcaccactttccctcactttctcgagaaatattcccacaaacttcatcatccaccgtcaatacgcagctcaattggaccgagactccgacggctcacgttttcaaagcgtatcttccgggagtggatcaagacgaagtgattgcgttcgtagatgaagaaggatatcttcagatctgtactggcgacaacaagttcatgagcagatttaagcttcctaacaacgccttgacggatcaggtcacggcgtggatggaggacggagtttccttgtcgtgttccgttgagaaaagtggtttttnggtggccgcaaaagtttccgganatttagggggattgtnacggtgnanttttggaaannncccggggttnntggttattaagggtt

SEQ ID NO: 132197 - DNA, 677 bp, Arabidopsis thaliana
  unsure (1)..(677): unsure at all n locations
actggtatggcggagaaagctatggtggttctgagtagccttgcagcgatagatgatggcaaagaggctattgtcgaggaaggagggatcgcagcgcttgttgaggccatcgaggatggatctgtgaaagggaaagaatttgcgatcttgacgctgttgcagctttgttctgatagcgttagaaaccgtgggttgcttgtgagggaaggcgcgattcctccgcttgtgggcctctctcagagcggctccgtcagtgttagagctaagcgcaaggcagaaagacttctggggtatcttcgggagccaaggaaggaggcaagttcatcaagcccatgaaatgcaaccatgtggaggtttcatcagtctagtatgtatatactgagtgtatgtttggtgggttttgtatagcgtcttttgtgtagactgtaaaagagagatcaaatgattaccagaaacttgactgacttttgatctctctcatgtattgatggttaagctagtttttgaggagtttcaagggagagtgcttatggatttggtttacaagtctagcattcaggttttggcttctggtttgtgcagggtgggtggattatgctgatttttaaggcaanaagctttgtagtcagcgtcgggcaaatggtcttgttcaagaactaagcaatttttaatcgatt

SEQ ID NO: 132198 - DNA, 736 bp, Arabidopsis thaliana
  unsure (1)..(736): unsure at all n locations
gtctagggccttgacggaagagcatgccagagacagctttgagaatcttctctttagcgtttgtcgattcagagagctcacaggctcttacccacagaatataacagtagtgagttatgattttaaggacgagagatttgcgcatttgcatcgttcagcaatgggatttccggaatcaagatttttctacttaggaacaccagcttctctatcatccaaagaagacgctctaaaaggcgaggctttggttagatcacaatttcaagaagatccatacggatgtgttggttcgctttggcgtaagaagctgaatcgtgaccctttccataggactataccttaccctattggttgccctgaaattggaggattgttcaggtactgtggttcagctccttttcctggctctctcccatggggctaatctgtataagatctatacttaaagaggaatcaatacttgatcaaagagcttgttggtagagaaactctttttctttttgttactgtccaacatatttagattatacagaaaacttcagaatctttgtattctgctttcatgtgttgtcgaaaaaccgagaattttacttgtatcaaatgcaatttacgtaaaataaaattttgacatttctatccaaaaaaaaaaaaaaaagnnnnnnnnnnnnnnnnnnnnnnnnnnnnnnnnnnnnnnnnnnnnnnnnnnnnnnnnnnnnnnnnnnnnnnnnnnncattc

SEQ ID NO: 132199 - DNA, 754 bp, Arabidopsis thaliana
  unsure (1)..(754): unsure at all n locations
nnnnnnnnnnnnnnnnnnnnnnnnnnnnnnnnnnnnnnnnnnnnnnnnnnnnnnnnnnnnnnnnnnnnnnnccacgcgtccgtacggctgcgaaagacgcagaaggggagggctgtgaccatcgaccatcgtcgtcttcgcggagctcagttgaaagatgttaacggctgatataccaccaaatcagtcaatctacataaaacatatcaatgagaagatcaagaaagaagagctgaaaaggtctctttactgtttgttctctcagtttggaagattacttgatgtggttgcgttaaagactcctaagctccggggacaagcatgggttgtttttactgaagtcaccgctgctagcaacgctgtccgtcagatgcagaactttcctttctatgataagcctatgcggatacaatatgcaaaatcaaagtcagattatgttactaaagccgaagggtcttttgttcccaaaagaaaagaagatgaagcaagaagagaaagtttgaaaaggaagcggacatgctgcaagaaactccaacaacccaggcatggcttaatgggcgcaacttactcagaacgggattgcctggggcctccttttccagccgagttggggaagacccgatncccccaaacaacattnncnttcattcaaaancttcccattggggcgatngnttgatgnctcaggnggccttttgggaattcccnggttccaagggttgaatgtngggnaacccgnatgngtttggggtta

SEQ ID NO: 132200 - DNA, 794 bp, Arabidopsis thaliana
  unsure (1)..(794): unsure at all n locations
aatctggggtttatggttaaattgggggacgncgacccgccacnncacctgggtggcnnanccccccnccnaaaggggccgtcgnacacgtatctcgggttcnaagacatcctcaagaaaatcgggagaagagttgnccgttccnccccccgaaatctgangggngccctatttcctacccacatncgggcggaagaaggaacacgtggagggaagaatcaacccgttggaatatgcgttgacctttcaaaggaaataagcgtggaacaagttgacgcaggcgttgcaagaagagactagtatggatgatgttgtggtctgtacacgccatccttcaaacggcaagctgtttcctctttcgtttgcaacttccacctaatagtggaacaatgcatgtcattctagtaccctcaagtacttaacggcaagctgtgtggttcccctttatttcgaatgtattatataagtagactagtagttgaagtattaggctcaagattgagagtttggtccttgcctagttgcctccattagatacgagtgtggaattaatcatagaaagttcagatagactattattgtggatttgatttaatctttcattttattgtacataagcttattttgtaaacgaagcatttaagtttcgtcctcccattttttatgtgaattcgccataaaaaattgtttgtactataaaagttttttttttttttttttaaatattaaagtgtaacccaaaaagaaaaaaaaaaaagggcgaccgctctagaggatccnagcttacgtacgcg

SEQ ID NO: 132201 - DNA, 576 bp, Arabidopsis thaliana
  unsure (1)..(576): unsure at all n locations
ggagagtttgcggatgaagatgatgatgttgaagaggaggatgaagaatctggtgaagggtaccttgttcagccagtctctcaagtggaagatcatgatgctgtgggtaatgacatcgagccgatcaatgaggacaatgatccanatgaagaagaagaagtcgaagatgacctgccaattcctgaccagtccttggcttcatcatctcgcccaaagagaaaacgagatgacgatgatgacggtgaggatgatgacgatggtgatgaggaacgttgaacatacagatcagaatctctagtttgatgagttttagatgggaaagaagctcggctcccttctttgattcaaggcggctttatcttgaaatgttcaaaatgtccagttattgggcaggctcggtagattttcaaatgacgggtacccagccttggatttttcccccccttttagaaacccccctttttggggggaaagaaaaacacactaacacacaaaggaagagtttcgagaccttgtttctctgttagagggtcttgtaagaatgcttatgtggataaatcttttgagttatatcgt

SEQ ID NO: 132202 - DNA, 494 bp, Arabidopsis thaliana
gctggtacgcctgcaggtaccggtccggatttcccgggtcgacccacgcgtccgtacggctgcgagaagacgacagaaggggggagtttcaggtagtctccatcgttcctttgtcaggaacaaaccaacgactcaaaatttaaccagagatggtggaaggtgaagaacagaggaggatcacacacttggatctgagaaacgagccccagtttccaatggttttcgttagagaatcgacttgtttcgctaaggacgatctcgctatcttcccgccgatcaaccacgagaatctctacgtcaacggactcgaatctccgtcggtatcatcctcttcttcatcttcctcgtcgagactctcagattcgtccttctctccgtccgattcagacgaacaatttcaatttagccggaaatcgcattctcagccatcggaggatgtcgggaaatctccgtggaaatcccgaattgagattgatattatccaacgttggtgg

SEQ ID NO: 132203 - DNA, 762 bp, Arabidopsis thaliana
  unsure (1)..(762): unsure at all n locations
attcgccattgaggctgacaaagcctttcacgaagagtataagataaagaagaaggtgaacctgttgccatacgcagcgtgggtgaggaacgagacgttatcgtttgagatcaatcacgatccgggaaaggaagtggaagccaaagcaaagggcagggggatgggcagaatccagccggttaaagacgacagaaggggtgacttagctggagaggtgaatttgattcaagggtttgatttcgctgactggttgaagaagagtgtgagagagagggactttgttgtgatgaagatggatgttgaaggaaccgaattcgatctgatcccgaggctaatcaagacaggagcgatttgtctaatagatgagttgttccttgaatgccattacaacaggtggcagagatgttgtcctggtcaaaggagccaaaagtacaacaagacttataaccaatgcttagagctcttcaattcgctcagacaaagaggggtgcttgtccatcaatggtggtaatggttaggatgctgcataaaagtctccttcttctatgcatttggtgaaaaatgtactttcttcttctagaatatataaagcgggatattgtaggtttctattaaaaatacgttgtctgtgctgaaattcccttttactgtaagaaaaaagaagtttagctttaaatggaaatttgagtttctttccgggggatcccctagttttaaaacggccgcccccccggtggaggtcccggctttgnnnnnnnnaat

SEQ ID NO: 132204 - DNA, 491 bp, Arabidopsis thaliana
gaggaatttattgtccctataccacacgttaagcaagtgaaacttcctgatgctggagggagactcatcatagcttcagatggtatatgggatatactgtcttctgatgtggctgccaaagcttgtcgtggtttatctgccgatcttgctgctaaacttgttgttaaggaagcattgcgaacaaaagggttgaaagatgatacgacttgtgtagtcgttgacatagttccatctggtcatctttccttggctccagcacccatgaagaaacagaacccatttacctcatttctttcaaggaaaaaccatatggataccaacaacaaaaatggcaacaagctttctgctgttggagttgtagaagaattgtttgaagaaggttctgctgtgcttgcagatagattgggaaaggatcttctctcaaatacggaaactgggctcttaaaatgtgctgtatgccaaatagatgaatctccgagtgaagatttatc

SEQ ID NO: 132205 - DNA, 540 bp, Arabidopsis thaliana
gctggtacgcctgcaggtaccggtccgttttcccgggtggacccacgcgtccgtacggctgcgagaagacgacagaaggggacctaatccaataataataaaaaaagagaagaaaatttcccaaaatcaaaaaccctaaatcgaatcaaaatcctttctaataagaatgaaataacccaaaacagcacaaaccgcagcaacagcattgccttctttcaaaagaaccttaaacacaaatccaaacacttctcttgtaatcttacgagcttcaacaaccaatacccttctcgatttcccaaaaaacgcaagcagcacaaccaccgatatccagatcaccataaccgccggaaccgcaaccgcagccgccgcaaccatcgacatggctccaaacacagctcctaacaccacagatgcgtaaaccgccggtaatcttgacggagacggcgatgacgtgtactggagcttgtaccagctaagcacagatgtgagaaagttccatgaggaagccaggagaatcgcgtagacagctacaaagagaca

SEQ ID NO: 132206 - DNA, 503 bp, Arabidopsis thaliana
cggttcggaggcccgactcgacccacgcgtccgaaagacatgagtttctttttataatagtcaaatttccaggaaagaaagaaaaacccacctaatccagtagtaatctgcaaagagaagacagtttcccgatatcaaaaaccctaaatcgaatcacaatcctttctaataagagtgaaataacccagagcagcacataccgcagcaacagctgcgccttcttgcaaaagaaccttaaacacagatccaaacacttctcttgtaatcttacgagcttcaacaaccaatacgccttctcgatttcccaaaagacgcaagcaacacaaccaccgatatccagatcaccataaccgccgggaccggaacccgcaggccgccgcaacccatgggcaatcggctccaaacacagctccttaacaccacagacgcgtaaaccggcgggaatcttgacggagacggcgatgacgagtactggatcttgtcccagctaagcacagatggga

SEQ ID NO: 132207 - DNA, 604 bp, Arabidopsis thaliana
  unsure (1)..(604): unsure at all n locations
atcgactcacttagggacagctggcacgcctgcaggtaccggtccggaattcccgggtcgacccacgcgtccgacggctgcgagaagacgacagaaggggaaagttgtaagaaaaaagagagagacagagatttactcaacggctaagatgaaaagctcatcggagctccttgtaataatgattttcttattcttggcgcttctcataatctcccacgctcaatcacttccaggtacgccgtatggcggccctggtccgtatccgcgtagttaccctgtgtgttacccaccgtattgccgtccatgagagtttcaatttggtcacatgaatgaattatagtcaaatacctatatcaaggtgatgtatgtgtgtatattattatatgttttcatcatttgatggagaataaaaagcttaggaaatatatccatgttattatatgtttcagtttgtaatatgtataatgatattgctggctctgtccctttttttcgctgtccaanaataaaaaattatannnnnnnnnnnnnnnnnnnnnnnnnnnnnnnnnnnnnnnnnnnnnnnnnnnnnnnnnnnnnnnnnnnnnnnnnnnnnnnnnnnnnn

SEQ ID NO: 132208 - DNA, 889 bp, Arabidopsis thaliana
  unsure (1)..(889): unsure at all n locations
gaagacgacagaagggggaagaagttgttggatataactcggactgactcggctgagaaaaagcgagtcagagacgagtcattcgacgaagcggttcttgactcgccggaggtgaagaggttgagagatgatttattcgatgtcctggatgactcggatcctgaaccagtgagtcaagatctcgactcggttatgaaaagtttcgaagacgagttatcaacggtcaccaccacgacggcgcaaggttcctctaccgccggcgaaactcagcctgatctcggatatcttcttgaagcttctgatgatgagcttggtttaccaccacctccatcgatttctccggttccgtcgcgaaggaggaggtaacgacggagacggtaacggatttggtacgagcgtcttctgattcgtcaggaatcgacgagatttggggatttgaagatcacgtgtcgaattacggtggtttagattttggttccggcgtcggagatggtggagattacgtggctgttgaggggttgtttgaattttccgacgattgttttgacttcggcgatctgttttcgtggcggtcggagtcgttaccggcggaataaataaataacaaactttttttttaattaggtgggaaatgaaaacgatatcgttttgttaaagcgtttggctctccctcgcttttttttttaacccgatggttaatatctattaactaaaattattaggatttaggaaaagttaaatattttgtaagggtaatttgctagattagtattagcgaattcgtttgtttgttctgccagatctttttttcacacgcttttgttaatgtgaaatttcccaatgaaaaactctctttgtcnnnnnnnnnnnnnnnnnnnnnnnnnnnnnn

SEQ ID NO: 132209 - DNA, 404 bp, Arabidopsis thaliana
gagagtaagagagacagagagagagatgagtagcttcacgattccatctccttcctccttctctctttccaattcatataatcaaacctctcctcattccttcactctccgcaattctcgttccaattttgagttccaccggttacgattagatgtggagtctcgaagaagaagcacttctttacggtccaattgctccaccaaaggtacagattcaggtgaaaatgagaacaaaagtgtgttagatgctttctttttggggaaagcattagctgaggttatcaatgagagaattgagtctactgttggagaagtgttgagtactattggaaagtttcaagctgagcaacaggaacaagttcaagagattctggaagaggttcttgaaagagctaagaaagcta

SEQ ID NO: 132210 - DNA, 636 bp, Arabidopsis thaliana
gccagcactatacgactcatttagggaaagctggtacgcctgcaggtaccggtccggaattcccgggtcgacccacgcgtccgtacggtgcgagaagacgacagaagggtacggctgcgagaagacgacagaagggtacggctgcgagaagacgacagaaggggagttccctccgttgcttggaatcaacactggacatggaaaacacaaatactcagacaaaggtctagcagctgttttcgagtctcacttgaaggagctaaatgctcctttccatgaagccccagataaggttggctggtttttgactaccagtgttgcggcaaaggcatggttggagtctagacgctcagctggaggagtttctgcgtagcccttgtaattggtatgtagctttgatattgtctatgtggcttcgagctttctccactatttagttttctttctcctgataccggatactggatcaggaaagattttgtaatgctagcaaactcgggttatacacattttgaaacaatttagagaactgattaagttccaaaaaaaaaaaaaaaaaaaaaaaaaaaagcggccgctctagaggatccaagcttacgtacgcgtgcatgggacgtcatagcactctagtagtgt

SEQ ID NO: 132211 - DNA, 575 bp, Arabidopsis thaliana
tacggctgcgagaagacgacagaagggggaggaagagaaaacaaacctttaactgaagaaagagtttgagtatggcagcgtcgaccataggtagaggttcatcggaggataagccggggaaaagaacatctccggtgactggcaagcccacaagattccccaactgaatcatcgataccgccggtatagcaacgtatgtaatcccggcgatgtcatggatctttatactcccgttgcaatttgcggtgttgcatgaactccaagaatcggtaaataaaggagtcgatatcattaccgaagcttgcaactcactcgtctcgaatcgacaatcgtccatgattggatatcgagtagagagttgcagaacgatgatgtttatgaagttgtaaatatattacaagcaaaaagaaattatctatgtatcttcttggcttgttcctatgtaatttcttggttttggtctttgctaagtcgtcttcttcaaagtctcttactttaacatcataatttagtaaaattgggctggtcccgtaaaataataataaagaaatcccgtgaaaggtaggtcctttctc

SEQ ID NO: 132212 - DNA, 545 bp, Arabidopsis thaliana
ctggtcgcctgcaggtaccggtccgttttcccgggtcgacccacgcgtccgcccacgcgtccgtacgacggctgcgagaagacgacagaagggggatacattagtcgaccgtcgcgcattaatactggtgtggtggttccgttaacgagcaacggcgatgaagagacctcgacctacatctcagccgtcgatctcttccaccgtcaaaccaccactgtctccgccggtcacaccgattctcaaacagaagctacacagaacaggaacacctaaatggttcccgttaaaactaacccacacggagctgacgttgccgttaacttttccgacgggtcaaacattccggtggaagagaactggagcgattcagtatagcggaacgattgggcctcacttagtctctcttagacaacgtccaggagacgacgcagtttcctactgcgtccattgtagcacaagccctaaatccgcggagcttgcgttgctcgattttctcaatgctgagatcttcgtagctgagctatgggctgatttctcgaaaaaag

SEQ ID NO: 132213 - DNA, 813 bp, Arabidopsis thaliana
  unsure (1)..(813): unsure at all n locations
ttatttgacgacagaaggggggcttcaatccgttgttggctcccattaattcgttccaagcaatcttcttcgatctccctcgtgttggatggcacattctttgagtttcatctccaccaacttgaacagttcagtccttaaccatcatcagtgccagagtttcggaacgtttgtgtcgtcgccatttaaacgaaagaggagatttgcaagaagcattagagctttacaagagactgaaggtccaacgccaagaagattgatagacattataagatctgttcctgaaatctctaggaattacttcaagaagccttcaagaagaacgctttttggaggaatctcgttgttaggtggcttttatgtcgcgcagactatctctctctcgtttggagcattgggagtgaacgatgttattgctgcggttctatgcgttcttttgacagagtatgtgacaagattctattatagccgcaccacagtcacatttcctattgctctgctcaataatttcaagatgggtttcacttatggtctcttcattgacgccttcaagctggctagctaactgtttgcaaaactgagtcaccagagatcccaagctcgtgtatttacttgttttttctcctccaaatgtaatattttgttgtcataattttgtagtgaagcaaccaaaaactttgaagttaaagagaatctgtagtatgctccnnnnnnnnnnnnnnnnnnnnnnnnnnnnnnnnnnnnnnnnnnnnnnnnnnnnnnnnnnnnnnnnnnnnnnnnnnnnnnnnnnnnnnnnnnnnnnnnnnnnnnnnn

SEQ ID NO: 132214 - DNA, 704 bp, Arabidopsis thaliana
  unsure (1)..(704): unsure at all n locations
gctggtgtcgcatccgtggaatgtttaacgaaggtccatggntccactgaggacggcccatgcgtcttcttgntangttgggngcgatatctcaaaggcgttaaaatgaggagctctcgttgcttgccacaagtcggtttatatcgtgtacacatgctaggggatgttagctcttccttgttggcaaagacgagtatgatgaacttgctttggcagaaacctcctatatcataacagcggctgtgaaagacgtatgtggaaagccgcctacagagcgagtgtttttggataaatatggaaggatttgcttgtgccttgatgaaatcgtttggaacggacttctggagaacaccgacaaagacaggatcaagcgactcatcagattgaaacctccttctgaagtttgatatgctccaaccaaccacacattcttcttctactcattttaagagctttctcattctccaccgattgttgtttgttgaatcacttctctatatcacatattcacccatcaactactgctgttgttcgatcagtccatcttgtagtgttgttttttaaatcttcagtttttagtgttacataccaaagaacaaatttctatccaaaggcttttccctgcggtttaaaaaaaaaaaaaaaaaaaaaaaaaaaaaagcgcccgctctagaaaatccaagcttacgtacgcgtgcatgcga

SEQ ID NO: 132215 - DNA, 551 bp, Arabidopsis thaliana
aagctggtacgcctgcaggtaccggtcctgtattcccgggtggacccacgcgtccgcccacgcgtccgtactgcgagaagacgacagaaggggggagaagtagaaatcgataaaggcgaagaaggaatcgcaaggaaggaagaaacttgagaggaagatcatgatcctagctgtgttgttcgccaattccgttgggaatgttttaatcgaaaggttcaatggagtaccagctgaggaacggctccgctggcgatctttcttggttaagttgggagcagataatctcaaaggcgttaaaaatgaggagcttctcgttgcttgccacaagtcggtttatatcgtgtacacaatgctaggggatgttagcatcttccttgttggcaaagacgagtatgatgaacttgctttggcagaaaccatctatatcataacagcggctgtgaaagacgtatgtggaaagccgcctacagagccagtgtttttggataaatatggaaggatttgcttgtgccttgatgaaatcgtgttggaacggacttctggagaacacg

SEQ ID NO: 132216 - DNA, 860 bp, Arabidopsis thaliana
acgccacgctctaattctattcactatatggaaagctggcacgcctgcaggtaccggtccggaattcccggggcgcccgcgcgtccgctgagagaagaccacagaagggaattcataaaagaggaaattcagaggattaaggcgaataatccagacataagccacagagaagcattcagcactgctgccaagaattgggcacactttcctcatatttcactgtggtctaatgctcggagagtaacaagcaagctaagatagcctaataattctcgagattaatggtaatataagtgttggagacttcgaagtaacaagagctgagaaggcaactatatgtattggatgatctttggaaccgtatgtatgtaagggaagatgtctatctttaaaaccatctataggttaaaatttaagaaaagcttcttctaatttatttctatgggcccttgtttgatgggtcggctcacaggaattatgggtcctttcggattttgaatctaaataaaaaaaatggatttatattatggaaacctatttttcctggattataaaagtaaatttgccatggccaaagaagaattataaaaaaaccccaggcggccgcttaaagaaccaagttaccttccggggctgcaattataatttttttaggggacctaattcaattacggcccggggttaccacggggaatgtggaaacctggggtaccaactaaacgccgggagaaaaccctttgcggggggtaaaggaaagagcccaccatacccttcaaaggtggcctcctatgggaaggggccccctttggtaataagcgggggggggggggaccgcaaggaccctccttcccctctacccc

SEQ ID NO: 132217 - DNA, 453 bp, Arabidopsis thaliana
tttctgctgacgacagaaggggagactttcagaagaagaaaaaacgaaggagaagaagaacaatttcgcggattcaagagacagagagcttcttctgcgtaaagtctgatctttgaaaatgacggaagaaccagagaaggtgtcttcttcagtattacatcaaccttctggtgataagaaacctgaagatgttgggatcaaacctcaggatccagcgtcttcttctgggtttcgagcttatcctaatggtgattctccaatgtacccggttttttatccgggtcttgttcccggatccaatcctgtacagtacgaggaacaaatgaaccgtggagctgggatctatgcggttcctgttcatcaatttggaggacatgtcgctggtcttccctcaaattatcttatccctctcacttacaatgttccaacgactagaccaaataatgaagctga

SEQ ID NO: 132218 - DNA, 491 bp, Arabidopsis thaliana
  unsure (1)..(491): unsure at all n locations
gactgaaaacagaacaaacacaaacacaaacagagaatcaacgaagaagaaaaatggtgaaggtgatgtgggtttccgttttagctctggcggcggcgattctccttttgacggtcccggtggcagaaggggtgacgtgctcgcctatgcagctggcttcatgtgcggcggcgatgacgtcatcttcgccgccatcggaggcgtgttgcacaaagctgagagagcagcagccatgcctttttgggtacatgaggaaccctaccctccgccaatacgttagctcccctaacgcaaggaaagtctccaacagttgcaagattccttccccaaagctgttaagggaaatgttaatcatgattaattagtgacaagtttccgctgattataagtggttaatcctgggctttatttttggtcagtacttccttaaaataattaaatgggtttgtgtggtgtggtggttgttttccatcatcatgtcttnnatngna

SEQ ID NO: 132219 - DNA, 587 bp, Arabidopsis thaliana
  unsure (1)..(587): unsure at all n locations
caaacacaaacagagaatcaacgaagaagaaaaatggtgaaggtgatgtgggtttccgttttagctctggcggcggcgattctccttttgacggtccccggtggcagaaggggtgacgtgctcgccctatgcagccgcgcccatcggaggcgtgttgcacaaagctgagagagcagcagccatgcctttgtgggtacatgaggaaccctaccctccgccaatacgttagctcccctaacgcaaggaaagtctccaacagttgcaagattccttccccaagctgttaaggaaatgttaatcatgattaattagtgacaagtttcgctgattatagtggttaatgctggtcttatcttcgtcactactatttagaataataaatgaagtgatgatgattgatgattgatgattgatgattatcatcatcatgcttgaatgttatgttttctatcttataaaatatgaaatatccttttaaaaaaaaaaaaaaaaaaaaaacccaacnnnnnnnnnnnnnnnnnnnnnnnnnnnnnnnnnnnnnnnnnnnnnnnnnnnnnnnnnnnnnnnnnnnnnnnnnnnnnnnngcc

SEQ ID NO: 132220 - DNA, 597 bp, Arabidopsis thaliana
  unsure (1)..(597): unsure at all n locations
nnnnnnnnnnnnnnnnnnnnnnnnnnnnnnnnnnnnnnnnnnnnnnnnnnnnnnnnnnnnnnnnnnnnnnnnnnnnccacgcgtccgtacggctgcgagaaacgacagaagggggaaacaaagagattagaaactacggagagaaagagagaagatatatagccatggcaatgaagtcagtttctaccttggccgtttttgccatcctctttttggttatcgttgaaatgccagagataaaagcgcaaggtagcaagtgtctgaaagaatatggcggtaatgtgggtttcagctattgtgcgcctaggatatttccgtcattctgttatcggaactgccgtaagaataagggcgcgaagggaggtagatgccgttcgggaggggcaggagctggtagtatgatatgtttatgcgactactgcagcgacaaaccttaaatcagatcgttaaacgttttaacctcaaacgcatgagtagttgctatcttgtactatgtgccatggttcgtacctttgtgtagcaataaaggtgactgggcccccaagtaataatgaataagggaaatattaaataaagaaacgtncgactttgtgtgtg

SEQ ID NO: 132221 - DNA, 496 bp, Arabidopsis thaliana
tgggggacgcggacgcctgagtccggccggattccgggcgaccacgcgtcgaaaacacagagggggagtttgatgcagacatgctcaagatacgtaatgagtctgcaatcagtgctttatatggggatctcccgaggcaatgcacaacctgtggtctacgcttcaagtgccaagaagagcacagtaagcacatggattggcatgtaaccaagaacgggatgtccaagaaccataagcagaacccttctcggaaatggtttgtaagtgctagcatgtggctcagtggtgcagaagcacttggagctgaagcagtaccagggttcttgcccacggagccaacaacagaaaagaaggatgacgaagatatggcagttcctgcagatggagaccaaacttcatgtgcattatgtggtgagccatttgaagacttttatagtgatgaaaccgaggatgggatgtacaaaggggcggatacatgaatgctcctgaagaatca

SEQ ID NO: 132222 - DNA, 690 bp, Arabidopsis thaliana
  unsure (1)..(690): unsure at all n locations
cactatacatgnactatgacgccgcatgcacgcgtacgtaagctcggaattcttttcgagggaaaacgctcaaattaggctgtcagatccatcacagtaccagtcaatagttgatgcagaatggaatatcatttatgacaaactagacaaatgtgttgagagtggagcaaaagttgttctttctcgattggctattggtgatctagctactcagggttttgccgatcgtgatattttctgtgctggtcgtgttgctgaggaagatcttaaccgtgtggctgctgcagctggaggaacagttcagacaagtgttaacaacataatagatgaggttcttggaacttgtgagatttttgaggaaaaacaagttggtggggagagatttaatatattcagtggttgcccttcaggacgaacagcaactattggtctcccgtggtggagctgatcagttcatcgaagaagctgagcggagtttacatgatgcgattatgattgggagaagagctgtgaagaacctcaactggtggtcctggaggtgggagctttagatatggagataagcaagtacctgaggcagcattcaggaacaattgctgggaagtcacagcttttcatcaactcttatgcgaaggctctanatgttattccacgacattcatgtgataaggctggatttgatgcaactga

SEQ ID NO: 132223 - DNA, 614 bp, Arabidopsis thaliana
gaaggaagcgaccccatttattgaggatggggttcacgctcagaatctaatgcggagttaccgtactgcaagcactttggccctggccatgggtaaagaactcgctgttagcattgaggggaagacgtgtacacgaaaagagaggtttattggctaaatgtgctgctacgactctctcatctaagcttatcggtggagaaaaggagttttttgctacaatgggtgttgatgctgttatggccattgggaatgacgacaggctaaatctgattgggatcaagaaggttcctggtggcaatatgcgagactctttcctcgttgatggtgtagcgttcaaaaaaacattctcgtatgctggttttgagcaacagccaaagaaatttcttaaccccaaaattctcttgcttaacatcgaattggagttgaaatctgagaaggaaaacgctgaaattaggctgtcagatccatcacagtaccagtcaatagttgatgcagaatggaatatcatttatgacaaactagacaaatgtgttgagagtggagcaaaagttgttctttctcgattggctattggtgatctagctactcagtattttgccgatcgtgatattttc

SEQ ID NO: 132224 - DNA, 569 bp, Arabidopsis thaliana
  unsure (1)..(569): unsure at all n locations
nnnnnnnnnnnnnnnnnnnnnnnnnnnnnnnnnnnnnnnnnnnnnnnnnnnnnnnnnnnnnnnnnnnnntgggtcgacccacgcgtccgtacggctgcgagaagacgacagaaggggagaacgtgtaacacttttgtatatgtagataatagtagaacgaaaaaaaactctttgtagagagattctgcttctatatggctttctcttacgcatcattctctatacccttcaatggtttcgctgcaaatccgtctccgattacttccgcttttctcggcccatcattgagattctccaccagaacatcaaaaactcggaatccgagtaatggggtttcagtgaaatcgtcaaatagtcataggtttctagtcaaatctaaaaatttcagtgtctatgcaagggctgcagcagagaagtctgttcacgatttcactgtaaaggacatcgatggtaatgatgtttctctggacaaattcaaaggaaaacctttgttgatcgttaacgttgcgtcaagatgtggtttgacatcatcaaattactcagagctttctcaactgtacgaaaaatac

SEQ ID NO: 132225 - DNA, 715 bp, Arabidopsis thaliana
tacgcctgcaggtaccggtccggaattcccggttcgacccacgcgtccgcccacgcgtccgcccacgcgtccgcccacgcgtgcgtacggctgcgagaagacacagaaggatacggctgcgagaagacgacagaaggatacggctgcgagaagacgacagaagggtacggctgcgagaagacgacagaagggctggttgcgagaagacgacagaagggcaacacatacatctatacattgaaaacaaaatagtaataatcatcatggctaagtttgcttccatcatcacccttatcttcgctgctcttgttctctttgctgctttcgacgcaccggcaatggtggaagcacagaagttgtgcgagaagccaagtgggacatggtcaggggtttgcggaaacagtaatgcatgcaagaatcagtgcattaaccttgaaggagccaaacatggatcatgcaactatgtcttcccagcacacaagtgtatctgttacgtcccatgttaaatctaccaataatctttggtgctaaatcgtgtgtattttacataaaataagtctctgtcactctatgagtaactttatgacatgcatatttctgttttaatgtttattttcccgttgttgttccaataatataaaaataatttatgtaaaaaaaaaaaaagaaaaaaaaaaaaaaagcagccgctctagaggatccaagcttacgtacg

SEQ ID NO: 132226 - DNA, 451 bp, Arabidopsis thaliana
tacggctgcgagaagacgacagaagggtacggctgcgagaagacgacagaaggggatgaagggaataactctagagacagggacaaaagtactcactcagcaactgttgttgacgatctaaagtatcgtttgatggatactaccaaagagtttaaggatgttcttaccatgagaaccgagaatatgaaggtccatgaaagtagaaggcaactcttctcttcaaatgcttcaaaagaatcaacaaacccattcgttcgccagcgtcctttggctgctaaggctgctgctagtgaatctgttcctcttccatgggcaaatgggtcttcttcatcttcatctcagttagtcccatggaagccgggagagggagaatcttcaccattgttgcagcagagtcaacaacaacagcaacagcaacagcaacaaatggtcccattgcaagacacatata

SEQ ID NO: 132227 - DNA, 1301 bp, Arabidopsis thaliana
  unsure (1)..(1301): unsure at all n locations
gaaatgcagagtccatcagagaagattattgggaaaagttcaatggctacttcagtagatattggnttgatggatgattttntcgagatggaaaagctcgctgctttgccgcattctgaacctggaagaaaacattcagagagtaacaaggagttagagaaatctaatgctcacgttaaccaactaaagcatgaaccccgcgcctggcttcgcagaatttctgaactggaagaaaaagtagagatggtagaggtagagaaactacaattggagatggctttgaacggatccaaagagcagatcgaggcattgcagagtcgactaaaggagatagaggggaagttatcggagatgatgaaactagaagcagagaaccaggaactagagttgttgttgggtgaatcaggaaagcaaatggaggatcttcaaagacagttaaacaaagcacaagtgaatctgtcagaactagagactagaagagcagagaagctggaactgaccatgtgtttaaatggaacgaaaaagcagcttgagacatcgcaaaatcggctaaaggagacagagagaaagttaacagagcttcaaactctgctgcatctaacaaaggatgcaaaagaagcagctgaggatggtttaaaggctgcaaacgggaaaactgaagcgattgaatcaagacttaaagatgtcgaagcagaagcggaatctttgatcttgaaaatcaagtcactggaagacgtcacagagaaggaacgtgctttatcagcaagacacaattcaaagtgcaacgaactgcaagatgagatctcaagactaaaacaagaactcgagcatcatcaagaaacagagcctgcgcctaaccatatcaaaggttttgagctgaagcaggagaaggaactagcagtggctgcttcaaagtttgcagagtgccagagaaccattgcgtcgctggggcagcgattacagtcactagctacatttgaagatttcttgattgaatcttgaggagcaggagcttcgtgaatggtgagaagaatgaatagactctgaaatgtggatgatgttgatgagcagtttatctgcaaaagagacttggagatcccattgatgaacataaaagtgtagtagagaacacatgaacaaaaaggagtctctgtatacatgagaaagtaaacaggattgagattatttgtccatagaagccatggaaagagaaggttattgtctttctaaaaaaagggcggccgctttaaaggatcccagcttacgtacgcgtgcatgcgacgtcataggtttttctaaaa

SEQ ID NO: 132228 - DNA, 587 bp, Arabidopsis thaliana
  unsure (1)..(587): unsure at all n locations
ganccantnnccctctgcggttgccccncaccaaacctgtgaatttcgggggaacacttggaaatgagagaattttcattgatgaagactttgctaaaatcacagtccgtcatcatgcagttgataaaacttaccagtcaggctctcttttcccaaaccagggttatttaccagtagaggctttggttctagatattgaagcatgggggttaggtggaaacaaggctagggaaattcaacaaaaataccagaaaagagaagagcttttcactaaccaacgtcgaaagatcgacttgaaaacgtttacgaactgggaagattcacctgagaaaatgatgatggatatgatgggtaatcctaatgctcctagaaaggaagagaggtaatgaatgaaagacgagaactggtttgatatatacacacatatacgttgttgtctcttaaaatatatatgcaagaaactccttttgctgttcatgagctcttggattcaatgtgtaagttatgtatactagtgttgccttttcttgaaccagccagttgatttgatatttgcctataaaaattggtttttattaaaaaaaaaa

SEQ ID NO: 132229 - DNA, 386 bp, Arabidopsis thaliana
  unsure (1)..(386): unsure at all n locations
ggaagctttgaggaggcaatcggagttatctgagttagaaaaacagtctttaaggaaacaagccataaaagagagtaaacggatacaggaactgtctaaggaagttagttgtctcaagggtgaacgtgatggagctatggaagagtgtgagaagctcaggttgcagaatagtagagatgaggctgatgctgaaagcacattgagatgcatcagcgaagattcgagtaatatgattgaggagattagagatgaactgagttgtgagaaggatttgacgagtaaccttaagttgcagttgcagaggacacaagagtcaaactctaatttgattcttgctgtganggatctcaatgagatgttggagcagaagaacaatgagatatctt

SEQ ID NO: 132230 - DNA, 533 bp, Arabidopsis thaliana
  unsure (1)..(533): unsure at all n locations
ctcgtgggtcgacgcaagactctatactgattcgtattagacagaaggggacaccgtgaaaggcaatggagtcggctaaatcaatcatcggtggccaccaaaatgtcatcctgatgcgtcatggtgatcgactcgacaatttcgagccactctggacttcaacagctgcgagaccgtgggatccaccgcttgctcaagacggtaaggatcgggcctttagaactggtcagagaatccggtctcaacttggggttccgattcaccgtgtcttcgtctcccctttcctccgctgcatccagaccgcttccgaagtcgttgccgccctctcagccgtcgatttcgatcccattgctatgtcatctaaagacgtgctttccatcggcaatactaagatcaaggtggctattgaatttggattgtccgagaaaccggacccaatcttttattcaagagtgaaggttgcttccaaagattggggaaattttggttnnaagatttcagntctttnaagntnttttttccttaaggacaag

SEQ ID NO: 132231 - DNA, 688 bp, Arabidopsis thaliana
  unsure (1)..(688): unsure at all n locations
tgatctnnnnnnnnnnnnnnnnnnnnnnnnnnnnnnnnnnnnnnnnnnnnnnnnnnnnnnnnnnnnnnnnnnnnnnnnnnnnccacgcgtgcgtgcggctgcgagaagagacagaaggggaaggcaatacattttacctaagagaacagaaaaaagacacttagcaggtgaaacaatgtcgtttagaaaagtagagaagaaaccaactgaaatgggccgaaacatgacccacgagaagtcggactctgattcggacaacgaaggagcccccatgactgttggaggttacactgaattcgttgcccgcagcgactctgactgggacgaaccggtttattctggcaaagcccgttctaattataacctcaccggcaccgcaaaaggaactggtcccatcaatagcttcagccgcaaacacttccctaattactaatcatatgggcagtgctacgtaaaagtgagaaacgaagacatgcaggctcactagctagttgaataatgcccatataaattatgtactatgtctgaatgtaataaataagaatccaaggatggatgatgacgcatgaacatatcaatgattatagtctcattgtgctttcaaaaaaaaaaaaaaaaaaaaaaaaaaaaaaaaaaaaaaaaaagcaaccgctctagaggatccaagcttacgtacgcgtgcatgcga

SEQ ID NO: 132232 - DNA, 539 bp, Arabidopsis thaliana
attttacctaagagaacagaaaaaagacacttagcaggtgaaacaatgtcgtttagaaaagtagagaagaaaccaactgaaatgggccgaaacatgacccacgagaagtcggactctgattcggacaacgaaggagcccccatgactgttggaggttacactgaattcgttgcccgcagcgactctgactgggacgaaccggtttattctggcaaagcccgttctaattataacctcaccggcaccgcaaaaggaactggtcccatcaatagcttcagccgcaaacacttccctaattactaatcatatggccagggctacgtaaaagtgagaaacgaagacatgcaggctcactagctagttgaataatgcccatataaattatgtactatgtctgaatgtaataaataagaatccaaggatggatgatgacgcatgaacatatcaatgattatagtctcattgtgctttcatgcagtatttatacaaagcacttatggaatgagtatgttacataactctacctatacttctattga

SEQ ID NO: 132233 - DNA, 884 bp, Arabidopsis thaliana
caatgaattgtaacaacagaagaagatcaagacagctgcaaaccacacaagcttacttgtccgttatgtcgtggacatataagagaatgggtagttgttaaagcagctcgatgtttcatgaactcaaaacatagaagctgttcttgtgagacttgtgatttcagtggaagctattccgatctgagaaagcacgcaaggcttctacatccaggagttaggccatcagaagcagatccagagagacagagaagctggaggaggctagaaaggcagagcgatttaggggatttacttagcacactccaatcttcttttggaggagatgaaataagtaacgatgatgggtttctatttgctgatactcgcttgcttacagtgtactttctcatccgcgtgtttagaccagaatcgagtggctcaaggagtagtagctggtctggtacatctagagctaggacacatacaagtgggagaagaagatcttcaagacctgcaagtctttggggagagagctatgaaggtaatacaggaacatcacctagagatgaggagaataatcaatcttctgatgaacaagtgtctggaactcggagacgtcgttctagaagaagaactgtcattgatgatgatgatgaagaagaagaaccgtgatgctctgcagtttggaaatttggtctttggagtttatgataaaatgggggaaaccttgtagtaataaccccacttatgaaaccctattatgtaaaatttctttggagattgaaaaaagtttctactattgggaaaaaaaaaaaaaaaaaaaacaaagggcggccgctctacaggatccaagcttacgtacgcgtgcatgcgacgtcatagctggtctatagtctaaagggaat

SEQ ID NO: 132234 - DNA, 748 bp, Arabidopsis thaliana
  unsure (1)..(748): unsure at all n locations
nnnnnnnnnnnnnnnnnnnnnnnnnnnnnnnnnnnnnnnnnnnnnnnnnnnnnnnnnnnnnnnnnnnnnnnnnccacgcgtgcgcccacgcgtccggctgcgagaagacgacagaaggggaaggaaaaatagaaacaaaaaatggggaattgtttaaggcatgaatcagaaatgcattgggctggtgaagactgggatgaattcatcacagaagatgaagaagatcatcattatagctctaaaaccacaagagatggcaaaccagtaattgtaacacgtgacagtaaatcctctgttccatctcatgagatcaagatcaggctcacgaagaagcaactccatgatttactgagtaaagtcaacgtccatgacttgaccttccagcaacaaaccttctcatgtccaatcctgaacaatcgcgggtacgaagaagtcaatcaacaacggttatggagaccggttctacagagcataccagaagttaactgagttttgttttcagagatggccatgtttgtatatgcttagggcttcttcactttcttgatatgtgttagggtaagagttttgatgtaaattttggtttggacacatgacgcttctgtttttgtttgttagaatgtaaataaaaaagcataaaagccccaaaaaaaaaaaaaaaaaaaaaaaaaaaaagcggccgctctagaggatccaagcttacgtacgcgtgcaggcgacgtcatagtcttctatagttgcttcctaa

SEQ ID NO: 132235 - DNA, 739 bp, Arabidopsis thaliana
ttccgggttgagcacgcgtcccacctctagttcaaggccaccaagaatccagaatcatctaagacactggcttggcacacaagtgttggaaattgaagattcatctcctgaagtaagggtcttccggggtcccagacgtgttgaaaatgatgtatctgatgtgaatataagacaaatagaagcagatgagatactggcccgtgaattacaagaacagctgtaccgagaagagtcgttgatcagacacgagcagatcgatgaaatcatagccaggtcgatggaacaagaagagaattctctccgggcttcttctagtcgtgcttctactcgtattacccgaagctctaataccatcgcagcaaatccacgtgggagaagtcgcctggaagcacgactgcaacaacattcttcaaggaggcgattcaatcctccacaggcccgtgctcctgttagagcaccagcacggggtcgaggttatcgtttaggcggtgcatctgcttcactacgtacagctctgaatttcagttttccaattgatatgggcttagactcgaaaatggatattctggaggaaatagagaatgctattggacacttcattaccagtagtaatcttctttatatggatcgggactttactgaaaatgaatacgaattgctggtagcttttgatgaaaacaaccttcgacatggcggggcttttgctaatcgcattaacaacttgccagagtctacagtt

SEQ ID NO: 132236 - DNA, 708 bp, Arabidopsis thaliana
  unsure (1)..(708): unsure at all n locations
attcgactcactttagggaaagcacgcacgcctgcaggtaccggtccggaattccacgggtcgacccacgcgtccggcgagaagacgacagaaggggatcgaaaacaattcaatactctcttctcctgaatctctttacctttttacgttgacattgatcctcgcagtgtctgattttgatcgaagaagaagaagagatcgggattttttcgcggttgtatatcgcctatggacgaggtgatgacagcggcggacgttggttcgttaggtggcggcaatagggcgttgtacggatctcctccgtcgcataatctgtttcctcacaatctcccaatcttctccgcttttcttgccttcgctcttgctcagttcctcaaagtcttcactaattggtacaaagaaaagaggtgggactctaaacgtatgattagttctggtggaatgccttcttctcattctgctactgtcactgccttagctgttgccattggctttgaagaaggagctggagcaccagcttttgctattgcagttgccttggcttgcggtgtaatgtatgatgccnctggtgtcaggcttcaatgctggtcgcaaagccgagttctgaacaaaattgttttcaagttccccccgnggatncatttnaacagttaggcnatgnggacctgttgcaatccntccggttaacagggggttaggntcgngnta

SEQ ID NO: 132237 - DNA, 592 bp, Arabidopsis thaliana
  unsure (1)..(592): unsure at all n locations
ggagcaccagctttggctattgcagttgtcttggcttgcgttgttatgtatgatgcctctggtgtcaggcttcatgctggtcgtcaacccgagctgctgaatcaaattgtttgtgagtttcctccggagcatccattatcaacagttagaccattgcgtgaactgcttggccacactcctatccaggttgcagcaggtgggattttaggatgcgtggtagcttacttaatgaggagctcaagctagtcagtctctctacacaagaacaaatcccgaattcttttgaaatcatagacccttcaggtactaagatagattcagcgatatcaagtgacgctagattattggagtaaatggaaattgttaaatctgtgtaatatatagatgatcttagttagacttgtcattgtttaagcttacgccttctcaacattctctctctctctctatatatatatatatataatctctctatttcctcttcctcctnnnnnnnnnnnnnnnnnnnnnnnnnnnnnnnnnnnnnnnnnnnnnnnnnnnnnnnnnnnnnnnnnnnnnnnnnnnnnnnnnnnnnnnnnnnnnnnnnnnnnnn

SEQ ID NO: 132238 - DNA, 564 bp, Arabidopsis thaliana
  unsure (1)..(564): unsure at all n locations
nnnnnnnnnnnnnnnnnnnnnnnnnnnnnnnnnnnnnnnnnnnnnnnnnnnnnnnnnnnnnnnnnnnnnnnnnccacgcgtccgtgcggctgcgagaagacgacagaagggggacgaagacaaaacaaaaaaagcttcccccaagaacaaaaagttagcatagatgaagagtcttcgggttttgtagtttttgtaaaacagaaaaaaaaaaagagaagaagagatgggaggttgctgttgttgttcttcttcacgaagagctgatgtagataatggacctgcgtactactacccaagggcaacagaagagcgtgtgcctttatcttccgctcataacaggacttcctctgcaatctctactggtgttgtagtagtagacacaaacttagagacatcatctcctgatgcttatataccaccgccactgcctacccctttcgatgtgcctatagggattcctcaaacaccagctagtggtgaagaggctacttgtgttgatataagagaggtttcggtggactctgctaataccgagtctgctcaagaaacagttgatggtattac

SEQ ID NO: 132239 - DNA, 604 bp, Arabidopsis thaliana
  unsure (1)..(604): unsure at all n locations
gacgaggaagatgatgactggtgggtagcagctgcagaagagtcactaaaacaaatcgcatctctaagtccttccccaaaatgcccttgatttagacatctacctaagtcaagaccaatctggtattcataccagcagagtcatttccatcgatcctctcacatgaaaccttgatcaatcactttcggaccaatcttccgaaacattcatcaacaatcacaagccctgtccggcaaaactacaccgtttcatcaccttcctctctcctcctcatgccttcttggtcatcttcttcttctctcccttacatgggcgtcaagctcgtgacctatttccctcataactcttctcagaacttacctggcatccatggatcctacacactctttagctccactacaggccaaaccttagctacaatgggatggtactgttttaaccctttaccgtacttcctctgtttcaggcttagggatccaaaatcctaggctaggggacgatagtcaagtgctgatcatggttggttccggtgctntnggaccanacctgatcaaatcccatctagcttgcggaaccaagcttgnnaaggagtgntcatatggga

SEQ ID NO: 132240 - DNA, 860 bp, Arabidopsis thaliana
gagattggcagatagaaataatagtcgcattagagggagtggtagagacggtttatcctctgtcacggcagcagagatgtctcagactgaaacatcaaacaatctcaattctcctgtctctttggagctgttctctggttttccagaatttggcctctctggttccttattgagtcatgacagttttcgcagttataatttagatgggatctccgagattctgccagaacttgataggatcgaacaagatatcgaacttaattatgaggatctgcttatcatggaaacaggtttacttctcggtggactaagcttccatgaccaacaccgagacatgaggctagacatcgataacatgtcataatgaggaactattagctctagaagagaggattggtacagtaagcactgcttttgacagaaggaagcaattatcaaagtgcttgaaaacaaagtttctatcagatgaaacctttgagttatgggtctatcaccaaaagtcctagtgataacaaggaagatgccaaatgcagcatctgccaggaagaatatacgattggagatgaagttgggaggctacactgtgagcacacataccatgtgaagtgtgtgcaagagtggttgcggataaagagttggtgcccaatctgcaaagccacagccgaaacctcctctaaataaccgtcttcttcttcttcctcgttcgttgtattagttctttcatctaaagcctgtgaacaacaatggaacctgcgtaaaaaaggcctcaccatttcctttgtgtacataccaattcacaccggctctgtctctctctcccttttgtctaatgacaaagctatcctgtgtttctctttgtc

SEQ ID NO: 132241 - DNA, 526 bp, Arabidopsis thaliana
gccggcactaatacgactcttatagggaaagctggtacgcctgcaggtaccggtccggaattcccgggtcgacccacgcgtgcgcccacgcgtccgcccacgcgtccgtacggctgcgagaagacgacagaagggtttcgagcaaaatttctgagcaacggcgacgatgggagacaccgccttggagaagacagcggaagagctacggcatgagatcgatgagcttcaccgtcaacagcgtgagattacggagaggcttcgtgaccctcgtggactccgccgtggaggcttctcaaacgtcgctcctcgcaaccaaggccgtagaggctttcctcgacctgcggagaggaatgacgtagaagacgagcctcctgctaaaaggagattgtcttccgccgttgttaaggtcgacggtgaagatgttagtaaagatggagaatttccagttgatggtaatggaacccaggttaaagttggtgagaatgggacttctgatcaaagtgacaagaagcaatctggtcttcaa

SEQ ID NO: 132242 - DNA, 514 bp, Arabidopsis thaliana
  unsure (1)..(514): unsure at all n locations
cctttnaccccnggttaaaacntttgaccggtgtnanaaaaanacacttncncccgctnacanctgtaacaagggatnctaaanctntgaaagaatggatgtgacagccgaaagatggaaagaaagcaggatgagatnatncttattggtagtggaatccggatcagacctgtgattcaatgggatgaagaatttattggtgaaggaaaagaaggtcctatagcaaaggcgcttcttgatctgttacttgaagatatgagatctggtccaccttccgttcgtgttcttgttccttactgagccaatcactctctttgttcatcaaagacaataagctgtggcttttttgtaaagctttgctgttattgtaagttgagtttatcatggggtttttaggtatctgtctttgtaaagatttctccttatcaccttttgaattatgattgtacccattctcaaacnaattcgcggcacgcgtaattgcgnatgatncaagacttaatgcgatgaccgt

SEQ ID NO: 132243 - DNA, 574 bp, Arabidopsis thaliana
  unsure (1)..(574): unsure at all n locations
aaacgcggntccctaccnnaccagcccaaaaaatgcggnacatcncgnccaacccgnagctntcggntcgaaccaccngatcngggaaccacaaccaccaccacccccatataccancgntgcagaccaaaccntagctttgcagancctaacccagaccgtgctactactggagattacgccagcttgatgaactatcatgggtttggtattgatgattacaatcgttacgttggccttggaaaccaacaagatggcagatattctaatccccatcaattacacgactttgttgtctaaaagattcctgagcttttcacaagcttaagaactggcaatgccagttgattgggggagtatgattcttgaagcgcaagaaaatgcgctcttggcatttttatagataggggttatacaaatatgtatatctgtaatatttgttgtggcatatataaaggatagattttgtgaaaactttaggtgttagactttacatttgtatatgaaagttgagctttgtgtacactttggtaagcccatattgtgtttggttagaacctccatggtggntaac

SEQ ID NO: 132244 - DNA, 961 bp, Arabidopsis thaliana
  unsure (1)..(961): unsure at all n locations
ataccggataaggtttgcatggtctctaagacctcaggttcttcctcacagtcctttctaaagaatcatcatccatggatgtacgttgtttgatctctccaaatcttttgaactcgaagattaaagtttccggcaatactcatcacccttcccttttcttccctctccaagaaacaccaagcttcttccccgatacaggcagccattaatggaggagggagctcaaaaacagtgaagcgtctgatcactttatctcctagtgaaggcaaatggaatggaaattggaagactcagtacgatgtctctctgcgtgatcttcaactccaagaccttgttgaagatggccctcccaattcccgtgtctctgtcgacctctctgtccaaaggcacgcgagcatgggcctctcagtagatggaagaatcatgacttctatcgcaagaaagtgcagcatttgctcttctctttatcctcgactgatcgatacaagtttcaccgtctggattttgccatcaagccgggaaaatcgagcttcaacactgccagaaattggcggcgatgatccttcggtgatatatgtcagacctggatatgaagctaaccttgattcccttgtgcaagacactatccgcctcacaacttatgctaaagatatatgctcggattcctgcgaaaaatcggaaccaacactgcactacgttggtcagacaaatacagcttctgtcgataagagatggtcaagactacttgaacttaagaagaagtagaaacctttttattctttgaatctctctgttcaatgtacttcaaagtcttaaaaagattttgattctgttcatcttccaatatatacaagataatacacacatttacaagaaaaaaaaaaaaaaagggcggccgctctagaggatccaagcttacgtacgcgtgcatgcgacgtcatagttannnnnnnnnnaacga

SEQ ID NO: 132245 - DNA, 727 bp, Arabidopsis thaliana
tatacgactcactatttggaaagctgggtacgcctgcaggtaccggtccgaattccgggtcgaccacgcgtccgtccggttgcgaaaggacgacagaggattcgggctgcgagaagacgacagaagggtacggctgcgagaagacgacagaagggtacggctgcgagaagacgacagaagggggcggaaacaaaaaactaagaacggttccatttgttttcattgtctagaagagaagaagaagaaggatgtgtttggtgttcgtgtgtgatcaggacgagagggtgatcggaaggtacgcagctcctggagcgtgtccgtactgcggaggagcggttcaagtggttgacgtaaatagccagtggagattctgcttcgttcctctctctaataaatccaaacgtcgtcatctctgttccacttgcggcaaagcgactcatcgtccatgggctgaaaacaaaactcccacctcatacgagatcatttctatatgtacatatatccaaatccccgaccaaaaaaagtggatcgggtttctaaacgtttgtaaaaaaaaaaaaagaacatgtcttctcttttaagatttccctggatagggatgaatcaggattatgaaaatgagaatttttagggcaagatctttttttagcaaaaaattaaaaaaaaaaaaccccaaaaagcggccgctctagaggatccaagcttacgtacgcgtgcatgcgacgtc

SEQ ID NO: 132246 - DNA, 557 bp, Arabidopsis thaliana
  unsure (1)..(557): unsure at all n locations
acgactcactatanggagagctagcacgcctgcaggtaccggtccggaattcccgggtctacccacgcgtccgtacggctgcgagagacgacagaagggggaagtcatggaacaacaacctcatcgaagacgacgcccaaacccaaaaaaggtctacattcggagaacattctccttgacgacgaggactcgtcggctacgggaggcatggtcacaccgccagactcagatgctccgtccaaattcaggaagccacgcgcgcaccggaagaggatggaggacttggagagcctcggtatcagtagcccgttcaagaagtcttctcgaagggccagaaccccgtttacggaccaagatgaccgcgaaatcttggaggggctggagaagtacggcccagcttggactaaaatccagcgggaccctgcctttcatctacagagccggcagccgacagatttgagggaccgtgttcgcaacaaacaccccgaggtctacaagcgcatcgatgctagcaagggaagccaagcgaagaatctgacgcgcggcaacgacacgat

SEQ ID NO: 132247 - DNA, 401 bp, Arabidopsis thaliana
gagagaaagaaagaaataaaatagaataagagaacttgttgtagcagttgaagcagaaaataaacagagtaacgaatccaacatcacaaaacagaacacaaactaaaaaatggctctgaatagtgtctcctctgaagaatttaccttcccatcgctagcttctcatgattcttctcaccattccggtcttgattcacctcctttgtggaaacactcaccggttacttcctttcgccggaaagattacgactttggtttggcaagattagtcattggaaaagacggtgatcatgatcagaggaagagcttctcgtacgtggagatgagaagtcgttggatcgacgacaaagaagaggagaaaatggatatgttatgggaagatctcaacgaagaattgcctc

SEQ ID NO: 132248 - DNA, 772 bp, Arabidopsis thaliana
  unsure (1)..(772): unsure at all n locations
tgcatctcaggaaagtatatgctgcctcgatcttgtacggttacttcttgaaatcagcttccctaaggcaccagcttgagtgttccttatcagatattcatggaagcggatatctgaaaagtcccatctttggatgctcattcacaacgggcactgcacagatctccaacaagcagcagctgagacattacatctcagactttgatcccgagacattgcagagatgcgcaaaaccaaggacagaggaggcaaggaatctgatagagaagcaaagtttggctctttttggcacggaagagagtgatgagaccatagtgacatcgttttcgagtctgaagcggttggttctcgaggctgtggcgtttgggacattcctgtgggacacggaattgtatgtagatggtgcatataagctgaaggagaatgggaatgcagaagaacaagaaggaaagaaaagcatatgatgaacaagtctggttagaagaaaagcttcatgatcttctggtagtgtatatatagagaaatgtttctgccgaatctctcaggcagttgttcagttcaatgtatagatcttgcttagaaatattttgatttctgaataagaatgtggtgtggttataaggaataagagatactgtagttgggttcaattttatcgttatgtgttaagtttccttgttcaaaaaaaaaaaaaaaagnnnnnnnnnnnnnnnnnnnnnnnnnnnnnnnnnnnnnnnnnnnnnnnnnnnnnnnnnnnnnnnnnnnnnnnnnn

SEQ ID NO: 132249 - DNA, 405 bp, Arabidopsis thaliana
cataacgaaacagagtttccctgagctacatttaacgaaagaagattgtatggtcaagaaatggatcgaatctagtgttttctgggcgaattatccagaaaaagcaccgatagagttacttcttaaaagagtatcaaccaacgaatactactggaaacgtacttcagattttgttcaagcaccaatctcaaaacagggtcttgcaaagatttttcaaacaatgattgatcgttcgccacttccacgacgagtttggatgcaatggaatccatggggagggaaaatggctgagatagcgtctgatgcgacggcgtttgtgcatagaggtggtaatgttttcatgattgagcatttcatgaattggtatagacctggagatgagcttgaagagaagttcttggcgat

SEQ ID NO: 132250 - DNA, 510 bp, Arabidopsis thaliana
  unsure (1)..(510): unsure at all n locations
tcccccngacgtcttagcccggttccccccatgccgntctgggaanacccccggattgccggtctgtgggccccctgggatgaccgngtccttngatcttaccccttgcccngaccaatgaccggntcntcagncaagaccccggngttaaaccaggatttgcataattctctgtgcaggcaagaattggaccccgggattgatactttcttcttgtatgatgttgttgactctctcttcaatatcggttcagaatcttggccttgtctgctacactgcaggatgtaatttgcaaagcgaagcactggctgatttagtttctctgatagaaaagaaaagtgggcgcagtggttccgatttaattagtagtttgtatactcgaaataggttttttttgtgtggacgatgataaaattacttcgaagccaggagctatagagagatatagcaatgtaaattatgggctccaaattttatttattaattagaaaaattcagctcttctcctcc

SEQ ID NO: 132251 - DNA, 429 bp, Arabidopsis thaliana
gaatgacagtagacaagacaaggcaaagaagcaaagatcagataatccattttcatttcctcgccagaagcgttctgtaagacctcggatgtacctctccattgactcggattctgagtaatattcttcctgatttgtctgttctgttgtgtctctcttgggatgattcggtgttccttttaattcttaacgctatgcacagaacaatgaacaggatcatcagacaagacaccggagtttaaacaagatttgcataattctctgtgcaggcaagaattgaaccggtattgatattttcacttgtatgatgttgttgactctctcttcaatatcggttcagaatcttggccttgtctgctacactgcaggatgtaatttgcaaagcgaagcactggctgatttagtttctctgatagaaaagaaaagtgg

SEQ ID NO: 132252 - DNA, 660 bp, Arabidopsis thaliana
  unsure (1)..(660): unsure at all n locations
ccaggtctcnnnnactcactatagggaaagctggtacgcctgcaggtaccggtccggaattcccgggtcgacccacgcgtccgtacggctgcgagaagacgacagaagggggagacagggcagcaaacaaagaagaagaagaagaagaagaagaagaagaagaagaggatgagttgcgttacaccagcacttcctccttcactctttgctaatgggtatctttcgtctcctcagaatatctccatgaccaacttgaacagttcggtaaaggttagtgattctggtgcttataaatggcgccttgtgatagcctacgatggcacccgttttgcaggttggcagtatcaggagtcaccaccaactatccaatcaatgttagaaaaagccttaattcagattacagagctcggtagaaaagagcttcagcttattggagctggcaggaccgatgcaggagttcacgcttggggtcaggtagctcattttgtcactcctttcaactatactagtttggatagctttcacgctgctttgaacggtcttcttcctaaagatatccgtgtcagagagctgagtgcagcggttcctgagtttcatgctcggttttctgcctctagcanggttatcgctaccagatataccacgacactttcatggacc

SEQ ID NO: 132253 - DNA, 883 bp, Arabidopsis thaliana
  unsure (1)..(883): unsure at all n locations
catacacgcgtacgtaagctcggaatncggctcgagcgttgagaagagagacggagatcggagagaaagagaggatgggaacgagacaagtatacgaagagaagcttcggcgtgggaatcttgattatgatccgactatgaatcctggtcttggttctgctcggtgtcctcgttgtctttctctcttaaaccctaattcagagaaaggagagtggacgataactccagttttacacgatgctgctgcagtggctggttctggtattggtggcttgcttagtgccgtccatgctttcaatacagggatcccctatcttcaaaatcggttttccgggtcaaagcggctttcctttcttgtgggggttccattgcttctagtatattcaggtgtaggggctgcttttggaggttatgcacttccaaagtttgctcagctgacagttacctcgtattatgcatcttcaagtgcttcacattatggaatttctatgctaacccggcgtatcgaagaagctcatctctctcgaactcagaaagaagaggtaaaatgaaagtcatgcccagattaatgagaatctattccactcctctagctgagccagcttatttcacgatctccttttctaatttggtttctcgggtacctttcccagtcacaattttgaaaaccacatttataatggtaatttttccacataggtaaacccaaaaaaaagttttttaggtcctttttactgaaaaagccaagggaattgaataaaaaaaaaaaaaaaaaaaaaaggccggcnnnnnnnnnnnnnnnnnnnnnnnnnnnnnnnnnnnnnnnnnnnnnnnnnnnnnnnnnnnnnnnnnnnnnnnnnnnnnnnnnnnnnnnnnnnnnngg

SEQ ID NO: 132254 - DNA, 450 bp, Arabidopsis thaliana
gcaagtctccatactgagtcgtaataacgacagaagggggacctcaaactcaaagtcgagtaattgccgatctaaaacacagggggtgattcagaaatccccaaaattcgactaaaaactaaaaccctagccctaattcatcctgattttgatcgccgtataaaagactcgcattttctgggcttagtatggcggttccggtgctgggtggatttccgatcttcatggtagtgagagttttgggtttcatcatcgcggctttggttttgacatggactgttcattacagaggaggcttagctctttcttctgataacaaagatcacatctttaatgttcatccagtgatgatggtgattggactcatactcttcaatggagaagctatgttagcatataagtcagttcaaggtacaaagaacttgaaaaaactggttcatcttacactag

SEQ ID NO: 132255 - DNA, 531 bp, Arabidopsis thaliana
aatacgactcactttagggaaagctcgtacgcctgcaggtaccggtccggaattcccgggtcgacccacgcgtccgtacggctgcgagaagacgacagaaggggatcgaaagaagttgcagaggcaaaggatccatctttgctatcgccactcttctttggggttcgaaagagccagactttgtttaagtatgccgataattatgtgcagagtcgtcgctagttttggtctgtaaggagcagaacagtctcctccatccctctatgtgaagtccacaattgctccacttttcagaagccaaggacttgatgcttggtgtggcgcctgatctcgacacaccggaagcactcgatgctgccattgccagccatcaacctgcgacctgttttggcctctgaaaacggagactctgagagcagccataagagtgatcgagaagggaaagagaagagttgtttgtgtgaatctagccgaaaaacgaaccaatatcatagagctctcataaaacatagcatcttctcaatgcatggg

SEQ ID NO: 132256 - DNA, 439 bp, Arabidopsis thaliana
tttagcttagctcagatttgggttttaggtggaaatttcaactctgatcttaatagtattgaagctggctggcaggtcagcccacaattgtatggtgataataggaccagactcttcacttattggactagtgacgcataccaaggcacaggctgctataatcttctatgctcaggatttgttcaaatcaatagagaaatcgcaatgggtggatcaatctctcctttatcaaactatggaaactctcaatatgacatcaccatacgcatctggaacgatccaaaagaacgacattggtggttacagtttggagagaaatacataataggatactggccagcttcactcttcacttacttatcagaaagtgcaacaatgatcgaatggggaggcgaagtggttaactcacagtccgaagaacgacaatacacatccactc

SEQ ID NO: 132257 - DNA, 624 bp, Arabidopsis thaliana
  unsure (1)..(624): unsure at all n locations
aaactctgtagagaaaagaaaaaatctcgacttcgcaaattgcgagagacattgagtccaagaccgagttaactcgccagattcaataaccatggctggggttatgcagaagttccttattgcatcaatgtttatgtggattcttcctattgcaatattatatggattcaacaatgatttgcttcctgggtcaacaacgttgtctccacattctctgacactactgagtggatttcttgccgtggtatcagtcaatgtagttattgtgttttacatctgtctggccctgaaagaacctgcggataaacacaagccagacgcttcgtttgttgcagaggctaaagacagtgttaagaaattgacatcaggagtcacaaatactgaccctgcgctgaagaaacaagagtgagagcttgccacatccccttttttgttaaaacaaggaccagtgtcgaggtttcatcagaaggggcagggctcaggttcttcaattnatttgtttggtnnaagaccatnntgtgttgngggttttgggtttgttggnganaaacctttgcatgttnctttttgcaagngnggtgcttttttnngnncaaattccaaaacccnaaagtttccctnggc

SEQ ID NO: 132258 - DNA, 792 bp, Arabidopsis thaliana
  unsure (1)..(792): unsure at all n locations
cagctctattctactcactctagggaaagctggtacgcctgcaggtaccggtccggaattcccgggtcgacccacgcgtgcgcccacgcgttcgtacggctgcgagaagaccacagaagggtacggctgctagaagacgacagaaggggacatagatgagaagaaaagaaaacgcaagttatcaaaccgcgaatctgcaaggaggtcgcgtttgaagaaacagaagttaatggaggacacgattcatgagatctccagtcttgaacgacgaatcaaagagaacagtgagagatgtcgagctgtaaaacagaggcttgactcggtcgaaacggagaacgcgggtcttagatcggagaagatttggctctcgagttacgttagcgatttagagaatatgatcgctacgacgagtttaacgctgacgcagaatggtggtggcgattgtgtcgacgatcagaacgcaaacgcgggaatagcggttggagattgtaaacgtacaccgtggaaattgagttgtggttctctacaaccaatggcgtcctttaagacatgagatttgtgtattagtgtgtgttttactttggtcattttatagtttttgtaatctttttatatcgaattgtttcttctcattactttctgaattctgatacaattgcatatcttattgttttccnnnnnnnnnnnnnnnnnnnnnnnnnnnnnnnnnnnnnnnnnnnnnnnnnnnnnnnnnnnnnnnnnnnnnnnnnnnnnnnnnnnnnnnnnnnnnnnnnnnnnnnnnnnnnnnnnnnn

SEQ ID NO: 132259 - DNA, 810 bp, Arabidopsis thaliana
  unsure (1)..(810): unsure at all n locations
tgatctnnnnnnnnnnnnnnnnnnnnnnnnnnnnnnnnnnnnnnnnnnnnnnnnnnnnnnnnnnnnnnnnnnnnnnnnnnnnccacgcgtgcgcccacgcgttcgcccacgcgtacgtacgggtgcgagaagacgacagaagggggagaaagatcgaatcgaagaatggcagaattcgttgaagctgataacgcagaagcaataatcgcgaggatcgaaaccaaatcgaggaagattgaaagcctactcaaacagtacaaacatgtagaagctttgaaaacggctcttgaaggttcgcctccgaaaactcgcgatgaacgttgcaagtcggctaattggatagttgtgcacagagctttaatggccattaaggatattgacggaatgctcaatgctcttgatgtcgaatattacgacattctcatgaagtacttgtacagaggactttctactggggaccgacccatctgcgatcagtgcctgaagattcacgagaaactcactgagagagctggtctcggttgcattctccgatgtcttactggtaccatcaacaccgtttgatccatcattccctcttatgtattattacttgatgccttgatgtttccaatgtgcatattctccttgaggaaccatgtctcacatttatcagttttagacttgtattttcattaccaaacagttgcttgataaatgataacacaagtcattctttaaaaaaaaaaaaaaaaaaaaaaaaaaaaagcgaccgctctagaggatccaagcttacgtacgcgtgcatgcgacgtcatcagtcttctaagg

SEQ ID NO: 132260 - DNA, 597 bp, Arabidopsis thaliana
tgcgagaagacgacagaagggggagaaagataaaaacagaaaaagataaggaacttgcagagaaagcaaaaaagaaagaagaagcgaagaagagaaactaagattcagatggcttcccagacaaatcaaaccgtggtggataccaagaaaatcgaaaccgagaacccgccaaaaccgcaagtgcctgcatcatcatgcaggaagagggtgaaggatgataacgccactttctttgcaaacctcaaggatcacatggatgaattcatacatgcctcaatggatgaacacaagacttgtttcaaaaacaccatggacaagatattcgggagcttctccaaggcggaggcagttgcagagaagcaaattgaggctaaggaagtggtcgagattcactctcctcttcagacagcagtgactaagtagagattttcacaacttgtgagctcagaaataatcatggagtgtgttttcttttttcatgtatttgggtgttaatactcttagaacctgcttctatctctaacccattctaaatcagacaatttgtttctagaccattgcgtttaatcatctatactaatatcatttaataaaaac

SEQ ID NO: 132261 - DNA, 780 bp, Arabidopsis thaliana
  unsure (1)..(780): unsure at all n locations
cgcctgcaggtaccggtccggaattcccgggttgacccacgcgtccgtacggctgcggaagacgacagaaggggcctgaggaaagaaaaggagctccaaagggctgaacgcgagagacggaaacagcaagaagcccaggagcgagaagctcaggctgcactcaatgacggagaagtgattagcatccactcaacaagcgagctagaagcaaagacaaaggctgctaagaaggcatcacgtctgctcatcctttacttcacagccacatggtgtgggccatgccgatatatgtctcctctgtactcaaacctggccacacagcactcgagagtcgttttcttgaaagttgatatagacaaggccaatgacgtggctgcttcttggaacattagcagcgtcccgaccttttgcttcatcagagatggcaaagaggtggacaaagttgtcggagctgataaaggttcgcttgagcagaagattgcacagcactcttcttctaagtgatgtttttgctcttctctcattacactcctctcgcttgtactgtatctttgcaacacaatgattgtcccgtaatttaaaagtgtagcataacttttaaagtacttgtaattggctagatgacagatcagatcagttgactaagaagagttaagagagctcataaaaaaaaggagttacccgcctggcgaccgctctagaggtccaagcttacgtacgnnnnnnnnnnnnnnnnnnnnnnnnnnnnnnnnnnnnnnnnnnnnnnnnnnnnnnnnnnnn

SEQ ID NO: 132262 - DNA, 796 bp, Arabidopsis thaliana
  unsure (1)..(796): unsure at all n locations
tctatacgactcactataggggaagctggtacgccctgcaggtcccgtcccgaatttcccggttcacccaagcgttccgacgggtgggaaaaaccaaccgaaaggggagaggtggatcctgggaccagttttttcctcaaccggcttcttattaaaagccgtggggggggctgttaacctttggccaaggattaaccactggaggtcctggaccatccggtcctgaccttattctactatatggtggtagaagtaccttccatcggcactagtcctcttcattctccgaaagctacctccaaagagagtatcagctcaataccatccgatccagtagaaacctttgtcactgaaccatctcacacggtgagtatgatgctgtttaagagaagagtaaagattaaaaaaaaaatttggggcaaaaaatgaaaggtgaagaagaaatcggtgtggaatctgcgtgagtttttggaatgcacgttcatataaacgattttacagcttttagttgttgtagcccgccgtgacttttggtttggtagtttatgtctgttaaaattataaattgctcttctgctactttgaaaaatctggtcagtagtacaagagggttaacatttgttacgtccatggttgattgttatgttatgtttggtaaaaaataaacgaacgctcttctccagtttccnnnnnnnnnnnnnnnnnnnnnnnnnnnnnnnnnnnnnnnnnnnnnnnnnnnnnnnnnnnnnnnnnnnnnnnnnnnnnnnnnnnnnnnnnnnnnnnnnnnnnnnnnnnn

SEQ ID NO: 132263 - DNA, 481 bp, Arabidopsis thaliana
tccctatcgagtcaaaaggaagaaggaagaaactccacgaggttggatctgtgacagctatatgcttcacctgcttcctcataagatgcgttgtggtggctgtatcagcttttgacaaggatttaacacttgatgttcttgatcatccggttctgaacttaatctactatatggtggtagaagtacttccatcggcactagtcctcttcattctccgaaagctacctccaaagagagtatcagctcaataccatccgatccagtagaaacctttgtcactgaaccatctcacacggtgagtatgatgctgtttaagagaagagtaaagattaaaaaaaaaaattggggcaaaaaatgaaaggtgaagaagaaatcggtgtggaatctgcgtgagtttttggaatgcacgttcatataaacgattttacagcttttagttgttgtagcccgccgggacttttggtttgggagtttatgtctg

SEQ ID NO: 132264 - DNA, 592 bp, Arabidopsis thaliana
tacggctgcgagaagacgacagaagggtacggctgcgagaagacgacagaagggggactcggtgttgtcctcttggagttggctacagggctaaaagctgtaggaggtgaaggttttaaagggagtttggtggattgggtgaaacagcttgaaagctcaggtagaatcgctgagacattcgatgaaaacattcgagggaaaggacatgacgaagagatctcgaaatttgttgagattgctcttaactgtgtgagttcaagacctaaagagagatggtcaatgtttcaggcataccagtcactgaaagctattgctgagaaacaaggctattcgttctccgaacaagacgacgacttccctttgattttcgacacgcaagagaacgagaaagtgtgaaaatgaaccttttatgatacgaggaggaagtaagagtataattatttgttgtctatatcatcttgtactacttgtagagacactatatgttattgtaaaaacagaaatgtatatgttatttgttttctcttgtgtcaaagtctttagacatgttatgtgttgcaagtgtgtctttctatagtattggaagagtgcc

SEQ ID NO: 132265 - DNA, 898 bp, Arabidopsis thaliana
  unsure (1)..(898): unsure at all n locations
cnnnnnnnnnnnnnnnnnnnnnnnnnnnnnnnnnnnnnnnnnnnnnnnnnnnnnnnnnnnnnnnnnnnnnnnccacgcgtccgcccacgcgtncgtacggctgcgagaagacacagaaggggaaccaaaaaaataaaagatttttacattcgacgagaccgtgatcgaaacggcgatggttgaccagagtcctcgccgtgttgtcgtggcggcgctcctattgtttgtggttctgtgcgatctttcgaattctgcgggagctgcgaattctgtgtcagctttcgttcagaacgccatcttgtccaacaagattgtcatcttctccaaatcctactgcccgtattgtttgcggtcgaaacgtatattcagccaacttaaggaagagccatttgttgtggagcttgatcagagagaggacggagatcaaatccagtatgagcttttagaattcgttggtcgtcgtactgtcccgcaagtttttgttaacggcaagcatattggtggatcagatgatcttggagctgctttggagagtggtcagttgcaaaagcttcttgctgcaagttgatatttgaggacctcgaatgtggaatctacagtatgtgatttacaggaattagaaatctttgctagttgtagactgaataagcgaattgatatgtatgactcagttatgtaagttatgatggcattgataaagtcttgatcttttgttactgcactgctctggtgattgtttcgcttaaataatccatacttgtgtgccttagtgaatggttcatccgatnnnnnnnnnnnnnnnnnnnnnnnnnnnnnnnnnnnnnnnnnnnnnnnnnnnnnnnnnnnnnnnnnnnnnnnnnnnnnnnnnnnnnnnnnnnnnnnnnnnnnnnnnnnnnnn

SEQ ID NO: 132266 - DNA, 1018 bp, Arabidopsis thaliana
  unsure (1)..(1018): unsure at all n locations
gaattgttcactgcgacgttgaatctaagaacgttcttgtttttaacggtggtagctccgttaagctagcggattttggatcggcggttgagtttgagaaatctacgattcatgtttcgccacgtggaagtccgctttggatggctccggaggtggttagaagagagtaccaaggaccggagagtgacgtgtggtctttagggtgtaccgtcatcgagatgctcaccggaaaaccagcttgggaagatcacggtttcgactcgctgagtcggatcgggttctctaacgatttgctttttattccggtggggttatcggaactcgggagagatttcttagagaaatgcttgaaacgtgatcggagtcagcgttggagctgtgatcagctcgtgcagcatccgtttctgtgtcaagatcatcatgactcgttcttcactgagtcgtctccgcgttgtgttcttgactgggtcaactcggagtttgacgaagaagaagagagcgacgaatggagaccagaatccatggtttcggcgatggcaaggataagtaaattagctataaccggaggagcaaattgggaatctaatggttggactgaggttagagacacttccgaagagtcagaggcaaaaaaggaagttcttgtttctccaagggtagaattggaatcttacatatcattggagtcgtcaagcgatgattccgtaagacaaccgaggaatgaagagtcggcgacggagttggcgtcggcagtcacgtgtgaagcaatattgttggtgatgatattggtggtagagaatattccaatatatgccacgttttacaccagtagtattattatgcatattctatattgttgtagttgttgttgttattatcattatcaaaacaataataagaagaataatttttcgtaaaaaaaaaaaaaaaaaaaaaaaaaaaaaaaaagcgacagctctagaggatccaagcttacgtacgcgtgcatgttacnnnnnnnnnnnnnnnnnnnnnnnnn

SEQ ID NO: 132267 - DNA, 563 bp, Arabidopsis thaliana
  unsure (1)..(563): unsure at all n locations
atgatcctgccnnnnnnnnnnnnnnnnnnnnnnnnnnnnnnnnnnnnnnnnnnnnnnnnnnnnnnnnnnnnnnnnnnnnnnnccacgcgtgcgcccacgcgttcgtacggctgcgagaagacgacagaagggggaactcctttcatacgttttctctctactctcatcgcttttcttatctctctcggagctcttccgtcgtccaccattgattacgggagtgtattgagctaaatatggctataatacaacttggaagtacatgtgttgctcaatggagtattcgtcctcaatttgcagtcagagcttattatcccagcagaatcgaatcaactcaccatcaaaattccagtagccaagtaaattgtttgggagcttcaaagtcgagtatgttctcacatgggtcattgcccttcttgtccatgacgggaatgtccagaaatatgcatcctcctcgcagaggatctcgcttcactgttagagctgatgcagattactattcggtactcggagtttcgaaaaatgcaaccaaagctgagattaaaagcgcttatcagaagctg

SEQ ID NO: 132268 - DNA, 925 bp, Arabidopsis thaliana
  unsure (1)..(925): unsure at all n locations
gctctatacgactcactatatgggaagctggtacgcctgcagtaccggtccggattcccggtcgaccacgcgtncgccacgcgtncgccacgcgtncgtacggctgcgagaagacgacagaaagggggggattacccttggaacttgatatgcaatgggatggaaacccaaatatagtacttggcgtcaagaccttagttggtgtatccctccccattcaggtgaaaaacatcggattcactggtgttttcaggctaatttttaggccactagttgaggactttctctgctttggagctgtcagcgtttctcttagagaaaagaaaaaattggacttcacccttagggttgttggaggtgatatttcagcaattcctggactttctgaagctattgaggaaacaattcgggatgccgtggaagattctatcacatggcctgttcggaaggtcatcccaattatacctggtgattatagcgatctggagctaaagcctgttggaatgttagaggtgaagcttgtgcaagcaaagaacttgaccaacaaagatctagttggaaaatcaatttatcgtgattcctaagcttaatcggtagaatcaatttatcgtgattcctaagcttaatcggaagattcacaacttcgaatgtacatgttgtctagtagcgtcaaacggatgtgttttgtcaaacaaagacgagtctgcatgtagcccagaagctgtggactcggaatatgagttttcctctttttttctgaaaaccctagacaatactcgtgtacgtttgcctcataagctcagatgtcataaggggtttgatccnnnnnnnnnnnnnnnnnnnnnnnnnnnnnnnnnnnnnnnnnnnnnnnnnnnnnnnnnnnnnnnnnnnnnnnnnnnnnnnnnnnnnnnnnnnnnnnnnnnnn

SEQ ID NO: 132269 - DNA, 732 bp, Arabidopsis thaliana
  unsure (1)..(732): unsure at all n locations
acccgcccgcaggnaccggnccggaattcccgggtctacccacgcgtgcgtacggctgcgagaagacgacagaaggggcaacccaaaaagtaacaatttgaattacttccgcaaatctaaaataatatctagtgaagcgaatatgtgtttctttgataatcggtgcgatcagaatctgacggtggtggtggatgtggcgtggtggatggaggctgttcctccacaaatcatttctccggcgaagccatcggtttctccgattcttgagacgattttagaaggcggagagaccgaagaagacaatcaagaacaagaaaacgaggacgtgtaaattgtaatgatcattttgttactcggtcttgggtttaagatagactcttgttgttgttgttgttttttctataactgtataagatgagattttgtattgtatcttttgtacaatcaaatctcagttctttgtgaaattttcattcaactttcacatccttgtacgcacggtgaactgttgtgatatgagttttttacttaaaaaggggggggccgtttaaaagaatcaaactttacttccggtgccttccaaggtattagtttttttttggggcccctaaattcaattcactgggccgcgttttaaaaccgccggactgggaaaaccctgggggtaccccactttattggcttggaggaccttcccctttttccagttggcgttattaccaaaaaggcccg

SEQ ID NO: 132270 - DNA, 895 bp, Arabidopsis thaliana
  unsure (1)..(895): unsure at all n locations
nnnnnnnnnnnnnnnnnnnnnnnnnnnnnnnnnnnnnnnnnnnnnnnnnnnnnnnnnnnnnnnnnnnnnccacgcgtccgtgcggctgcgagaagacgacagaagggggagagagaacgaagcaaaaaacctcgctcgctagctatgtgaagaaactatcttcgttataaaactttccggcgacgttttccgacttccgagagcaggttttgaggtggttttatgcgccaaaacatctaaccggagtgtcgttgtacggtgcttagtagttttcaataacacgcttcagttatggggaatgcttgttgtgttgctactcgagacaaaatggttgtgcctaatacatcagcagtcgagaattttcaaagaaacaatgtgaggtattctcctaactggagcttccgatgggataatagaggaggacgcgtggcaggggaagagacctctgttagtttgttatctgatcggattagtcgtaacgatgtctctgatgtcaaatctgaaactgctcttgtatcatcacaaggttctcctttggacaattttcagacgcagtcatggcagaaatctcctgcttctggtaaattcctttattgctgcttacaggcaatacctctttgatttgtcaaaaaatgtagacttgatgggaaaatgtaggcaccttctttttgaccaacccgcttagaatttaggattacttttctacagagactgttaatgagtgaaaatgacattgatatgtttgttgacataaactgttctcttgtttgtttcttgacttgcttttattggtnnnnnnnnnnnnnnnnnnnnnnnnnnnnnnnnnnnnnnnnnnnnnnnnnnnnnnnnnnnnnnnnnnnnnnnnnnnnnnnnnnnnnnnnnnnnnnnnnnnnnn

SEQ ID NO: 132271 - DNA, 583 bp, Arabidopsis thaliana
  unsure (1)..(583): unsure at all n locations
nnnnnnnnnnnnnnnnnnnnnnnnnnnnnnnnnnnnnnnnnnnnnnnnnnnnnnnnnnnnnnnnnnnnnnnnnccacgcgtccgtgcggcagaagacgacagaagggtacggctgcgagaagactacagaagggtacggctgcgataagacgacagaagggtataccagatgatacaaaggttttgaaagtctcaccaactgacacagtgttgactgtagcaaagaagatggttgaattccaatcaagctgtgcagtcgtgataatcgaggacaagcttcgagggatatttacttccaaggatatactgatgcgggttgtggctgaaaatcttcctccatctgagactctagtggaaacggttatgactcagaatccagaatctacgatagttgacacaccaattgttgaagctctacacatcatgcacgagggaaaattcttacaccttcccgttactgacaaagaaggagatgtagttgctgttgtcgatgtaatccatgtcactcacgctgctgttgccacagctggaactactgcgggaataggtaatgaggcgacaaacacaatgatgcaaaagtttt

SEQ ID NO: 132272 - DNA, 642 bp, Arabidopsis thaliana
  unsure (1)..(642): unsure at all n locations
tatggctgcgagaagacgacagaagggggtcgacccgccggcgacgatggatttacagcaaaagcaggcgtgttggaagcttgaactcgaggttatagataacgattcttcatgggtcagtaaatttgatccttctaagaagaacaagaagaagaagcagaagcctctgatacgcgaagacgacatcttcttccagaatggaggacactttacggaggataacttaccggactgtcaatctagccggaaatttgagccagattatggctacaaagagctcttgagtatggtgtttgataggcttcgtgaggaagatgtcgaggtttctacagagaggccaagaacagtgatgatgcctcctcagctccttgcagaagggacgataactgtttgtttaaactttgctgatctctgcagaacgatgcataggaagccagatcatgttcatgaaattccttacttgcccaaatggagacaaaagtatcgctgaaacaaacagcagccggctaaaanattaaagggttttaatgttctcctaaggattttccaagctgttgttcccggaaatacattgaatgccnttccgtaatctgccttctgcctggcaaaattccctgaacnccgctcctcccccgaaggaaa

SEQ ID NO: 132273 - DNA, 724 bp, Arabidopsis thaliana
gcctgcaggtaccggcccggaattcccgggtcgacccacgcgtccgtacggctgcaagaagacgacagaagggtacggctccgagaagacgacagaagggtacggctgcgagagacgacagaagggtacctttgacggcgaggttgataaagtgtacttgaacacgccgacaaagattgccatcatagatcatgagaggaaaagaactatcgagttgcaaaaggaaggcatgccaaatgcagctgtgtggaacccttgggacaagaaggccaggagtattgcagatatgggagatgaggattacacaacaatgctgtgtgtagattctggtgctatagaaagcccaattgtgttgaagccacatgaagagtggaaaggaagacaagaactctctatcgtctcctcaagctactgcagcggtcagctcgatccacgtaaggttctttatggggattactgataatatatatgaaatcaaacttggaaacatcatcagtcttatattttgatcgtcttcatggataaagcgattgatgcccaaacaaatctgatatgatatgattttgtttggagctattgccctttgtgagtttctgacaggcacacagaaagataggcaaatgtagtattttgtaacgttgccttctgtgtggcggtcagggacttattaatatgtattatggttcacccggaaacatgagtcttatattgaatcgtcttctcc

SEQ ID NO: 132274 - DNA, 636 bp, Arabidopsis thaliana
cagctctatacgactactataggaaagctggtacgcctgcaagtaccgggcccgaatttccgggtcgcccacgcctccggccggtgggagaagaccacagaaccttttagacctagagtctctctgtttcgcttttcataaatcttgaagaataaatggaaaaagcttcaaacagcaacaagtccacgaaattctcgaaaatgcttcaaagagcgatgtcaattggtcacagtgcggcgccgtttagtccacggagagattttcatcagcaccgtacgacttcgacggcgaacagaggaatcttcttctccagtccgttggttcctacggctgctagagttaggagaaatacaaaatacgaagccgtttttgccgaacccacttcgcctaaagtctcctgcatcggtcaggtcaaactcgctagacctaaatgtccggagaagaagaacaaagcacctaagaatctcaaaacggcatcgtctttatcgtcttgtgttattaaagaagaagacaatggaagcttttcgaaactaaagcgtatcttctcaatgagaagttatccgtcgagaaaatccaactccactgccttcgcagccgccggagcgagagaacatccaatcgcggaggttgatgcgg

SEQ ID NO: 132275 - DNA, 806 bp, Arabidopsis thaliana
  unsure (1)..(806): unsure at all n locations
gattgaaactgtatctagtttaccaatggtgcgatcggtttacggcccaacctcggtgaacaagaggaagctgatgggattagggaatcttcaggagacaaaagatactgtggagagcgtaaaacggttaaacagaacaactaatggagttcttgatctgaaccttccggctcaagagaccgaaatcgaggaaaaatatcattgtgaagagaactcaaacgtttggttaatgaacttgaagaatcataaacgtctcattgaggttcctttcaagccttttgattttgaaggactagctgaaaaaatcaaaaagagcgttaaagaaaatttcgacaagtgcgtgagatcggattgcttgctggaggttgaccctaagatcatagaacgattgctagcggctgtttatttctcagatagtagaaaagatatcaaagagttgctggagaatataatgagtccagtgttcttgagaattaaagaaaggtatgaaatcactactagttgtgtagtaaaattagttggtcgagatcttgacatttttcttgaggatcaaatggacttgttctttgtaaaatctcagtaggttaaagagaactttatatggaaagtgtatcatataaggtagagttagtaataggtattattgttcttttgtgttgctatactatgataatgtgtgttcctgtagttatgatgatgagttgatctttctccttgtttaaaaaaaaaaaaaaaaagnnnnnnnnnnnnnnnnnnnnnnnnnnnnnnnnnnnnnnnnnnnnnnnnnnnnnnnnnnnnnnnnnnnn

SEQ ID NO: 132276 - DNA, 855 bp, Arabidopsis thaliana
  unsure (1)..(855): unsure at all n locations
ccggcactatacgactcacttagggaaagctggtacgcctgcaggtaccggtccggaattcccgggtcgacccacgccttccgacgggcgagaagacgacagaaggggttttacggtcctttccgtgaagccctggactcaaacccgcgtttcggagacaagaaaacgtatcagatgaacccagcaaactacagagaggcattgattgaggcacgtgaagacgaggctgaaggagcagacattctcctggtgaagccaggtcttccatatttggacatcatacggcttttgagggacaagtctccattaccgattgctgcataccaagtttctggagagtactcgatgatcaaagcagggggagtcctgaaaatgatcgatgaagagaaagtgatgatggagtcactgatgtgtttacgcagagctggagcggacatcatcctcacgtacttcgctcttcaagctgctacttgtttgtgcggcgagaagcggtagaatagacaacaagactgtgttttaaactgtttgagtatatctgttttaaatcatttgagactattgtgattttgccttgttctgatcccattcttttagtgtcgtgcatatgtgatcttgtgttttgtaatatggattatgatgagtccctagacttcaaaatttggaggccatgatctgagtttctgaatgtggttcttgtagattccattgatattttgcagaccacattatttggttctccaaaaaaaaaaaaaaaaaaaaaaaaaaaaaaaagnnnnnnnnnnnnnnnnnnnnnnnnnnnnnnnnnnnnnnnnnnnnnnnnnnnnnnnnnnnnnnnnnncgtcctcaattagattc

SEQ ID NO: 132277 - DNA, 427 bp, Arabidopsis thaliana
gataagccgcaagtctctctctataaacaccgccattgattagcttcctctctatttttactctcgtcacgtcctccacttttgggtcattattacttctcgaagctcaccaagatcttgaatttgccgacctctcaagattcttgatggtaaaagcatacagacaagagcatgtttacaagcatccgtgggagcgggtgagtgctgcttcatggaggaagtttgcagaccctgaaaacaaacgcatcctttctcacatccttgaagtcgatcccttgaacaggaaactcgacactgagaccgggaaactccacaccacgcgtgctctcaccatccatgctcctggtccatggtttctccataggatcattggtcaggacatctgtcactgtgttgaatcaacagttgtagatggaaatcacgttct

SEQ ID NO: 132278 - DNA, 542 bp, Arabidopsis thaliana
  unsure (1)..(542): unsure at all n locations
gatcttnnnnnnnnnnnnnnnnnnnnnnnnnnnnnnnnnnnnnnnnnnnnnnnnnnnnnnnnnnnnnnnnnnnnnnnnnnccacgcgtccgtgcggctgcgagaagacgacagaagggggacgttcgaaattccgaggagaggaatcataccatggaatcgcaccacgcgtctctaggtcgccgtactttggaagagattcgtcaaaagagagcagctcaaaggctaagcaaagcttcttcaggtccagatcttagtgaaattcccaatcctgccgatttcccagtgatcagaaaatctgagagcggaaatcgactttctgagacagatgttggtgctttatattcccagcttaaagaactgcagaagaagaatgcagaaatggaggagcgcaacaaaattttgtcttcaaagcttcaaacgaaggaagttgagaatgaatcacttgagactcggttgaatgtgctggaacaaaacacagtgccatctttgagaaaagccctcaaggaaattgcaatggagaaagatgctgctgttgtttta

SEQ ID NO: 132279 - DNA, 592 bp, Arabidopsis thaliana
  unsure (1)..(592): unsure at all n locations
ctcactatagggaaagctggtacgcctgcaggtaccggtccggaattccgggtcgacccacgcgtccgtacggctgcgagaaacnacagaaggnggaagaacagagttagttttcaaggtttatccacagatccactgaaatcaacaatggtgaataaagctccgaagaggaaacatgtatcacctgaatctctccttctctctattctcaatgatttgttgtttctaaattctcaaaagcttgactcttgtttccgtagaaaatcgaattcagatgcgtgtagctttatagttagcttaaattttgcaaaagttggaaattttacttcaagatccaatgaaattgctccactgatcaatgaagctgttgctaaaggcaagaactttgatactgggacaagagttggattagatgttggtcatcttcttaaatctgcattagctggaggaatctcatgtgctttctctgcttttttgatgcatccagtggatactgtcaagacacaggttcaagcatcaactacatttgtcgtttctcgaaatattgtcaaagattccagagattggtgctcgaggtttatacaaaggctcg

SEQ ID NO: 132280 - DNA, 751 bp, Arabidopsis thaliana
  unsure (1)..(751): unsure at all n locations
tatagggttggttggtccgcctgcaggtaccggtccggaattcccgggtcgagacgattcgattgaattctccataagaggtccgacccgaattcgaaaacccgtaagaaccgaatcgaagatgagcaaggatggtttgagcaacgaccaagtctcatcaatgaaggaagcattcatgctattcgacacagacggcgacggcaaaatcgcaccgtcggagctcggaatcttaatgcggtcactcggcggcaatccaacagaatcacaactcaaatcaatcataacgacggagaatctctcgtctccgttcgatttcaatcgattcctagatctaatggcgaaacatctgaaaacagagccgtccgatcgccagcttcgtgatgcgttcaaagtgcttgacaaggaaggtactggattcgttgctgtggcagatctgagacatatacttacgagtatcggtgagaaattgcagccgagtgagtttgatgagtggatcaaaaggggtggatgttggtcctgatgggaagatccggtttggggattttattgccttgattggttgctaagtaaggcctaaatctttgaaatttgaattttttggattagaacaatcttaggatttgttcagaaagtgttgaattcttaatgtaattgggaatttggtcttaataaactgtgttattttgaaagatggttccctttacttagaacnngncccccnnnnnanactccccaaaaaaaattgtaaaaa

SEQ ID NO: 132281 - DNA, 873 bp, Arabidopsis thaliana
  unsure (1)..(873): unsure at all n locations
tacgactcactattgggaaagctgacacgcctgcaggtaccggtccggaattcccgggtcgacccacgcgtccgcccacgcgtccgtaggctgcgagagacgacagaaggggaagaacaaagacgattcgattgaattctccataagaggtccgacccgaattcgaaaacccgtaagaaccgaatcgaagatgagcaaggatggtttgagcaacgaccaagtctcatcaatgaaggaagcattcatgctattcgacacagacggcgacggcaaaatcgcaccgtcggagctcggaatcttaatgcggtcactcggcggcaatccaacagaatcacaactcanatcaatcataacgacggagaatctctcgtctccgttcgatttcaatcgattcctagatctaatggcgaaacatctgaaaacagagccgtccgatcgccagctttcgtgatgcgttcaaagtgcttgacaagggaaggtactggattcggtgctgtgccagatctgagacaatatccttacgagtatcggtgagaaattccagccgagtgaggtttgatgagtggatcaaagaggttgatgttggttctgatggtaagatccggtatgaggattttattgctagaatggtgggtaagtaagatctaaatctgtgaaaccctgaataataaaggttggaccaaatcttaggatttgttcagaaagtgtttaattgtaaatgtaattgggaatttggtcataattaagctgtgttatttgaaaagatggttcctttatgatattgaattctgtaaatgttgcaaaaagcaaaaggaaaaaaccccngggggcagccgctctagaggatccaagcttacgtacgcgtggatgcga

SEQ ID NO: 132282 - DNA, 650 bp, Arabidopsis thaliana
  unsure (1)..(650): unsure at all n locations
ctcactatatggaaagctggtacgcctgcaggtaccggtccggaattcccgggtcgacccacgccgtccgtacgggctgcgagaagacgacagaaggggtagagaatggtgacactcgtgaagcttgtagatgcatcagggagttaggtgtctcgtttttccatcacgagatcgtgaagagtggtttggttctagtgatggagtcccgaacatccgagccgctgatactaaaattgttgaaagaagctacagaagaaggtctcattagttcgagtcaaatggcgaaagggttctcccgagtagcagatagtcttgatgatctttctcttgacatcccatctgctaaaactctgtttgagtcaatagttcccaaggctataataggaggttggctcgacgaagattcgtttaaagaacgctctgatcaaaatgggggcagcgaaaatctaaggcggttcaagaaggatgcagagaccattattcaagagtatttcctttctgatgatatccccgagctaatccgcagtcttgaagatttaggattacccgatataacccggtattcttgaagaaactcatcactcttgctatggataggaagaacanagagaaagaaatggcttctgtttttctcgcttctctcacatgga

SEQ ID NO: 132283 - DNA, 917 bp, Arabidopsis thaliana
  unsure (1)..(917): unsure at all n locations
ctctatacgactcactatatgggaagctggtacgcctgcaggtaccggtcccggaattccggggtcgacccacgcgtgcgtacggctgcgagaagaacgacagaggggggatttgagaaaaagaagagatgacgacgatacgtagattcagctgcaatgaccttctccgattcacttccgtgaatctggaccacctcactgaaacattcaatatgtccttctacatgacctatttagcgagatggcctgactattttcatgttgctgaaggtcccggcaatcgtgtcatgggttatattatgggtaaagttgaaggacagggtgaatcttggcatggtcatgtgacagccgtcactgtctctccagaataccgcaggcagcaacttgcaaagaaactgatgaaccttctggaagatataagtgataagattgataaagcctactttgtggatctttttgtaagagcttccaacacaccagccatcaagatgtatgaaaagcttggatacataatttataggcgggttttacgctattattcaggagaggaagatggattagatatgaggaaggcattatcaagagatgtagagaaaaagtctgtgattcctctcaagagacctatctcacctgatgaattagagtatgattaagaccctaacttggttctccattgttatctgcattaaaaatttctcccagagcccttagatggtggtaccattcctgttgtttcgtatttgaaccattatgtttcgttttcttccacaccaatttataattagttttgattaaaccttaatccatatatacctttttggaggagattttttgaggtttaaaaaaaaaaaaaaaaaaccccaaanagcggccgctttaaaagaatccagcctaaggaaggggcacatccaccttct

SEQ ID NO: 132284 - DNA, 568 bp, Arabidopsis thaliana
cagctctatacgactcactatatgggaaagctgggtccccttgcaggtcccggtccgaatttcccggtccgaccacccttccgcaaaagacaacaaaaggttcgggttgcaaaaagcaacagaagggacgggttgcgagaagacgacagaagggggattgaaagatgtcaaggcttcttcagattctgttgctttaactgcaaatttcatttttgtggcgcgtgattctaagactggtaaagctgctcctatcaaccgtctttctcctgaaaccgaggttgagaaacttctctttgaggaagttgaagctaggaataacttaaggaagaagaagagaggaggtgacagaagggaatttgatcacggggagtgtaagaagcttgaggcttggttggctgaaggaaggattttctctgacatgccagctcttgctgacagaaacagcattcttcttaaagacactcgtcttgagaattcgctgatatgccaaccgcagcagaggaacatccatggtaggatctttggagggtttttaatgcatagagcatttgagttggctttctctact

SEQ ID NO: 132285 - DNA, 884 bp, Arabidopsis thaliana
  unsure (1)..(884): unsure at all n locations
nnnnnnnnnnnnnnnnnnnnnnnnnnnnnnnnnnnnnnnnnnnnnnnnnnnnnnnnnnnnnnccgggcgaccccacgcgtgctagcggaagacgacagaagggacagagaacaaacatagagaggttatagaccggtttcagatattgaaggagcaggaaacagagcgcaagctcaagtctcagaagctccctgattcagacattgatgttatagaccggtttcagattctcaagcagcaggaaacaaatcgcaaactcaaggctcaaaaatgtccagaaacagaaaagggtgaccaggaggacaaactagaaggttcagtgatggctaatatgggcagaagcagcgatgtgagtgatgttatggatagattccagatactgaaacgccgggaagctgaacaagtgaagaaatctctcaacagcatggatgtagattcggattcagaaaatgaccagccacaaaagcgtgatcatctctggtcagattcgttattcccaatacgtggacattctcagagagaaacatgcgccgcggacactgaacaatctgcatctggcaaaggatacgagagcccgaccttggactgggaacatgtcatcaaggatgattgagtagtgaaatttccttggacaagaagtttcgatcctataatgaaatcttgttatttataaataaaaaggtatttgtaggataacatgaaccggccattatgaaaaacggttgttatgtatgattaaagggataaaactgcttggatgctggttttcaataactatgntcagttttnagttactgnttttcnnnnnnnnnnnnnnnnnnnnnnnnnnnnnnnnnnnnnnnnnnnnnnnnnnnnnnnnnnnnnnnnnnnnnnnnnnnnnnnnn

SEQ ID NO: 132286 - DNA, 383 bp, Arabidopsis thaliana
ggaggtttgtttgtgaagcgtgtgaaggaaatgatttcaatggaggagaaggacacatacggcaaaagaaagactgttcctctgattccggctaactacatcagcatccttcagctccaggagcgttggctcaatgagaaagagaagaagcgaaaggaagaagaagagagacgacggaaactacaggctgaggaagagaaaaagatagaggaagaagatctgaagaaagcggaggaggagaagcgtatgaatcgaagtaatcggaagcatttttgggagaaaaaaggaatctatagacggcggagaagcacgattcgttgagaaggagaaaccggaagtcacggtggcgatcgagagcggtggaagtgaagatgcggcggatg

SEQ ID NO: 132287 - DNA, 635 bp, Arabidopsis thaliana
aaattagaaagacgatgatggagaaaattatggagtatctgcaattgagcgatgaggtggttgacgacggtgaggcaccgcgagttgaagaatttttaggtgaagggaaaagcttctacgagaattttagtctcagaggaatccgagtcaaccgagtcgaaccgggtttcatttcctgctctttcaaggttcctcttcgtttgacggacagagacaagaatttagcaaatggtgcgactgcaaatcttgtggatgaagttggtggagcacttgtacatggcgaaggcttacctatgagtgtttcagtggacatgtctattgcattcctttcaaaagctaagcttggtgaggagttggagataacgtcgagattgttaggagagagaggaggttataaaggaacaatcgttgtagtcagaaacaagatgaccggggagattatagcggaaggtcgacattctatgtttggtagacaagctagtaagctctgagtccaacttttaagtcttgtatcactgtaatgtctgttttcaataataagattatggttaggtaaatttggttaggtcctttgttctttctggttgtgaatctaaaaccttggtacatagcccataaagatcaaaccattcagc

SEQ ID NO: 132288 - DNA, 425 bp, Arabidopsis thaliana
tttatgacgacagaagggaaacagaggagtctgagaaaatggatgaagatagccgactgattgaagaactccgccagactaatgaatatcaaaggtctcagatatcacacttggagaaaagtcttaagcaggccatctcgaatcaggaggataacagattgagcaatgacaaccaaatccgaaaattaaaggacacagttgatgacctaaatcaaaaacttacaaattgtttgagaacaatcgagtccaagagtgttgaacttttaaatcttcaaactgctctaggccagtattacgctgaaatcgaagctaaggagcattttgaacgagagcttgcgatggctaaagacgagttgatgaagctttctgctcgtttgaaagattctgatgagcggttagagtcatcaaataaagaaaaggaagat

SEQ ID NO: 132289 - DNA, 615 bp, Arabidopsis thaliana
  unsure (1)..(615): unsure at all n locations
ctcactattgggaaagctggtacgcctgcaggtaccggtccggaattcccgggtcgacccacgcgtccgcgagaagacgacagaaggggcattcgtggaattgtctttcagaaagaaaaaaacttggaagcagcagagaatcacactgaagctgaacaaactgaagattttgatccacagattttcttaagaaatcaaccagaattagctgatgtggtattcaattatttcccggatatgcagcagcctagggactctccgaaaaggaaggcggtaacccttgttcttgatttggatgaaactctggtccattcgactctggaagtctgtagagatacagacttttccttcagagtcactttcaatatgcaagagaacactgtttacgtgaaacaaagaccatacctttataggttcttagagagggtggttgaactttttcatgttgtcatcttcacggctagtcacagcatctatgcgtctcagcttctagatatattgatccagatgggaagtttgatcgcacgttttaccggattatgctttttcaatggatnataccaggattaaccgttgggtttgactacaaagggcttagtgacactgtcacagtgt

SEQ ID NO: 132290 - DNA, 674 bp, Arabidopsis thaliana
  unsure (1)..(674): unsure at all n locations
gatacgtcagctctatacgacttaacttttagggaaggctggtccgcctgcaggtcccggtccggaattcccgggtcgacccacgcgtccgtacggctgcaagaagagacagaaggggacgagagagagtaatgaagagtgaagtgttatattgttctctcgtccacttccactctctcttttatctcttacttacttcttcgtaagatcattacatataataaataatattatttatgtttgtgttatatttaataacagtaaaaagttttaaaacgttgaacaaattagccgacatagaatacaaaagagggttagcatcgggggagaaacgtggaccaacatgatacaccctccaaaatagtccccaagttgaaacattgacatgtttcgctttttcttttctgtgtatactttttttttctgtgggtcacattatttaatatttgtatacaagcagctattttacatggagatttcctgtcggtatagcgtcctcatttctccatcgcttccacttttttcctatactaatttgatctaattaattcatatgtccaaacctttaggnnnnnnnnnnnnnnnnnnnnnnnnnnnnnnnnnnnnnnnnnnnnnnnnnnnnnnnnnnnnnnnnnnnnnnnnnnnnnnnnnnnnnnnnnnnnnnnnnnnnnnnn

SEQ ID NO: 132291 - DNA, 468 bp, Arabidopsis thaliana
cccacgcgtccgcccacgcgtccggcgaagacgacagaagggaggagctgtggaagaaaggccaaaccccatgtttcattgcttgtactacactcgtcgaagggttgaggaaatcaggaagaacagagaaagcgtcagggtttatggagaagatgatgaatgcaggaattcttcccgatagtgtgacatttaacttgcttcttcgggatctctgcagttctgatcattctactgatgcaaacagattgagacttttggcatcaagcaaaggatatgaacccgatgagacaacgtaccatgttttggtttcggggttcacgaaagaagggagaagaaaggaaggagaagttctagtgaacgagatgttggataaagatatgttgcctgatatctttacatataatagattgatggatggcttgtcctgcactggacaattctcaaggaaacaagtccggatgttgtaac

SEQ ID NO: 132292 - DNA, 534 bp, Arabidopsis thaliana
  unsure (1)..(534): unsure at all n locations
nnnnnnnnnnnnnnnnnnnnnnnnnnnnnnnnnnnnnnnnnnnnnnnnnnnnnnnnnnnnnnnnnnnnnnnnnnccacgcgtccgtacggctgcgagaagacgacagaaggggaagcaagagagtattttggggaagctcttcttcatggagcttgaattctcactctgctactgctaaatcgatgttagatagtgcccatcgccagtattctactcactctccatcggaaaccaaatcacagaaaatgctctattacctcaccgctgttgtctttggtatggtggggttaacttacgctgctgtgccattgtatagaacattctgccaagctactggatatggaggtactgttcaacgcaaagagactgttgagaagaagattgctaggcattcagaatctggtaccgtcactgaaagggagattgtggtgcagttcaatgctgatgttgcagatgggatgcagtggaagtccactccaacacaaagagaggttagagtaaagccaggagaaagtgcactcgcattttacact

SEQ ID NO: 132293 - DNA, 673 bp, Arabidopsis thaliana
  unsure (1)..(673): unsure at all n locations
ctcactattgggaaagctggtacgcctgcaggtaccggtccggaattcccgggtcgacccacgcgtccgtcacttagacattccttcaaaagaaatgctcgaggaagcgataaacgagtaccaaggtacagtcattgcggtatcccacgatcgatacttcatcaaacaaatcgttaacagagtgatagaagtagaagatggttgtttagaagattatgcaggcgactacaattattacttggagaagaatctggatgctagaacaaaggagctagagagagaagcagagctagaagagaaagcaccaaaagtgaaggcaaagtcaaagatgtcaaaagcagagaaagaagcgaggaagaagcagaagatgcaagcatttcaacaagctaaacagaagtcaaaggctagcaagaactccaagagatggaactgaacaaacattgaaaactgaaaggagtcaagatttataaaaaaggcttcttcacagtctcacaaaatcgtcattgtggaatgtatatagatattacttttagaaatgcagagagaatattaatgtttctacaaaaaaaaaaaaaaaaaaaaaaaaaaaaaaagcggccgctctagaggatccaagcttacgtacgcgtgcatgcgacgtcatagctctttnnnnnnnnnnnnnnnnnnnnnn

SEQ ID NO: 132294 - DNA, 433 bp, Arabidopsis thaliana
gagagtacagaggctagagagaatgggatgggaataagcttgtttcgcaggttatcagaagcccatcctcaggcaatttcagtgttacaaaaccagtaccgaatgtgtcgaggtattatggaactatcaaatgccttgatatatggagacagattatgctgcggttctgctgaagtagctgatgccacacttgtgctttctacctccagttctacttcgccatggcttaaaaaggttctggagccaacaagaacagttgtatttgttaatacagatatgctgcgtgcttttgaagctagggatcagaatgcgatcaacaatccagttgaagcttccataatagctgagattgtagaggagctagtttacaatggagtggatagtaaagatattggaatcattactccttataactcacaagcgaccctcattc

SEQ ID NO: 132295 - DNA, 785 bp, Arabidopsis thaliana
  unsure (1)..(785): unsure at all n locations
nnnnnnnnnnnnnnnnnnnnnnnnnnnnnnnnnnnnnnnnnnnnnnnnnnnnnnnnnnnnnnnnnnnnnnnnnnnnnnnnnnnnccacgcgtccgtacggctgcgagaagacgacagaagggaatgttagaggtagttgccgtgatttgcattctggtcctgtgagtttgcttcactggtcaggtagtggtaagccatggttaagactcgattccaagcttccatgtcctttagacacattgtgggcaccttatgatttgtataaacactcccattgatgccaatttcgagttcgacatattcatggtcatggggactaaaccgaagatagcagagttgcaatggtggttttcaactggaaacaactatgttgaagattgagtaaaccctgccggaacagagtgctatagtagtattgcttcggacagttcgaccagaccgtagacacaatttagaagagtgaacttcgttttaagtgttgtaccggcggttaaatatgttcttgtgggaagaaaaaaaataaaaatatagttaggtcattcacacatagctcaggttaaagcgtttttgttgtttatgattggtcctataagtaattttgtgcagactctagtccttactttggttctcaaaagtctttagaaatctatggttaaagattttccctcnnnnnnnnnnnnnnnnnnnnnnnnnnnnnnnnnnnnnnnnnnnnnnnnnnnnnnnnnnnnnnnnnnnnnnnnnnnnnnnnnnnnnnnnnnnnnnnnnnnnnnnnnnnnnnnnnnnnn

SEQ ID NO: 132296 - DNA, 715 bp, Arabidopsis thaliana
  unsure (1)..(715): unsure at all n locations
ccnnnnnnnnnnnnnnnnnnnnnnnnnnnnnnnnnnnnnnnnnnnnnnnnnnnnnnnnnnnnnnnnnnnnnnnccacgcgtccgtacggctgcgagaagacgacgatgcagagtttaacgtcaaacgaagttgcgggtttggcagttggggctctgcttcttggtgccaccatcgctgctcctaaagttgatgcttttatcgctgcttctcagagaagatctcttggcatgtgtcgaaaatgtggagatcttaagaatgtagcttgtggccgttgcaaaggaacaggaacaatcaaatcaggaggattctttggtttcagtgactcatcaaacacaagatcagtggcttgcgataattgccaagccaaaggttgtttcccttgccctgaatgctcaaaatcttgaccattttctcggtattttatagttgtttcatcttcttgacactatgataagtgtaatcggtccattggtaatggtaatgttaaagttgaagaatgtcttgtttattcgagaagtctcttattccaattcttgatctgttactgcaaataaggcactttgcttagatgtaccggatgcttatgaattactgagtaggttctctttctagnnnnnnnnnnnnnnnnnnnnnnnnnnnnnnnnnnnnnnnnnnnnnnnnnnnnnnnnnnnnnnnnnnnnnnnnnnnnnnnnnnnnnnnnnnnnnnnnnnnnnn

SEQ ID NO: 132297 - DNA, 798 bp, Arabidopsis thaliana
  unsure (1)..(798): unsure at all n locations
nnnnnnnnnnnnnnnnnnnnnnnnnnnnnnnnnnnnnnnnnnnnnnnnnnnncccgtccccaattttcgtttcgacccacgcgtccggatttcaagagtaatggttccgcgagaagcaagatggtttcggaatcaggagatggggtcaagagtaatgggtggactgaggctatcgcaactacattggcagttccgagcaatcggaggtttatgtttgatgtaacaggaagagtaacactagaaacgacgagatcaatcatcgcatttataatggtgaagacatttcaagggttcagaaaaagtatcaatgtggttcatgaagaggttacagacagaggacgccaagcagttgaatatgttggagccaaatcttctgttataatcactgtgtgccttgcgttgtacttgcacatcataagcggctgtgttcggaattctcccataggcgtaagccagcatttttagttcttcagatgaagagcagatcatcgatttggttggatataggataatatttgttaggtacacaagatttatcagctcgttgtttatagttggagctgagaatattgtaaagattgtgtgcgtgtattagcacaacttgattcttattgatggatcatggatcatatatatatacatattgaaaaggttcttgggacaaaaaaaaaaaaaaaaaaaaagggcggccccttctagaggaatccaagtttaacgaccgcgtgcaatgccaacgtcaatatcttctttttataggtgccacccttaaaattcaaatttcacctgggcccggtcttt

SEQ ID NO: 132298 - DNA, 424 bp, Arabidopsis thaliana
ggagcacttaagtaatggctacaaagacatcaaatttaggtcatcttcttctgtctttgtttattctgctcttgtttatcttatctcaagttggagtcgcccaggccaaacgtctccaacaaaggaacaaattgcgtttggattgcgttcctcttcctcctccccctccacctctccgtggcatcgtcaaacctcctatcgcttcgtttcactctgcatcgcctaaagataaaggcccataagccataagtcatcatagtgcaggataagaggtcaagagagttttataagtattttgttatacaaaaccatgttgtatcatattttttatttatagttaaggtttttttttcgtgtctacaacacatgtacacacacaatcagacgtatatctagaataaaataaaaaagctattatcaaaaa

SEQ ID NO: 132299 - DNA, 746 bp, Arabidopsis thaliana
  unsure (1)..(746): unsure at all n locations
tgcgagacgacagaagggggaccaatcgagagacttgtggtcttcccggagatggtttcgtttacgggtttcgctttcgtatttggaattctacttgggattcttgcgatcgttacggcggaagttgtagggtttttgtatcttctgaagcgattgaatcggaaaagagatcgtcaggaatcgaattcgagttctgatccaaacttcaagagttttgatcctcgccaatccattgattttagtctcaacaaacagggagtgatctggatattggaattagatgaaaatgtaaaagattggatgaaggagaaattaccaaaagagcaaaagaaaatgggggcagcaaaggcgaggatgttcgattttaggaagaaagtgggagagaagtttgaagagaagaaacgtcacgttgaggaaaaaagtagacagattgttgaaaagatgagaggaccttgacacaataacaaggagaagaagcttctttctttctttttcaggtttcagacgcccacaaaactgatagtcagaagaaagtcaatagattagagtataggtattgggacttgtattcatgtttggtaaaaagatatcgagcattgcgaaatcgttctttattttttattattcagccttaagagttgcctnnnnnnnnnnnnnnnnnnnnnnnnnnnnnnnnnnnnnnnnnnnnnnnnnnnnnnnnnnnnnnnnnnnnnnnnnnnnnnnnnnnnnnnnnnnnnnnnnnnnnn

SEQ ID NO: 132300 - DNA, 783 bp, Arabidopsis thaliana
  unsure (1)..(783): unsure at all n locations
gaagagagggagattagggttttttgggtttaggaggaggagagcattgaaagggaaaacagagtttggtagaggtagttatgtgttcccatcttctgtagacagagagagtgaatacagtagaaaggaagaggaagaagaaaaagaagacaaaaggtttggttatgatgatactgatggtattagttgcagccaaagcagcaggttttgtgatgtgaagatctcaagcattagtagaacaggcagcttctctactctgcctgcaccaccttcttcttcttcaaagtctcacttttggacgaatgtgtatgcaggactaaagcaagtggttccatggaagagcaagaagactacagtttgagattctgccatatcaaagattcgaaagataaaacaccaagtaacaagaaagcttctatggtttctacaagtatttttaagcttttgtttatgatttttttcaatatttccaagaaaatgacacgactagtaaaaccattgtgaaacccagttttttttcacgcttgttgttgtgtttgaatgtttttgagacttttgtaaagagaaacagagaatcttacgatgtatcatggcttcatgattatggtacaagggatatttatcatgtttgtaaccacaaaaaaaagcaagaacctccccaggctcttatatatgtaaccgtcttgatcataaaaaaaaaaaaaaagnnnnnnnnnnnnnnnnnnnnnnnnnnnnnnnnnnnnnnnnnnnnnnnnnnnnnnnnnnnnnnnnnnnnnnnnnnnn

SEQ ID NO: 132301 - DNA, 420 bp, Arabidopsis thaliana
gaagccggtttcaaattaaggcgaagagagggtcttgtgagtcagaagagtgttgaagcaatgcttattacaagtcatgtgagaagaaactcccaacacaataatggcgacgctagcgagaaggagaattttgaggatgacattgtattggatgaggtttacagatcttatctcaaacggttagtggaaaattcgaaaagttcaagaactaatcctgaaaaagagataaaagtaaagtgtgaggaggatcatacagtgtctttgtctgattctgattctgatattattgtggttggagattgtccatttctggaagaagaggattctccatttgtgccatcaaaaagttataaagtgattgatttggatgaagagagcagtgatcaacgcaattcttggtttaggagggagataatgaat

SEQ ID NO: 132302 - DNA, 509 bp, Arabidopsis thaliana
agacgacagaaaggatggatagtttattacaagggtttttggatgagcatagagctaacaaagacagattggagtttaagaacaccatgattgctcatttacttgattctcaagaaaaagagcctcataactacagtgatcaaaccatcaaaggtcttatactgatgatggtagtaggaggcacagatacatcggccttaaccgtggaatgggcaatgtcaaatttattgaatcatccacaaatactagagaccacgagacaaaacattgatactcaaatggaaacatcaagtagtcgtcgtttgttgaaagaagaagatttggtaaacatgaactacttgaaaaatgttgtgtcggagacactaagactttaccctgtggcaccacttatggttcctcatgtgccatcttctgactgtgtaatcggtggattcaacgttccacgtgatacgatcgtgttggttaacttgtgggctatacatcgagatccaagcgtgtgggatgatcca

SEQ ID NO: 132303 - DNA, 1001 bp, Arabidopsis thaliana
  unsure (1)..(1001): unsure at all n locations
gaaagctgggacgccctggcaggacccggcccgaattccgggtcgaccacgcgtccgacggttgcgaaagacaaagagggctgtacgtttgttggctcgttattcaggtttggggagtcgtgaccagctgcgaaaccgagccttgtcacatgtgagaaggaacttctctctccaatgtttggagggcttgatgatattggggcagagtttcccagagcttaagagagacacaacaaaagcttcttattagatcaataaacctaaaatccaattacgagacgagagattcctcttgtttaccttcaaagtcatccaaggaaaatgggggaaagtcatcactagaagacgactgcccaaaactggccatcaatggtacaagctctgcagctgcagctacttcagctttgattttattttttcgatcctgaaatatgaacatcatatgatcttaagtcctgatttttccttaaacaaaggaatacataggagaataagacacaaagcaaacaaagccaataggagttggaatctgaaagatattagatgaagtaggccgtggggttgtgttttatggttagaacgagaataccttccaagcacgttctttccgctgcttctcacgcttcttaatttcatgtataaatggggcaaatgcatcaggaggcaaggattccttcatatcaatctcacatatctgaaaagattaccaaaccaaggataacctcatgagaaaatgtcaagatatagcaacacatgcagaagataggagccccaaagagaaaatatgcctgaagtgtagttgataaagaaaaatgacttaaaaagcggtagcgtctccttatcgcttctgattgggtaatggtttccatttccagtatctttccactcaatctgccgtttaatggatcagtantattaaaaaaaaaacaaacacaaagagcggccgctctagaggatccaagcttacgtacgcgtgcgatgcgacgtcatagtcttctata

SEQ ID NO: 132304 - DNA, 483 bp, Arabidopsis thaliana
  unsure (1)..(483): unsure at all n locations
cccccttaccgggccctttaacggtggtccatggtgttgtggncttnaaccaaaacnccnaaggatgtanggttgtgtttcttgcacctgtggttccgtttgagactcactgctgctgctgctgctttgaacgtttgttggcccgttattcaggtttgggaagccgtgaccagctgcgaaaccgagccttgtcacatgtgagaaggatcttctctctccaatgtttggagggcttgatgatattggggcagagtttcccagagcttcaaagtcatccaaggataatgggggaaagtcatcgctagaagacgactgcccacacctggccatcaatggtacaagctctgcagctgcagctacttcagctttgattttattttttcgatccttccaagcacgttctttccgctgcttctcacgcttcttaatttcatgtataaatggagcaaatgcatcaggaggcaaggattccttcatatcaat

SEQ ID NO: 132305 - DNA, 444 bp, Arabidopsis thaliana
gaacacaagcgatactgagctgaagtttctctcagagctgataaagacaggagctatctgctcagttgatgaactgtttcttcactgcacaggctacagcgactgcaccggtatcattaaaagcctcagaaacagtggcgtctttgtccatcaatggtgggaagactaataagcttaacaaatgaagctttataaactaaaactatgttgtttggtaagttggtgttgttttgttttccaatccttgctcatgtatagagcaaagccacagaagtttgctccagcgacccagcacttctgtggttctacctaaataagctgtcgtcgttatgaactttgttttgtgtgtttgttcaatgaagtttgctatgttgtgtgtttctactggttttcatgctctgtttcacaaacgcttatagtaccaaagtagcctgacgatttacc

SEQ ID NO: 132306 - DNA, 530 bp, Arabidopsis thaliana
  unsure (1)..(530): unsure at all n locations
nnnnnnnnnnnnnnnnnnnnnnnnnnnnnnnnnnnnnnnnnnnnnnnnnnnnnnnnnnnnnnnnnnnnnnnnnnccacgcgtgcgtgcggctgcgagaagacgacagaaggggaagagggaagacacagtcctctcacaactcttccacttctctctttcctacaaatttctcgttcctccgacctctctcgccggaaattgtgtagcatttgtctataaatgggtttggattctaaaggggctgatttggaggtaataagaaatgaaaaatctgaagcaaacactgtgtgtttacatgcgttttcagatttaacctatgtgtctcctgtggtgttcttatacctactcaaagaatgctataaacatggtagcttgaaggcaacaaaaaagttccaagctttacagtatcaagttcatggaggtctagctaataaacctcacccaggacctgctactttcattattaatgggctcactgtacttcctttattgggggtatatggggaaggctttaatcatttagtatatc

SEQ ID NO: 132307 - DNA, 881 bp, Arabidopsis thaliana
  unsure (1)..(881): unsure at all n locations
actcactatagggaaagctggtacgcctgcaggtacccggtccgggaattcccggggtcgacccacgccgtccgtacgggctgcgagaagacgacagaagggggaacctccgatttgactgcaccgtcggagctcgacgctgagctaagcttaaccaagagctgtcgtatattacactagcagtgaagatcgaatcttaaaaccatggcttctccgaccaattcacagaaaacagtttcggatgacgaggaagttgattactccatcaaaccggagttctatgattcagatattgatgataaagatgagctttggatggataagaagagagatggtcgtacttttgatgctcttcttagctgtccagcttgtttcaccactgtctgcttagagtgtcagaggcacgagcagtatgtgacacagtacagagcagtctttgtggtcaattgcaaagtaggtacagacacagttttgcaacagaatacaatgcccttaaaggttggtaaaagaaggagagattccgagatgcaagaaactggttctgaggatagcgaaaaagttaacccggtcttttgctcagcttgttccacagagatcggagtagttgacagtgaagagatctaccatttctttaatgtcattccaagcgagccttaaaacaacctggttttatgagttatttgtaacgagttctaaacaggtgattaggattaaagtttcgattgtttgcgttaatctttacgttgcatgtatatcgtttgataaaaatcaagtccctnnnnnnnnnnnnnnnnnnnnnnnnnnnnnnnnnnnnnnnnnnnnnnnnnnnnnnnnnnnnnnnnnnnnnnnnnnnnnnnnnnnnnnnnnnnnnnnnnnnnnnn

SEQ ID NO: 132308 - DNA, 740 bp, Arabidopsis thaliana
gaactcagcttatcgatattaggaagctgtccctgcagtccgtcgattccggtcgacacgcgtcgcgtgagagacacgagtacgtcgaagacgacagaagggtacggctgccagaagacgactaagggataaaggcgctattatcagccatgagtaatctcatcagtttgcctgttcccgagaatcgtcaaagcgattccgttgttgagaatgatacttctgagacaaaacctattctactctggagagcactgtacgtgcaagagctagtcaagggtgaatttggaggtacgatcagttccatgcctagtccagatggaaacttgaactacaatgagatagtggaatcagccgtgaagctatatgaaaagctcatggggagtgaagaattatttaaagaagggacctcaccggcggagaacacaacggaggaggaaaacgatggtggtgttgaaatagaagattgattgatgaatgaaaccattggttttaacgacttagaatacccatttatttatttgattgtaacatatagttaccccgttattagaggggaagcaggaagattggcagagggagggtgagcccttttcctttcttattccctagagagccactatgattagggaagaaattaaggatttaggaaaagttttttctcccttataataaaaaaaaaaaaaaccaaaaagccgcccgtttaaaagaatccaggctaaggaaggggtgcatgcaacttc

SEQ ID NO: 132309 - DNA, 696 bp, Arabidopsis thaliana
  unsure (1)..(696): unsure at all n locations
nnnnnnnnnnnnnnnnnnnnnnnnnnnnnnnnnnnnnnnnnnnnnnnnnnnnnnnnnnnnnnnnnnnnnnnccacgcgtccgtgcggcgcgagagacgacagaagggtacggctgctaaaagacgacagaagggtacggctgcgagaaacgacagaagggtacggctgcgagaagacgacagaagggtacggctgcgagaagacgacagaaggggaaagtcttctaaatcatttgggcgaaaagtccaaattaaatcaaaagatgttcaaagttgcaagagcgtcacagtatttggcgatcaccggtgctggtatcgaagacatcaagctttccaagaagtcatgggtgtttccatggcaatcttgcaccgtcttcgacgtttctccggtgaactatactttcaaagtccaagccatgagcgcagagaagcttccttttgttcttcccgctgtttttacgattggtcctcgcgttgatgacgatgacgcgctgattttgtatgctaggttgatttctcctcatgataaagattcaaatcatgtccatgagcttgttgaaggtgttattgaaggagagactcgtgttcttgctgcttccatgactatggaagagatctttaaagggncaaaggagtttaagaaggaggtgtttgataagnttcaactagaattaaaccagtttggtcttgttgatat

SEQ ID NO: 132310 - DNA, 870 bp, Arabidopsis thaliana
  unsure (1)..(870): unsure at all n locations
atgatctnnnnnnnnnnnnnnnnnnnnnnnnnnnnnnnnnnnnnnnnnnnnnnnnnnnnnnnnnnnnnnnnnnnnnnnnnnnccacgcgtccgtgcggctgcgagaagacgacagaaggatacggctgcgagaagacgacagaagggtacggctgcgaaaagacgacagaagggtacggctgcgagaagacgacagaagggcacggctgcgataagacgacagaagggggagacaaaaacacacacgacgaagaaatctccgggcggtcgaagaagatgaaatcgttcaaggaacaatacacgttggatgaaaggctcgcggagtcgcgggagataatcgctaagtaccctactcggattccagtaattgctgagaagtattgcaaaacggatctgcctgccatcgagaagaagaagtttctggttccaagagatatgtcagctggccaattcatctacgtattgagtgctaggttacatttgtctcctggtaaagccttattcgtgtttgtcaacaacactctccctcaaactgctgctctgatggactcggtctacgaatcttacaaagatgatgatggattcgtgtacatgtgctatagcagtgagaaaacctttggttgatccaataatgatgttagtgtctgtgtacatatactttaaacataagatgttcactacatcaaaagacatcaaacacttgttaagctttatatgactgctgcttgttttatccttagactttgttcatctgtgcacaatcgttctcctnnnnnnnnnnnnnnnnnnnnnnnnnnnnnnnnnnnnnnnnnnnnnnnnnnnnnnnnnnnnnnnnnnnnnnnnnnnnnnnnnnnnnnnnnnnnnnnnnnn

SEQ ID NO: 132311 - DNA, 641 bp, Arabidopsis thaliana
  unsure (1)..(641): unsure at all n locations
ctactataggaaagctggtcgcctgcaggtaccggtccggattccggtcgacccaccgtcgtacggctggagaagaaacagaagggggggcccaaccgcgcatacgatcgtcgacatcatggcggcaagagcccactagccaccccccccgaaccattgcgcctgggaccaataatccgccagatgattcacatttcccgagagaaccgattgtagttccgattccgacaaggtctctcgtttccacgtgtctgacagtcggaatgccgtttccatgctttgcgatccgtacatgccgacgcggcgcgattgggagatttccggattgcagtatcagccgggtcgacagtctcgtcccacgatgtgtgaccgtcgttctcatggtgcattctggtgcttcaccgcgcaatggactcggaatcccgatctcgctggccggtcgagaggggaccctggatgccgtctgacccctgggcgtcatgacagtgctctgctangcgactccgatgccgtcgtcaggtgacgtcgatacctttagctctctgcatctctagctcgttacccgatcgagagggctgacaatgtacgccgtacgggagtatcgaaccggactgtgaccgtactgtactgtcgatgcacgg

SEQ ID NO: 132312 - DNA, 882 bp, Arabidopsis thaliana
  unsure (1)..(882): unsure at all n locations
nnnnnnnnnnnnnnnnnnnnnnnnnnnnnnnnnnnnnnnnnnnnnnnnnnnnnnnnnnnnnnnnnnnnnnnnnccacgcgtgcgcccacgcgtgcgcccacgcgtacacccacgcgttctgccacgcgtacgtccactcttgcgtacggatgcgataagacgacagaagggggacttcgaaactttccgttaaaacttaaaagcaccttcctcataatctctggttactttgggaagaaaaatatcaattttggcgccatgtcagccttgtctgtgatcgaacaacgattgttaaagtgggacaagctcgcgtctttagtacccaaatcaaaaaaaactccttttccgattgatcgtctaaacgagcttttgaaagtctgtgctaattcaagttatctaagaattggagaatcgattcacgctcatttgattgttaccaaccaatcatctagagctgaagacgcgtatcagatcaattctctgatcaatctctatgtgaaatgcagagaaactgttcgtgcacgcaagctgttcgacttaatgcctgagagaaatgttgtttcttggtgtgcgatgatgaggggatatcaaaattctgggtttgattttgaagttttgaagctttttaaaagtatgtttttttctaggtgtaaatagtgtataataacaccttttggcagattattcatgtctgtgacaattatttccaaactcattggtttttacgctctatagcagagcttttgatatgaaagtttggtagtttatccaaaaaaaaaaaaaaaaaaaaaaaaaaaaagcggccgctctagaggatccaagcttacgtacgcgtgcatgcgacgtcatagtcttnctatagtgtgtacctaataggaatcg

SEQ ID NO: 132313 - DNA, 606 bp, Arabidopsis thaliana
  unsure (1)..(606): unsure at all n locations
tccnnnnnnnnnnnnnnnnnnnnnnnnnnnnnnnnnnnnnnnnnnnnnnnnnnnnnnnnnnnnnnnnnnnnnnccacgcgtccgtgcggctgcgagaagacgacagaagggtacggctgcgagaagacgacagaagggtacggctgcgagaagacgacagaagggaagagaaaaaagaaattatggataactacagggaaaagctcaggtcaatcgattgtaaacactttagttttggagatgggaattgtccattcgggacaagttgcttctacaagcacactgtgaagccaggttcatatgcatggaaatatcacaggccacctccaaggcgtccacgtccctatggaactaacttctcagacgtggatacacttgtaaatatgatcgggaatataatttcagaaggtgaatatggtcctattgggtttagagatactgacgatgacgaactgactacaacggatatgatgatgttactgatgcacatggatatcgaatctgaggactcgtccaatgaggatagctattagctacccatatcgaagttagttaactaaagtgagagtcttaggttatatggctatattatggtgttgggaattc

SEQ ID NO: 132314 - DNA, 549 bp, Arabidopsis thaliana
atttgactattttcctcttgaaatgtatatttgttggtgttgatatggatgcccctttaaaactcaaaaggggggttgtgggtgtgattccagcatgcgtatcataatggtcgtttgaagaaagtggttttgcggcatctggatgcagaagatgggcagactgtgatagcaaaggatataaggttgtccgacttccttgagaacatgcacatatgaacagagtctctcttagcccaataagggagaaggcaaagatgttgtgatgacatctttttttcttcttcctggggtgtttcccattcattgtaacgatttgatttgagttggaagattatgtcttagaccccaacgcattatgacttgcgttaagaggggatcattttattaattttgtatttttaacaaatatcactacttcctgcaaatcaacgcccatgagccgtaaaaaaaaaaaaaaaaaaaaaaagaaaaaaaagcggccgctctagaggatccaagcttacgtacgcgtgcatgcgacgtcaagactcttctatagtggatcctaat

SEQ ID NO: 132315 - DNA, 743 bp, Arabidopsis thaliana
  unsure (1)..(743): unsure at all n locations
gccttttgcatggcaggtatcaaggaattgggcggagcagttctccttcccactgggatggatgtcaatagcacactaaaggggcttgccccatatgccgcaagttttcgtattttgttgttcctagtgtaatctggttttcagctccagaagagaaaaaagaaattatggataactacagggaaaagctcaggtcaatcgattgtaaacactttagttttggagatgggaattgtccattcgggacaagttgcttctacaagcatgcgtatcatgatggtcgtttggaggaagtggttttgcggcatctggatgcagaagatgggcagactgtgatagcaaaggatataaggttgtccgacttccttgagaacatgcacatatgaacagagtctctcttagcacaataagggagaaggcaaagatgttgtgatgacatctttttttctttcttcctggggtgtttcccattcattgtaacgatttgatttgagttggaagattatgtcttagaccccaacgcattatgacttgcgttaagaggggatcattttattaattttgtatttttaacaaatatcactacttcctgcaaatcaacgcacatgagctatacggatgtagtaacgtggggctataatatttatcaaaaaaaaaaaaaaaagnnnnnnnnnnnnnnnnnnnnnnnnnnnnnnnnnnnnnnnnnnnnnnnnnnnnnnnnnnnnnnnnnnnnnngaaatcca

SEQ ID NO: 132316 - DNA, 1050 bp, Arabidopsis thaliana
  unsure (1)..(1050): unsure at all n locations
tgatctgccagcactaattcgactcacttatggaaagctggtacgcctgcaggtaccggtccggaattcacgggtcgacccacgcgtccgtgcggctgcgagaagacgacagaaggggagatttgatttctttgcgggcttgttaatggcgaacccagggcaatcaaagggatggataaagaaatggacgtctatggcttcatcggtttacttcgtcttgatcttattccagatccctctcttcagagttccatgtagatctggtatgtgttcatcgccaatccatgtgacatcgtctcagttgatttctagtgagatctttcctgttccgatgattaaggctctcttataccctggtgctgtagtcaatggccttgccatcaacatgacatttccaaagtgggaaaatgtgttagatatctacaatctcaccaatgtgaaaggagcttctgcagtgaccgatcttcaacgcctagaggttcttgcagggagctacttttctgtagctggggcgtttgtgggtttgctaaagcctggaaggatgagcatgtttgggtcattgctactagtatggggtcttgttaaagaagggatcttagggaagccagtaaatactgacccagccaaaactgtttatgtgtacccaactatggtgcttgcgatgatctgcgctttctctatgataaagtatgacttgaggaaagccacgagggcagctccagctcgtcccattgctaaacctctaatgagctcttcaaaatctaagctgaagtgagttttttgagacttaatagggcttgtgtcctgtctttgtaccaacacccgggaaaggaaaatgtcccggaaaatggcattgtcactatattttgctctcagttaccttatgtttcatgaattgtctattttctgggccactgctcagtagtcaatatcttcccataaaaaaaaaaaaaaaaaaaaaaaaaaaaaannnnnnnnnnnnnnnnnnnnnnnnnnnnnnnnnnnnnnnnnnnnnnnnnnnnnnnnnnnnnnnnntgtcctaatagattc

SEQ ID NO: 132317 - DNA, 531 bp, Arabidopsis thaliana
  unsure (1)..(531): unsure at all n locations
nnnnnnnnnnnnnnnnnnnnnnnnnnnnnnnnnnnnnnnnnnnnnnnnnnnnnnnnnnnnnnnnnnnnnnnnnnnnnnnnnnnccacgcgtccgcccacgcgttcgacggctgcgagaagacgacagaaggggatggaagccatcaagaaaatgaactacagaggctggcggactaaagttctggatataacttatgcaaaagaaagaggtacaaaagggttagaggagactttggaccgaatttgtgatgaagcaaatgaagcaataaaggagggctacacattactggttttgtctgatcgagctttctctgcaacacgtgttgctgtgagctccctcatggctgttggtgccgttcatcaccacctggttaagacacttgcgcgcacccaagttggtttggtagtggaatctgctgaaccacgtgaagtgcatcatttctgcacacttgtcggatttggagcagatgctatctgcccatattgggctgtagaggccgttataaattacaggttgatgggaaaatacca

SEQ ID NO: 132318 - DNA, 395 bp, Arabidopsis thaliana
  unsure (1)..(395): unsure at all n locations
tacggctgcgagaagacgacagaaggggaagataaaagattcaacgggaaaaaagctttatctgaagcctctgtgattgtaagggaacacactccattgacaaatctattcatgtgcctctggttcaatgaagttgtccgcttcacttcgcgtgatcaattgagtttcccatacgttctttggcgtttgaaagttctcaagaacatcaacatgttccctgtctgtacacgtaaagatctcgtcaatagcataggccatgtacgcaaggctaaaccgttagttaccctatgaatttactgtaagcttccaattcattggttattttagaatcttttttgtatttagcgtgtagacatagaaacagaactgacatgttttanactgaaaccgaacta

SEQ ID NO: 132319 - DNA, 477 bp, Arabidopsis thaliana
  unsure (1)..(477): unsure at all n locations
tgccgtcttatntggtntcntnatggnccnggncgaattcccgggtnacgagntacnagtgagactaagcngcgtccgagaaataatgattagagcgctgaccacgaggaaggttcgaggcagctacaagaagctcggcgacgaagaagaagcaggcgcagggcttttagaagtgaaaccggagagcgttcctacaaatccccatggtcaatccccgaaggtgaataaaccggtggagaaaaccaggggttcggctcaccctctatttagtttcttcgaaatgagtctaaagaggaagaagaagaagaagagcacgacgactgcaaaaccagaatttcgctaaggtactttggagtatgtcaaggaaggaggtgttttgggataacccttcacatggacctgccatattttccagatagatcggggaaaggtttccccgnggtnttaaattattnccgttnggaaaccctncctttt

SEQ ID NO: 132320 - DNA, 683 bp, Arabidopsis thaliana
tacggctgcgagaagacgacagaagggtacggctgcgagaagacgacagaagggtacggctgcgagaagacgacagaagggtacggctgcgagaagacgacagaagggtacggctgcgagaagacgacagaagggtacggctgcgagaagacgacagaagggccacgacagttatgtgataatgctggatttgatgcaactgacgtcttgaataaacttagacaaaaacacgccatgcaaagcggtgaaggagcttcgtatggagtggacattaacactggtggcatagcagattcttttgctaacttcgtttgggaaccagcagttgtgaagatcaacgcaataaatgctgcgactgaagcggcttgcctcattcttagtgtcgacgaaaccgtgaagaaccctaaatctgagagcgcacagggagacgccgcaggtgcaatggggagaggacgcggtggaggtcgtggccgtggaatgcgaaggcgataagctccgtctctaatgccaaacttgtgggattcttcttcttcttctctaatttcgattttgttgaatttttgttttgaagttaaaaaacctattattgggtttgtgtttgttcaattagaatactggttgggtatgtatgtctatacaatctgtgaaacataagttttagtgttgttttggttaaggagtta

SEQ ID NO: 132321 - DNA, 787 bp, Arabidopsis thaliana
  unsure (1)..(787): unsure at all n locations
ctcactatattggganagctggtacgcctgcaggtaccggtccggaattcccgggcggctgcgagaaacgacagaagggggagagagagagatgtcgttcatgtatgagaagagcaatacatggagatggctagtgatgaagacgcgagattcgagatccttcttcttcacgttcgctgctttatgtggtgtcattcctggcgttattggctatggagttatgcaggtcaccaattccagtaaccctgagctcgaagcccgcctccgtaaatctgctcgcccagatactctcatgatgggtaaagtaaaccaagagaggctagctgaatatcttggtgagttgaaacagaagcaggatacaaacgacagatacgttgctgctcttaggggagagactcttaccaggaagccttatcaaagaatccaaccaatgccaaagccagatgacacggtgacaaccaaaactcagtaaggatgaattattttaagagtcaatgttagtgaatgcctctcactcgaatcttttgtcgatacaaaaatggcgtgtttcctggccgtaatatcttttgtttttgaaaccggcatctagcgacacaacttttgtgctatgcaaacggctacaatgtcaatcacttcaaaccttttgttatgatgaataaaatgtaaaacttatgttttgtnnnnnnnnnnnnnnnnnnnnnnnnnnnnnnnnnnnnnnnnnnnnnnnnnnnnnnnnnnnnnnnnnnnnnnnnnnnnnnnnnnnnnnnnnnnnnnnnnnnnnnnnnnn

SEQ ID NO: 132322 - DNA, 761 bp, Arabidopsis thaliana
  unsure (1)..(761): unsure at all n locations
tnnnnnnnnnnnnnnnnnnnnnnnnnnnnnnnnnnnnnnnnnnnnnnnnnnnnnnnnnnnnnnnnnnnnnnccacgcgtccgtacggctgcgagaagacgacagaagggggttctggatatattgatggatttttatgtttttggtgaaaaggtgagaacttggttggagcaattgatcacgccttgaaagtgtttgataaaatggctcaggcaattggtccaagactgtatagttgctgcaactgcagaaaccatgttggacttcacgatgatatcatctctaaggcttttcagggaagaactgggcgagccttcttgttctcccacgcaatgaacattgtggtaggacctaaagaagaccggaatcttctaactggtctacacaccgtggctgatatatcttgtgttgactgtaacgaaccattgggttggaaatacgagcgagcttatgagacctcacagaagtacaaggagggcaagttcatattcgaaaaggctaagattgtcaaggaggattggtagagctgaggaacatgatgaattcattattggattggctcaaaaatgtatatagataaaatttggctttgtgatttcccaagtcatcatcagccatttttccagttcttcattgtctctctctgtatgttaattaagtcgtctcttgtgttcaaactatggatttgttcgaacaaggtttctctgttaataaacatgttaatagcttnnnnnnnnnnnnnnnnnnnnnnnnnnnnnnnnn

SEQ ID NO: 132323 - DNA, 323 bp, Arabidopsis thaliana
  unsure (1)..(323): unsure at all n locations
tggcacaccatccgtaccggctcagtttttatccaagacattgctacgagaaagaagagcagatgaggagtatgataaacttgtgccttagtttgtgcttggcgatatatgggactcatttgcagagtggagtgcttacggcaccggtgtgcctcctgttttgcataccaacaacgatcgtgtgatccaatactaagtcccttctttgacagacattcagtgctatgctcattcccatgccttganttcatctcttaaatcaatgggtcctgctgctactaccgacagtgcattgcaggatgctgctaacgatggtttcagcg

SEQ ID NO: 132324 - DNA, 797 bp, Arabidopsis thaliana
  unsure (1)..(797): unsure at all n locations
tagggaaagcctgtcgcctgaggtacncggtccggaattccgggtcgcccacgcgtccgtacggctgcgagaagacgacagaagggcaataagaaaggaacaatggagaagtatttaccggcggcggctgagaaaccgacggaaaagatgagtacgtcggactcaagatgctcaagtcacgtgatttcaccggacgtcacgtgttctgataactgggaggttgagagtgagcccaaatggattaatctggaagacgcgttagaggcatttaatgatgacacgtccatgtttagttccattggtttgttgcaaaatgacgcctttgttcctcagtttcagtaccagtcctccgatttcgtcgattcgtttcaggacccgttcgagcagaaaccgttcttgaattggaattttgctcctcaagggtaaaaataatcggcaaaaagttgaagcttttcagagtcttcgatcaccggcattgtgtcggatcctgacccggagacccagtcgggtcatacgaattacataatcgggttattgagatttccccactttggatttccgagactaaccaacttaacggattctggggtaattgggggggtttgcccaggtgaatccccctgagtcagccagtttcgattttttggttttggtttgtaatgattcattaaatgtctaaaggtatccccaagtagaccccgaagaactgtaaaaacaatcgcggccaacccttatgggtcagggatagataacatggaaaaaaaaaaaaaaaaaaaaaaaaaaaaaaagggcggccg

SEQ ID NO: 132325 - DNA, 556 bp, Arabidopsis thaliana
  unsure (1)..(556): unsure at all n locations
ttgggntcccgggtctgggggnaanaccggggggcctttttttcccgccataccaagcccggggagaaatggggaagacaagaaggttagggaattggccctaaggccgggttctggtaaggatgtgccgcggatcttccccttggtagtattttgtaaccgagccctaggcccatcctgcccacccttatggatggtctcttaaccataactcttatgttaagagatatgtcttataattaacaaaagtgacttaaagtctcttatataagaaattttgttagttataaaacatgtctcttagcataagaattgttttaagagatcatcaataatgatgatctaagaactattatactatgttccgtctcgattttgaaagtacttaaacgtcgttatcgtgtttgtctcggcgttttaaattcccctgtattagtaagaatttatttttaaaataaaaaaaaaaaaaaaaaaaaaaaaagnnnnnnnnnnnnnnnnnnnnnnnnnnnnnnnnnnnnnnnnnnnnnnnnnnnnnnnnnnnnnnnnnntgtcctaa

SEQ ID NO: 132326 - DNA, 849 bp, Arabidopsis thaliana
  unsure (1)..(849): unsure at all n locations
cttcttgacgattttgaatttgttactcagatgcagaagcttgtgcaacttccgcgttctccaaatgtggatggcatcttgaagaagtacattgacagccaaatgaagaaacatggcagggtaacagattcattagaggaaattctgaaaggcttgcgttgctactttgacaaagctttaccggtgatgttgctttacaacaatgaacggaagcagtacgaggaatccgtatcagggggtgtttctccttcaactgtgtacggagcagagcatttgttgcgactctttgtgaaattaccggagttgctagtacatgtgaatatggcagaagagacattgaaggaattgcaggacaactttgttgatattctcaggttcttgaggaagaatcagagtgtgctttttgtatcgacatacaaagcagtggaagaaatggagaagaaagaaggttaggaaattgtgcctaatgacgtgttcttgtaagtatgtgcagcgaatcttctctttgtagtattttgtaacgagacctaagaccatcctgaccatccttattgatggtctcttaacataactcttatgttaagagatatgtcttataattaacaaaagtgacttaaagtctcttatataagaaattttgttagttataaaacatgtctcttagcataagaattgttttaagagatcatcaataatgatgatctaagaactattatactatgttccgtctcgattttgaaagtacttaaacgtcgttaaaaaaaaaaaaaaagnnnnnnnnnnnnnnnnnnnnnnnnnnnnnnnnnnnnnnnnnnnnnnnnnnnnnnnnnnnnnnnnnnnnnnnnnnnn

SEQ ID NO: 132327 - DNA, 427 bp, Arabidopsis thaliana
tggggagagggggcttttgaatttttttgctcaacttccaaatcgtcgccggcgatagaaaccctagatttgattctccgtcggttatatccagcaatgtcgttttttcccccacagcaacaacagacgcctcagccgctgtttcaaactcagcaaacgtcgttgtttcagccgcagcaaaccaattccatcttctcgcaatcgcaaccacagcaaaccaattccatcttctcgcaaccgcagcaacaacagcaaacgtcgttgtttcagccgcaacagttccagcagcagcagcaacagctaaatcagcaacagcagcagcaagtacaacaacagttgtatttgttcaccaacgataaagctccggcgaattacagtactaagtgggccgatcttcatcccgattctcagaaactcttgcttcaga

SEQ ID NO: 132328 - DNA, 635 bp, Arabidopsis thaliana
  unsure (1)..(635): unsure at all n locations
gcctgcaggtaccggnccggaattcccgggttacccacgcgtccgacacgcgtccgcccacgcgtccggcgagaagacgacagaaggggacgcttgagatatctttccccaaattcgaaagaaccctaattttttccgattccgattgatcaaacaagcgaatcccgattaactgatcgaggagatgggtaatacagataagctgatgaaccagatctttgaattgaaatttacgtcaaagtctctgcagaggcaagctaggaagtgcgaaaaagaggagagatcggagaagctcaaggtaaagaaagccattgagaaaggtaacatggatggtgctcggatctatgccgagaacgccattcgcaaacgcagcgagcagatgaactaccttcgtctctcttctcgattggacgctgttgttgctcgactcgataccccaggctaagatggctaccatcaccaaatcgatgaccaacattgtcaaatccctcgaatcgtctcttaccactggcaacttacaggagatgtctgaggccgttgggttgcgttttnggaaaaagtttttnaccatgggaggcccacctgngttntgggtaatcantnggtgngnttcttnattttngctcccaggggng

SEQ ID NO: 132329 - DNA, 724 bp, Arabidopsis thaliana
  unsure (1)..(724): unsure at all n locations
anggggtttgggaggggtttccttgggccggaagggnctggttccccggntttaggccggacccctttttgggnagntcccaggcgggaccgggganggaggaaggttggtgatttttccaaccagggaggaaggcaaccgggggntnggcttccaaaaagctcttgccagggagtgaaatcccatggttcaatatccctgangcttggagatcantncccgtaggattgcttaaatggttgtcaacggccatcccaagaaagcaaggttgaaaaagctcttgaaaattcagaagcaacttgttttgatgatgatgatgatctgatagatattgaagcattgttggaagatgatgacacattgatgttgcctatgtcctcatctttgtggaccagttaaatcactctcaagctttgttgtgatattgtgtcacagtattattgactcattaaacttgtaaattcttgtgtaatcactcttctcatatactgtaactgcattcatgactctaatttaaatgatatatatttgaaacataaatcaaacttatgtnnnnnnnnnnnnnnnnnnnnnnnnnnnnnnnnnnnnnnnnnnnnnnnnnnnnnnnnnnnnnnnnnnnnnnnnnnnnnnnnnnnnnnnnnnnnnnnnnnnnnnnnnnnnnnnnnnnnnnnnnnnnnnnnnnnnnnnnnnnnnnnnnnnnnnnnnnnnnnnnnnnnnnnnnnnn

SEQ ID NO: 132330 - DNA, 759 bp, Arabidopsis thaliana
  unsure (1)..(759): unsure at all n locations
agctaccacgcctgcaggtaccggtccggaattcccgggtctacccacgcgtccgcgcgcgcgtccgggagaggagatcagctttggatgagttgatgaaggaggaagtatgaagaagaaggagaggatgaatcggaaagattactggttgttcgaagggatcattgtgaaggtgatgagtaaggctttggcagagaaagggtattataagcaaaaaggtgttgtgaagaaagtgattgataattatgttggggagatcaaaatgcttgattctaaacatgtgttgagagttgatcaaaaggagctagagactgtgcttccacaaattggagggatggtgaagatagtgaatggggcatatcgtggttcgaatgcaaggttgttgggtgtggatacagagaagttctgtgctaaagtgcagatcgagaaaggtgtctatgatggaagagtcatcaagtccattgagtacgaggacatatgcaaacttgcttagttatatcttttagaccatatcgggttttacgatgccttgtatttctgcttgaacctctttttttttatatacaagtgaagcactctgtttcctgatagctagccgcgttaaaaaggtactgcagatgaatctatttcacacatgttattcgatctggtttgtagaacgaattgttttatgtaaaaaaaaaaaaaaagnnnnnnnnnnnnnnnnnnnnnnnnnnnnnnnnnnnnnnnnnnnnnnnnnnnnnnnnnnnnnnnannnnn

SEQ ID NO: 132331 - DNA, 444 bp, Arabidopsis thaliana
gtgaatttggtggtgttctgtctagacaagaaattaccagaattaccagatcggactgctgtgttgctcccagtaatctcaaaagacagaacaaaagaagagaaccacaagctgttgaatggaaacggtgttgaccctgctgattggagaccgagggctcaggtgaacgggaagattgacagcaacggagttcacacggataacacaatgaatggcgcgtgaaaagatctaattatatgaaaagatggacagcaacagtgtgtagtttttatctgctgtgatgaagaaaatatcacaattcttggcttaagatttccttgtaagcattttttgttatagactttacaacagtagtcatggatattgttagcccgtgccactccggttttctggaattggcaacccacaaatgattgtcgtctgtgatattaatatatataccca

SEQ ID NO: 132332 - DNA, 504 bp, Arabidopsis thaliana
  unsure (1)..(504): unsure at all n locations
actacagggaatccagcaagcctgcttatgcaagcaaaacccgcttttctcatcgagaactatgcggatccaaaactgtgggctgtgttggaagaacttgataacaagtcttaagtctcacttgtttggcttatggaaacccacacatgcatgagcagcctctgaagtttaccttatgtcttagatgatcattgttgaataattcattgggagtttatgacaatgggagctttcaaatatctgattattttgtattgatacatgcacaatgctagatttgtatccaggagatagttgcataaaccaatatactataccctcggatcttagcttattttcattgatatcttgttgttttgtgctgtaaacatatcagcttttgaatacatttggtccatggcgtnnnnnnnnnnnnnnnnnnnnnnnnnnnnnnnnnnnnnnnnnnnnnnnnnnnnnnnnnnnnnnnnnnnnnnnnnnnnnnnnnnnnnnnnnnnnnnnnnnnnn

SEQ ID NO: 132333 - DNA, 495 bp, Arabidopsis thaliana
  unsure (1)..(495): unsure at all n locations
tcggaattcagggtcgaccacgcgtccgcccacgcgtcggcccacgcgtccgccaacgccttccgttacggcttgcgagaaagacgaacaagaaggggtttcacacgagaatttgaaaaccggaaaaacattcttatggccacaatgtcttcttcgtctcctatcaaattggctgattttggactggcaacctatataaagcctggcgaaaagctgagcggaacagttggtagtccgttttatatagccccggaagtgttagcagggggatataaccaagctgctgatggctgccgatttgagattttctgcagagccatgggacaatataacttcatacgccaaggatttgattcgcgggatgctttgtgtggatccttcccaaaggttatcagctgacgaagttctagctcactcttggatggagcagttatctgaatcaggtcaagaacantatgatcaggatgggtttggttgtgaaggatggagaatggg

SEQ ID NO: 132334 - DNA, 339 bp, Arabidopsis thaliana
ggctcacaaatgtttgaaagaagaaaaaaccctaaacccccaaaatttgcttcgagaagaaaatgaatggtgtctctcgtcatcttcgagcttcttcacttctttcattaattcgcagctatggtggaatcaattcggtctgtcgattttcgtctcaatctgatggcttctctggagggagattcagagagcaagtgccagtttctggagagtctgcaaataattcaggcttatcaaacacgggaagaatcggttcctctccggagcctaatccttcgactttgagaacttttggtgatatgatagcaggcttgttaaacagaggagtcaatggtttct

SEQ ID NO: 132335 - DNA, 789 bp, Arabidopsis thaliana
tcaagttgttcttgtagttgtgggcgatagtgtagatctcaacgccatcgaagaagaaattgccaagctgtgcaaaagccttcctagaggagagtttgcttcaaaagcactaagtcacagtttcacagtgtttgctcgagatatgattgaggcaatatctttctcaaaatctatatgcaccccgaacattttgatcatcaatgtcaaagacgctgagaaatgggggggcctgattgagaacgcaggctcggttttcataggaccatggactccagagagtgttggggattatgcgagcgggacaaaccacgttcttccaacatatggatatgcaagaatgtacagtggcgtctctctcgactctttcctaaagttcatgactgtacaatctttgacagaggaaggtctgagaaacctcggcccttatgtagcaactatggctgaaatcgaaggtttagatgcacacaagagagccgttactctcagactcaaggatatcgaagccaaacagcttgcataatccaattgagatttatattcagacaaaagaggcaaaaattcgttttgtattgtatgaacatatttggtttcctgagatggcataacaataaaataagagatgttggaaaactcttaccataatcttgtttttcattctttaaatctaaatccttccgtatgtttgaacccaaaaacccaaaaaaaaaaaaaaaaaaaaaagggcggccgctctagaggatccaagcttacgtacgcgtgcatgcgacgtcaagcttttttatagtgtca

SEQ ID NO: 132336 - DNA, 545 bp, Arabidopsis thaliana
  unsure (1)..(545): unsure at all n locations
gacactgagaagaaaaatccctcaggttatcgaaaattcccggattttactctttgggcggtggccgatttcttacgcgctctttttgtggcgactgttgtatacgcgcgagccttcatggacacgaaggcggttggagtttctaaggatacggcggcgtcgatggaagcgtcgacggtgtttcctgggtttaaattctcgccgacggatgtggagttgatttcgtattacctgaagcggaagatggatggcttggagaggtccgttgaggttataccggaccttgagatttacaatttcgagccttgggatttacccgataagtcgattgtgaaatctgatagcgagtggttcttcttctgtgcgcgtgggaaaaagtatccacatggttcacagaacaggacgagcaacgaagattgggtacttgaaaagcaacttgggaaaaagcgtattttaagncttggttntaaggcatttgncaaagnggccgtttntttcnanattnggcggtcnccaaangngaaaacntncctggttttnnccag

SEQ ID NO: 132337 - DNA, 739 bp, Arabidopsis thaliana
  unsure (1)..(739): unsure at all n locations
gcctgcaggtaccggnccggaattcccgggttgacccacgcgtgcactacccgagaagacgacagaagggggtagtatcgncgggattttttgaccggagaaatggggaggaggattttgaacgatgcgttgtggacgattgtgaatgctgagagacgaggaaaagcttcggtggagctcaaaccaatcttttttgtttgtttggcggggggagaancangaaggagaaaggggataccaagaactttcaagtgtatgacccccatagaggtgggagaatcccagttgatctgccagggggagggttaatgactgcaaagctcttcccctacaggccaagaccgttaggccaaaaggaggttgagaaatacactgaacgcacacttccaaccacgtccagtgggggttatgttgtaatcacaactccggatgggattttggaccatgaaggaagcaatcaaacggaatgtgggtggtcaggttcttggcttcttttactgaatagcttgagctagcacatggcaagaaccttctagtgtcaaaggattcaacaaaagattgaagtttcggtccttctcctgttgctttttgttttttgtaacttgcattgtctttgaacagattggcaattattagataacacatttgttgctaaattcaaagatcttgttgttagtttatattttggacgagaaatttgttcttccatagctatctgaataatctatatttcttctat

SEQ ID NO: 132338 - DNA, 431 bp, Arabidopsis thaliana
  unsure (1)..(431): unsure at all n locations
ggtagtatcgtcgggattttttgaccggagaaatggggaggaggattttgaacgatgcgttgaggacgattgtgaatgctgagagacgaggaaaagcttcggtggagctcaaaccaatctccaccgttatgtcttcgttcttgagaatcatgaaggagaaaggttatatcaagaactttcaagtgtatgatccacatagagttgggagaataacagttgatctgcaagggagggttaatgactgcaaagctcttacctacaggcaagacgttagggcaaaagaggttgtagaaatacacttgaacgcacacttccaaccacgtcagtgggggtttatgttgtaatcacaactccggatgggattttttggcccctgatgnngcattcaaacgggatnttnggtgggncaggttctttggcttcttttactt

SEQ ID NO: 132339 - DNA, 470 bp, Arabidopsis thaliana
cgaaattcgcgggtcgacccacgcatccggaagacgacagaagggggaactgcacgatatgcaagttgcaatacacatcttggaattgagcaaagtcgacgggatgatctagaatcgctgggatatgtgcttccgtatttcctaagaggaagtcttccatggcagggtcttaaggctgttgacaagaagcagaagtatgataaaatctgtgagaagaagatatcaactcccattgaggtgctatgcacaaatcaccctgtggagtttgcatcatattttcattactgccatacactgacatttgatcagcgcccagattatggattcttgaagcggctttttcgtgatttattttcgcgggaaggatatgagttcgactatatatttgactggactatcataaagtatcaacatgcacataaatctagaaatcagtctcaggcagttcctgagtctagcaatcctcgtgg

SEQ ID NO: 132340 - DNA, 540 bp, Arabidopsis thaliana
  unsure (1)..(540): unsure at all n locations
gagcagttgatgttttcagaatggcgagatctcgatgggaaaagaggcaagcaaaagttttgaatcaagctagaagtagaatgatgaagaggaaaaacacagatgaaacaccttcctattgggataacctctggggcaaacagaatgaataccagaaaagcgaggaagaagtacaagaacgagcacagcgagccgccgcagcagccaggagatggagggaatactcacgaagaggcgtggataagcgccccaccttcaaactcccagactccgcctccagaggagacaactgaaaccatagccagaaatcacttatagtttatataggtaagcaggtttcttactagattatatatctatatatgtaaatgtcatgtcgcgttctagacctgtatagctttgttctcacatcgattaaggaagaaaaaaacaagtgtatttaacgttaaaaaaaaaaacccaaagctatttnnnnnnnnnnnnnnnnnnnnnnnnnnnnnnnnnnnnnnnnnnnnnnnnnnnnnnnnnnnnnnnnnnnnn

SEQ ID NO: 132341 - DNA, 448 bp, Arabidopsis thaliana
cgcctgcatgtaccggtccggaattccttgttcgacccacgcgtacagttcggttgtgagaagacgacagaatgaataccagaaaagcgaggaagaagtacaagaacgagcacagcgagccgccgcagcagccaggagatggagggaatactcacgaagaggcgtggataagcgccccaccttcaaactcccagactccgcctccagaggagacaactgaaaccataggcagaaatcacttatagtttatataggtaagcaggtttcttactagattatatatctatatatgtaaatgtcatgtcgcgttctagacctgtatagctttgttctcacatcgattaaggaagaaaaaaacaagtgtatttaacgttttcgatttctgtattatactatttaaaaaaaaagtttgcaacgcctagataaaattaaaatacattagttatgt

SEQ ID NO: 132342 - DNA, 358 bp, Arabidopsis thaliana
ggtacataaaagcttaaaagaaaacacaaagaatggggagagcaagagaaataggagaaggaaactcatcgtcgttaagggaacaacgaaacctcagagagaaggatcgaaggatgcgcatgaaacatctcttctctatactttctcctcatgtttctcccactcgcaagttaccagtgcctcaccttatagatcaagcgacatcatacatgatccaattgaaagagaatgtaaattatttgaaagagaagaaaaaggacattgttacaaggagaactcgggaatctctacgaagggtcgtttcttctacccaaactcagtattcattcgcgggatttcgacatagaaatgaatctga

SEQ ID NO: 132343 - DNA, 644 bp, Arabidopsis thaliana
cgcctgcaggtaccggtccggaattcccgggttgacccacgcgtccgtacggctgtgagaagacgccagaagggcacagaactttggctggagtatgagaacaatgcttctttagaagcaaatattgtaaaagacttcgataaggttgagatgattctccaggcgctagaatatgaagctgaacacgggaaagtgctcgacgagtttttcatatcaacagcaggcaagtttcaaacagaaattggaaaaagctgggctgctgagatcaacgctaggagaaaaagccaattgacaaacaggcagagatagtaaaatccagttgcatcataccttcaatcttcctcaactatcaacagtagaatctcggaaactaagcagactcctcatgaaccaaaaggtacaagcttctagtgaaattttcagttttgtagttcaacgaacacaaagtccttgtttttttaacttccccttttggttactagttgaagtagaaaatgctttttttttgagaaaagtgatcaaagtttcttatgaaaatctgaagttcgaggttcctaatatgattaggttgtagtccccaaaaaaaaaaaaagggattaacccacccagcgaccgctctagaggatccaagcttacgtacgcgt

SEQ ID NO: 132344 - DNA, 620 bp, Arabidopsis thaliana
cgcctgcagtgtaccggtccggaattcccgtttcgacccacgcgtccagcgcgctgcgagaagacgacagaaggatagagctgagcttgatgggatgtatgaatgtattctttgtgcttgttgtagcacatcttgtcctagttactggtggaatcctgagtcttaccttggtccagctgctttgctacacgccggctccgtggaggaggcgacagtcgtgatgagtacactaaggaaagacttgacgctattgacgacgaggtcaagctttaccgttgccatacaatcttgaattgtgctcgtgcctgtccaaagggtttgaacccaggaaaacagattactcacatcaagcaacttcagcgctgaaacagctaagttttgtgtgcgggactccgttgggaaactcatcagtcttaacgtttgaagctaataatcttcacaaaacctcttcggattttcaaatcattcttgtattgttgttgccaaatattagcgccttaaaaaaactcgtttgcaagtcttcccaagtagatgagctttgtggttgtatcttgctgaaaatctcctctttaagtaataaaactcgagtaaacttaaacctaaaaaaaaaaaaaaaaaaa

SEQ ID NO: 132345 - DNA, 482 bp, Arabidopsis thaliana
  unsure (1)..(482): unsure at all n locations
gtccggaattcaagggtcgaccacgcgtccgcccaagcgtccgtacagaagacgacagaatgggactgtaagctcaagagatgctgagtacactgagctgcgatcggcgactgtctcttgtccgggatagtgaaagatgaagctgaaggttgtgtatcgtaaggtctccgattacatctgttacgatctgaaagaaatcgtcttaccttcatcacttcccgatcctcctcacgtcgttaaacgccgcaaattgacttggcacgagcgattcctcgtgttgaaggaagcttcaaggctttatgctgcaagctgggtaagagatataggtcctgaacttcgtccaaatgattacaagaagcaaggggatgctgagcctaaaaaacaagcgaaagaggcagagaacgagccctcttgttttggaagatctttgcgntanctgcaaagaggtggcaatggagactttaagggcctttcttttacat

SEQ ID NO: 132346 - DNA, 434 bp, Arabidopsis thaliana
  unsure (1)..(434): unsure at all n locations
ctttttcgtccgaagacgacagaaggggggccgactcttactgacctcagagctcagcaaaaatggttcaacgtcttgtttaccgatcacgtcactcttacgccaccaagtccaaccaacaccgcatcgtcaaaactcctggtggaaaattgacttaccagacgacgaacaagagagctagtggacctaagtgccctgttactggcaagagaatccaagggattccgcatttgagacctgctgagtacaaaaggtcaaggttggcaaggaacgagaggacagtgaatcgtgcatatggtggtgttctatctggagttgctgttagggagaggatcgtcagggccttcttggttgaagaacagaagattgtgaagaaggttttgaagcttcagaaggcganagagaagactgcacaaagagttagagaaaacttt

SEQ ID NO: 132347 - DNA, 508 bp, Arabidopsis thaliana
cgactcacttttagggggactaccacgcctgcaggtaccggtccggaattcccggttcgacccacgcgtgcgcggccgcgtgggtgcgagaagacgacagaaggggaagaacattggaccggtggttccatcgaagttcttggataaccggttgccagatgacaaagattacgaactcgagaactccaagacagagccagacgagtctggtttgatggggttgggaaacaggccggcgaagtcggtggtttacgtggcgtttgggacattggtggctttgagcgaaaaacagatgaaggaaattgcaatggcgattagccaaaccggatatcacttcttgtggtctgttagagaatccgagagaagcaaactaccctctggttttatcgaagaggcagaggagaaagactctggacttgtggctaagtgggttcctcagctagaggttttagcacatgaatcaatcgggtgtttcgcgtcacactgtggatgggactcgacattggag

SEQ ID NO: 132348 - DNA, 1198 bp, Arabidopsis thaliana
  unsure (1)..(1198): unsure at all n locations
cgcgtccgcgctgtcgtcggagtcatccatggcttctggaacctagatgaagatcgaaaggctctacgagttctccagccggatttggtgctcttcacaggcagcttctctgttactgacgtcaaattgatttccttttttttttgaatttctccatttctcttcacactacctctaatgattttaattaaagttagaacatttgaatccaattccaaattctgtcaggtgattttggtgaagaaaacgtcccactggttcaaagtgttgccgctcttactttccctaaagcagtcatattggggaatcatgatgcctggttcacccaagattttccaaggaaagaaaaacaaaaacaaaacggtgttcaaatgcaactcgatatccttggtgacgggcacatagggttatcaacgcatggacttcccatcttttaagctcagtattgttggggggtcgacccttttcacatgggggggatcgattgtttcggaaaaatctgcttgtccagaggtatggagttcatgatatggaagccagtgctgggagtatttgtcgagctgcacatggaacaccggaagatcacgtggctataattctngctcacaatgggccaacaggtcttggttggcaagcagaggatatatgtggaaaagactggggggctgaaggcggtgaccatggtgatccagatctagagcaggcgatacgacagttgaaggagacgactaagttgtcgattcctttagttgtgtttgggcacatgcataaggagctgcaacgggggaaaggaaatcggaaaatggtagtgcaagatagtgacaaccagactgtgtatgtgaacggtgcaatagttccaagggttaaagaggcaaagaaaagaggagcagcagagtctgagagtggtggcacaacaagagctttcacattggtggagattttagatgggaaaatcaagaaaatagcagaaatttgggtacatgtaaatggaagtatggctaagattgtggaggaaaatactttgtttgaagatgtaacctgatttgaaatttaaacaattaattcgggacaagactgtaataactaattatacatttgtcttggcgaacaagtcccttttagaaaaaaaaaaaaaaaaagggcggccgctctagaggatccaagcttacgtacgcgtgcatgcgagcgtcatagcttc

SEQ ID NO: 132349 - DNA, 338 bp, Arabidopsis thaliana
ggttctaggtggattcttaagaaaaagaaggaaacgaaaacagaggaataacaatggcagggagaataagctgctgtctaaatcttcctcccctagattcaaattctgcacaatcattagcttcactgctcaagacaacgtcaaagatctcttgtaggagaacagaaaatgagacagagccacggaaaaacaagtgttcttttgtcttgggggtggcggcaactgtcgtaatcggcgggattcagatcaatgatgttgcatcagtggaagctgcggttgtgaaatcgccggtagaagagatggctgcgggtgtggtgccgccgcggaggtggagtgac

SEQ ID NO: 132350 - DNA, 808 bp, Arabidopsis thaliana
  unsure (1)..(808): unsure at all n locations
nnnnnnnnnnnnnnnnnnnnnnnnnnnnnnnnnnnnnnnnnnnnnnnnnnnnnnnnnnnnnnnnnnnnnnnnnnnnnccacgcgtccgtacggctgcgagaagacgacagaagggggtcgtgcgatacagttctgggtttgctgaagaagactctggaaaaaagttcatccatcacaattgattcgtgttcttggaacgaatctatcgattcaaacacatgaaacattcggtgaatcggcctccgacaccagatgaagacgatgtggcggatggtttcgagaaagacaaggtcacgcttcgagaaatcatcaacgtcaagttggtggagagtggagagaaggagaatctaatggagcttgtgagagatagattggtggagtgtggttggaaagatgagatgagaattgcttgcagggagcatgtaaagaagaaagggagaaaagatgttacagtcgatgaactgatccgagtgatcactcctaaaggcagagcttcagtaccagattctgtgaaggcagagctgttgaacagaattcaaaacttcattgtatcagctgctctttgatggtgttttgacaattttactacgaacatggtgtcgttgtctctatgttgtggtttttagttgtatccaaactcctaccagatagcagccaaattttttttatcaaatgtatcatctttgctgttgtagaaatataaaaaaaaaaaaaannnnnnnnnnnnnnnnnnnnnnnnnnnnnnnnnnnnnnnnnnnnnnnnnnnnnnnnnnnnnnnnnnnnnnnnnnnnnnnnnnnnnnnnnnnnn

SEQ ID NO: 132351 - DNA, 793 bp, Arabidopsis thaliana
  unsure (1)..(793): unsure at all n locations
cgcctgcaggtaccggtccggaattcccgggttgacccacgcgtccgtacggttgtgagaagacgacagaagggatcgctgtggagccatggaatgcaggaaactatgttcaattatccaacatatactctgttggtggcagatgggacgaagctgctgaagtaagggacatgatgaacaagaaaggtatgaagaagatcccgggatatagttggatcgagttggaagggaaggtccatgagtttctagcagatgataaatcttatcctctaagcgacaagatatatgcaaagctagaagatttgggtaatgaaatgaggcttatgggttttgttccaacgacagaatttgttttcttcgatgttgaagaggaagaaaaagaaagggtcttggggtatcacagcgagaagcttgcggttgcgttagggctgatcagtacggatcatggccaagtgattcgggtggtgaagaatctaagggtatgtggagattgtcatgaagtgatgaagttgatatcgaagatcacaagacgagagatcgttgttagagacaacaataggtttcattgttttacaaacggctcttgttcttgcaatgactactggtgagctcgctatggtaaaacaaactgatgtgaaaacgtaattgttttgtagctttgacacctccggaagaaataaacatatttttggtgttaaaaaaaaaaaaaaagnnnnnnnnnnnnnnnnnnnnnnnnnnnnnnnnnnnnnnnnnnnnnnnnnnnnnnnnnnnnnnnnnnnnnnnaagttaatcg

SEQ ID NO: 132352 - DNA, 440 bp, Arabidopsis thaliana
agagagtagtagcttatgggagttggagaaaagaacctattgtccaagaaaacgagattcatcgtcagatgtcaaaaaccgattccttacactaacacttgcacctgaagatgtcaaggatggtaatttgcatcttccttgtcaattcatgagaattaatggcatcaacaagcctgggcagataactttgttgggtagaggcggtatgaagtggtttgcatatttactgtcaggagatggaactgccgttgtgggaaatggttggaaaggtttttgtgaggcgaatggtgtgatgttaggagagacttttgttttggaattcattcccaaagatgatacaaatcatgtagttaagttctacaccaagtaggggggaccaaatacgtaaatgttagttagcactttttcaagatttctcaaatgttttctccggatatcaa

SEQ ID NO: 132353 - DNA, 813 bp, Arabidopsis thaliana
  unsure (1)..(813): unsure at all n locations
nnnnnnnnnnnnnnnnnnnnnnnnnnnnnnnnnnnnnnnnnnnnnnnnnnnnnnnnnnnnnnnnnnnnnnnnnntcgccacgcgtccgtagagaagaccgacagaaggggttcttcagttggggaagaggattctgcggcggccctgatgttcatgcccctcagagcttgccttcacctctatctttcagagaagttgctgtaggatggaatcatgctttactactgaccgtcgatggtgaggtgttcaagcttggtagcactcttaataaacaacctgagaagcaacaactgcaaatagattcctctgaagctctctttgagaaagttccggattttgatggagttaaagttatgcagatagcagcaggagcagagcattctgctgccgtaacagagaatggagaagttaagacatggggatggggagaacatggtcagctaggccttggaaataccaatgaccaaaccagtcctgaattggtgagcttaggaagtatagacctgcgaacgaaagagatcaaagtatattgcggaagtggatttacttatgcagtaaaacgaaaacaagagctttcaccaacctcgtcatagccatcttaatgtgtaaaattgtacaatgcaataagccaattgtttacatgcctcttgtgactcttgtcagaggaccacagtggtcgtatagtacaatatacagatcattcttaaaaaaaaaaaaaaaaaaaaaaaaaaagcgccgctctaaggatccagcttacgtnnnnnnnnnnnnnnnnnnnnnnnnnnnnnnnnnnnnnnnnnnnnnnnnnnnnnn

SEQ ID NO: 132354 - DNA, 855 bp, Arabidopsis thaliana
aagatagttccttagagctcacaatagatcatattaaggggtttttcgcgaatatatttctcggagggatagacaccggagctcttactatgatatgggcaatgacggagctcgctagaaacccggaagtgatgaagaaagttcaaggcgagatccgagaccgccttggcagaaataaagagagaatcaccgaagaagatatcaataaagttccttacttgaacctagtgatcaaggaaacattcagattacaccatccagttcctcttcttctcccaagggaaacaatggctcacatcaaggttcaaggctatgatattcctcccaagagacggatcttggtcaacgcttgggcgataggaagagatcccaaactctggacaaacccggaagagtttgaccctgagaggtttatcgatagccctgtggattataggggacaacatttcgagctcttaccgtttgggtctggacgaaggatatgtcccgggatatcgatggggatggctactgtagaattgggactcttgaacttactttacttcttcgactggaagttgcctgatgggatgacacataaagatatcgatactgaagaagttggcactcttacaatcgccaagaaagtaccactaaaacttcttccagttcgatttcagtggtcaaaccaaactccaaactttgaagatgttttgaataaaaatactatgcaaagtatgtaaccctagcttctctaatgtatgtgaagtacgttttccagtaaaatactagttaaaactttcaaaactttaaaaaaaaaaaaaaagggcggccgctctaaaggatcccagcttacgtaagcgtgcacatgaagtg

SEQ ID NO: 132355 - DNA, 934 bp, Arabidopsis thaliana
  unsure (1)..(934): unsure at all n locations
gcctgcggtaccggnccggaattcccgggttacccacgcgngcgaacgcctgcgagaagacgacagaagggagacacaggggccatcaccatgatatgggcagngacggagctcgttaaaaacccgaaactgttaaagaaagttcaaggcgatatccgagaacaacttggcagcaataaggagagaatcaccgtttaaatatcgagagagnnccttacttgaagaatggaatcaaagaaacattcacgttacacccagcagttcctcttatacttccaagggaaacaatggctcacatcaaggttcaaggctatgatattcctcccaagaggcggatcttggtcaacgcttcggcgataggaagagatcccaaactctggactaacccggaagagtttgaccccgagaggtttatcgatagccctgtggattataggggacaacatttcgagctcttaccgtttgggtccggacgaaggatatgtcccgggatatcgatgggtatggctactgtagaattgggactcttgaacttactttacttcttcgactggaagttgcctgatgggatgacacataaagatatcgatactgaagaagttggcactcttacaatcgtcaagaaagtaccactaaaacttcttccagttcgatttcagtgatcaaaccaaactccaaactttgaagatgttttgaataaaaatactatgcaaagtatgtaaccctagcttctctaatgtatgtgaagtacgttttccagtaaaatactaagttaaaatttcatatctttactaaaacatgtactgtgtttcctgtgtttcatatctttggaaaataattataaataaatttttctagacaaaaaaaaaaaaaaaagggcggccgctctagaggatccaagcttacgtacgcgtgcatgcgacgtcatagctct

SEQ ID NO: 132356 - DNA, 845 bp, Arabidopsis thaliana
tccgggtcgacccacagccttccatcgattcaatggtggatgggattcattaaccaggagaggaccatttcttaaaacttaccattgatcattttaaggggtttcttgccaatttttttcttggcaggattgaccccggggcccttaaccttatttgggccgtggccgagcttggttaaaaccccaaactggttaaaaaaggttcagggcaatatccaaaaccacctggccaccattaaggaaagattcaccgaggagaatatggaaaaggttccttccttgaggatggtattaaaagaaccattcaggttccacccagcagctccttttatacttccaaggaaaacattggctcacatcaaagtccaaggggtatgatattcctcccaagaggcgggatcttggtcaatgtttcggctatcggaagagatcccaaactctggacaaacccggaagagtttgaccctgagaggtttatggatagctctgttgattataggggacaacattccgagctcttaccatttgggtccggtcgaaggatatgtcccgggatgccaatggggattgctgccgtcgaattgggactcttgaacttactttacttcttcgattggaagttgcctgatgggatgacacataaagatattgatactgaagaagctggtactcttacaatcgtcaagaaagtacctctccagctcgttccagttcgagttcagtgatcagaccaaactccaaacggtttggaccaaaccttttgaataaatatatcatgcaaatcatgtaagcttctctgatgatgtatgaagtatatttttctgtaaaatactaaattgaacgtt

SEQ ID NO: 132357 - DNA, 596 bp, Arabidopsis thaliana
cgcctgcaggtaccggtccggaattcccgggttgacccacgcgtccgtaccgctgcgagaagacgacagaagggggcttgttttgtgatgggatacttcttattgttcgctgttgctttcatgtgtttggatgcgagaacggacaaaacgcaagattatacgtcgtttcagtaccataaaggagctctcctcaccggagacgtttccatcaacctaatctggtacggtaagtttaaaccgtcgcagcgtgcaatcgtaaccgatttcgttgcttccctctcgtcttcccggagatcgaccatggctcaaaatccctcactcgccacgtggtggaagacggtggagaagtattaccaattccgcaagatgaccacgacacgtggactcagtctctccctcggagaacagatcctcgaccaaggatactcaatgggaaaatctttaacagagaaaaaacctcaaagacttggccgcaaagggtggccaaagctacgcggttaaggtcgtgttgacctcagctgacgtgacggtccaaggcttttgcatgaacagatgcgggtcacacgggactggttccgggtcaggcaagataggat

SEQ ID NO: 132358 - DNA, 456 bp, Arabidopsis thaliana
caaagtcctttcgtacttatcaaagctttattagtctctttgttttcttgcttctacattacagaaattaaatggcttcttttgtgatgggatacttcttattgttcgctgttgctttcatgtgtttggatgcgagaacggacaaaacgcaagattatacgtcgtttcagtaccataaaggagctctcctcaccggagacgtttccatcaacctaatctggtacggtaagtttaaaccgtcgcagcgtgcaatcgtaaccgatttcgttgcttccctctcgtcttcccggagatcgaccatggctcaaaatccctcagtcgccacgtggtggaagacggtggagaagtattaccaattccgcaagatgaccacgacacgtggactcagtctctccctcggagaacagatcctcgaccaaggatactcaatgggaaaatctttaacagagaaaaacc

SEQ ID NO: 132359 - DNA, 815 bp, Arabidopsis thaliana
  unsure (1)..(815): unsure at all n locations
cgcctgcaggtaccggtccggaattcccgggttgacccacgcgtccgcccacgcgtccgtacggctgcgagaagacgacagaaggggatgtgggagaggagtaatgataatgaaaaaaacaactcaagcgtatcttcttctaagtttagttcatatacttctatgtctatcctttcagattcgtgctatacgccctcttctagctgagccgccaagtcaaatcctaaatccaccaccaccctcgcccgtatggccctctccaccatgtggaactaatatcgggagtcaagttacggcagtaggagagaattcttgcagacaaattccgaggcctcctaaaaccaaaaagaagaaaattccaaagcctcttaaaaccaaaaagaagaaaatctcaaagcctcatgcagcagttccgtgatctccaaacaagagtgtgtgggaaaggctttcacagataaaactaccacttagaatccttttttggaatacacttatcctttgaaaactcatcaagtattttattggattgtacaataaatccctcggtcttcaataaatatggttatcccctttaggaatcaatttttgactggttgggttccaatgctccaaaacctggtggaaacttgggccatcttcatcttttgnccaattggtatctaattttgtccttccatttcaaaaaaaaaaaaaaaaagggggggccgcntttggggtccnaggtttcggccggggatttggccggaangncttcntttggggcccctaatnaattnnttngcggngtttaaangggggctgggaaccnggggtnc

SEQ ID NO: 132360 - DNA, 452 bp, Arabidopsis thaliana
  unsure (1)..(452): unsure at all n locations
tacgaacgaagaatggagagcgactccgagatggtagcgttgcctctgttaccgactccgatagaatcgaactacagggcttgcaccattccttatcgattcccttctgataatcctagaaaggctactcccactgagatctcctggatcgatctcttctccaattccatcccttctttcaaggaacgtgcagagagcgatacaaccgttccagatgctcctgttcgagctgaaaagtttgccaaaaggtatgcggagattcttgaggacctgaagaaagatccggagagccatggtggtccaccggattgcattcttctctgcagaattcgtgagctgatactaagagaattgggatttanggacatatttaagaaagttaaggatgangagaatgcaaaggcaatatcactatttcctgaagttgtccgtttgagtgatgctattaacga

SEQ ID NO: 132361 - DNA, 358 bp, Arabidopsis thaliana
cccacgcgtccgcacaggcgtcagtacggctgcgagaggggagcagaagggggaaaactcatcaccatcgtcgcaataaatcatgtcccgatcaatccagttcaaacccatgtagtccccgagcatcgtttacggcatcacccagcaccaacacccatgactcacacattccatcagcacatttcatcaccgtcattgacatccagtctcagttcgatatctcacacctgagaatttcttgctttcgagtcatgaggcgaatgccacgcttaacgctactgagttcggtttgtccgtcgtcatcgaagcaggtgcagtttaccgggatatagttgagagtgcttactacgttgctcca

SEQ ID NO: 132362 - DNA, 240 bp, Arabidopsis thaliana
ggaagcttagagaatcatttgttcagaagaggttcttattttcaacctttatcttggactctccggttgaaagttgctcttggtgcagcgaaaggtcttgcgtttcttcataacgccgagactagtgtcatataccgcgatttcaaaacgtcgaatatactgcttgattcggagtacaatgctaagctttctgatttcgggctagctaaagacggtccaacgggtgataaaagccatgtc

SEQ ID NO: 132363 - DNA, 404 bp, Arabidopsis thaliana
  unsure (1)..(404): unsure at all n locations
ggagttcaaaagaaagtaagttgaagtcaatgcaagaagctcttgaccaaagtagaaccgagatgaaggctaagttttctgctgcttccatgaagaggcaggattcgatatcaagtacccgccaacgtgcagagaagttcagatcttttaactctcggacaagttcgaaaaagtatcagcatcctataagctcattacagagtgaagaggaaaacgaaaaagataggctagtcagtggacaatccattggaaaaggtgcttctaagagctcccaagttagaaaggttccatccccaaacgggagctcacgagtctcataaccgtcaggtaaagtttcaaacacanacactaatacttctgggagaggacganaaacatcagagataaaactggttacacaatct

SEQ ID NO: 132364 - DNA, 811 bp, Arabidopsis thaliana
  unsure (1)..(811): unsure at all n locations
nnnnnnnnnnnnnnnnnnnnnnnnnnnnnnnnnnnnnnnnnnnnnnnnnnnnnnnnnnnnnnnnnnnnnnnnnnnnnnnnnnnccacgcgtccgtacggctgcgagaagacgacagaaggggatcaaacaatcctggtggggaacaagcctctggattccataactggcttcagttttacttggaggaagccaaaggaactgtagattatcaaggctatatatttccccgacgtcgcggtgaaattcctgattcagagactcagctgctaacaatccaattcgagtggaacggtgttctaaaatcagtctcaagtactctagttggagtaagtccagagttcgagttggctctatacaccatgtgtttcttcatgggcacagaagataaccacattcagttgggtccatacaatgtcaatgtcaaatgttaccgacttggcaacaaccgtatcggctcagctttccccagtgcagaatcttgaaacctctcttgatggctctggtcacaaaatatctgccccttgcgcagtactgtattgaattattgtgattgtcagatctttctgtctacatgtgtagactagaaatatcttcatgtgatatttatgggaaaccatgtcttgtcctttctgaaaatgatacaacataagaagagatgtaagagaaaatatcttctaataatttttactttcaaaagaggtatttaatatgttttgggtaaaaaaaaaaaaaaaaaagcggccgctctagaggatccaagcttacgtacgcgtgcatgcgacgtcaagactcttctatagtgcgcctaaa

SEQ ID NO: 132365 - DNA, 765 bp, Arabidopsis thaliana
  unsure (1)..(765): unsure at all n locations
ccaagcatctatacgactcactttagggaaagctggtacgcctgcaggtaccggtccggaattcccggttcgacccacgcgtccgcccacgcgtccgtacggcggcgagaagacgacagaagggtacggctgcgagaagacgacagaaggggtagccgagaaacaacggttggcgaagtcatctcttgctttcaattgtaaaagtgtaacattccggaaactatttcctgagtatgtcgagaagtacagccagcaacaagtagctgaagaagaagcagccactcaacagacaacaacatctgagaatcaggattttcctcagaaggacaatgcgaaagtcgaatcagagaaaagcgttggtcttaaaaaggaaagtattcaagaagtgggattgaaagagaggagaaggaacaagaaagaagcattaccgggttggatagtattgttgctagtatcgattgtcggtgttgtaatggcgttgcctttgcttcagctgtgatttagatgcaaatgcaacgcaacacaacatgactgcaaatcaatctggtaaaatctgtttatcattgcctctcagtctcagtactaagtagtgtcttttgttcttccccctctcttgaaaagaaaacagatacattgagtttggtatggcatttgaagttacgtatnnnnnnnnnnnnnnnnnnnnnnnnnnnnnnnnnnnnnnnnnnnnnnnnnnnnnnnnnnnnnnnnnnnnnnnnnnnnnnnnnnnnnnnnnnnnnnnnnnnn

SEQ ID NO: 132366 - DNA, 394 bp, Arabidopsis thaliana
gttgagatcgttcattatgaccctaaagccattggggttgacgccaagaaggcttttctattcagaaacatgcatttctacgcagagccaagagccgctaaggacttattagggtgggagagtaaaacgaatctgcctgaagatctcaaggagagattcgaagagtatgtgaagattggcagagacaagaaagagattaagtttgagttagacgataagatactcgaagccctcaaaactccagtggccgcttgatcaaatacgccataaagtttgttcttcatttgtaacttcttatgctacactgtgctctttcatttcccacggctcatatgagatgaacatgatttcagctaaaagatcatttaaatattcataagcaacagcaggaaag

SEQ ID NO: 132367 - DNA, 404 bp, Arabidopsis thaliana
gaagggcctcagaaggaacttgggcaacttggtgtttttgctgagctgcaagcgctcttccctggtctgcgcatttatgtagatttgattggacctgacgttccacaacatatggatggagaaatgatctccctttgcagatattccccttgcatgggaaaagaatgtgaatgtaaaaattcaagcaaaattctcaattccgggagcaaacctgctttggtttcggctgtgtcattacagctccgtagagggttttaccatgatcgttacaatgacataacaaaggattcatttcctccacacatagtgattgctccaaacgcaggcatcgctgcatatccaagctggttgccaactattgaactgataagggagatacaagtcccagcagtattctctgatta

SEQ ID NO: 132368 - DNA, 794 bp, Arabidopsis thaliana
  unsure (1)..(794): unsure at all n locations
nnnnnnnnnnnnnnnnnnnnnnnnnnnnnnnnnnnnnnnnnnnnnnnnnnnnnnnnnnnnnnnnnnnnnnnnnnnnnnnnnnnccacgcgtccgtctgtggaactcagaatggtactctcttgttgtattcatggggatttttcaaggattgcagcgatcggtttgttgatctcgctccaaattccgttgatgctctactgaagctcgatgaggacagacttatcactggatgtgataatggaataattagccttgttggaatactgcccaacagaatcatacagccgattgggtcacacgactaccctatcgaagatctcgctctttcgcatgataagaaatttctcggtagcacagctcatgacagtatgctgaagttgtggaacctagaagagattctagaaggttctaatgtcaactctgggaatgcatctggagctgcagaagacagtgacagcgacaatgatgggatggaccttgacaatgatccttccaagtcttccaaaggcagcaagaggaaatcaaaaagtaaagcgaatacgctgaacgctacaaataatttctttgcagacttatagattttgtttcagattcagtctggatagtatatcagtttcatacctgaattgtctacttgattctgacagtttgttaaaaattttggtttttagtaagattgtgttttccnnnnnnnnnnnnnnnnnnnnnnnnnnnnnnnnnnnnnnnnnnnnnnnnnnnnnnnnnnnnnnnnnnnnnnnnnnnnnnnnnnnnnnnnnnnnnnnnnnnnnnnnnn

SEQ ID NO: 132369 - DNA, 1229 bp, Arabidopsis thaliana
  unsure (1)..(1229): unsure at all n locations
gnnnnnnnnnnnnnnnnnnnnnnnnnnnnnnnnnnnnnnnnnnnnnnnnnnnnnnnnnnnnnnnnnnnnnnccacgcgtccgcccacgcgtccgcccacgcgtccgcccacgcgtccgcccacgcgtccgtacggctgcgagaagactacaaaagggtaaggctgcgagaagacgacagaagggtacggctgcgagaagacgacagaagggtacggctgcgagatgacgacagaagggtacggctgcgagaagacgacagaagggtacggctgcgagaagacgacagaaggggataaagaagaagaagctaacgaaaaataatggcggagagatcaaattcagaggaagtgaagcttttgggaatgtgggcgagtccttttagtcggaggattgagattgctcttacgcttaaaggtgtttcgtatgagttcctggagcaagatatcacaaacaagagctctttgttgcttcaattgaatccggttcataagatgattccggttcttgttcataatggtaaaccgatttctgaatcacttgtgattcttgagtatattgatgagacttggagagacaatccgattctccctcaagatccgtatgagagaactatggctcgattctggtctaaattcgtcgatgaacagatttatgtgacggcgatgaaagttgtggggaagaccggaaaagagagagatgctgtggttgaagcgacgagagatttgttgatgtttttggagaaagagcttgttgggaaagattttctcggtgggaaaagtttagggtttgtggatattgtggcgactttggtggcgttttggctgatgagaacggaggagatcgtcggggtaaaggtggttccggtggagaagttcccggagatacatagatgggttaagaatttgttgggtaatgatgttatcaagaaatgtattcctcctgaagatgagcatcttaagtacattagagctcgtatggagaaactcaatatcaaatctgcttgataaggttttataaaaattctaatgctcacagtatgtctcttttgttcttgtctcagttgctatgttctgtcacttaatgtttgctatattgaaacacgaaaatttgaactaaaaaaaaaaaaaaagnnnnnnnnnnnnnnnnnnnnnnnnnnnnnnnnnnnnnnnnnnnnnnnnnnnnnnnnnnnnnnnnnnnnnnnnnnncgaacctccatccggggcggggc

SEQ ID NO: 132370 - DNA, 604 bp, Arabidopsis thaliana
  unsure (1)..(604): unsure at all n locations
cnnggggnccccccccagntttncacctnngcggnntnctaatcggggtttggccttttcntcccccggaattccccccccgggtcattgccaccccttttggagattgcagatgctgtgatctttagggattgaattccggtgaaagtaaattaggtttcagatatcatcataaggaaggtttaggaaaaagcttgtgttggcgctcgaagaagagtggctaaataaagatgaacttctgtgtgtgtgtgtgaaaattgctgtgttttttaagcttttgtgtgtctctagggaaggtagagatatgggaaaatggatgtaaaaaagaatgtaaatagagagcccccaaaggcaaagtgagagcatcatcattaagataaagccaaatcggcttttcttttgtaattcagctcctttccccgggagagagagggaatggcaaaagtgttgttccctctcttttgtttcgaaaaaagtgtgaatgaaaagatctttgtttcacaaaaaataaaaaaaaaagaccaaacccatagggcgaccgctctagaggatccaagcttacgtacgcgtgcgtgcgacgtcatagtcttctatagtgcaccta

SEQ ID NO: 132371 - DNA, 533 bp, Arabidopsis thaliana
gcgggtccacacaagcctctatactgactcgaagaagacagacgggagggattgaattcggtgaaagtaaattaggtttcagatatcgtcataaggaaggtttagcgaagaagcttgtgttggcgctcgaagaagagtggctaaataaagatgaacttctgtgtgtgtgtgtgaaaattgctgtgttttttaagcctttgtgtgtctctagggaaggtagagatatgggaaaatggatgtaaaaaagaatgtaaatagagagcccccaaaggcaaagtgagagcatcatcattaacataaagccaaatcggcttttcttttgtaattcagctcctttccacgggagagagagggaatggcaaaagtgttgttccctctcttttgtttcgaaaaaagtgtgaagaacaagatctgtgttatctcaagtggttcttcctttgatgaatccaatcagaacccatagggcggccgctctagaggatcccagcttacgtacgcgtgcatgcgtcgtcatagcttttgtagtagtgtca

SEQ ID NO: 132372 - DNA, 555 bp, Arabidopsis thaliana
  unsure (1)..(555): unsure at all n locations
ttccgactttgttgtctcttgaggatcctcaaggatgtagtcactttacactcacacgtgttaattggaccggtagtgttggtggtcatcctcacacgtacgatgcctctnagatctcgccgcagctgattcactctctgcggagatctaattcgagtttagactatttcttcgccagaaaattcacgccggagtcattgcaaccncttatggagattgcagatgctgtgatctttagggattgaattcggtgaaagtaaattaggtttcaaatatccatcataaggaaggtttagggaaggaagctttgtnttggcgctcggaaggaagagggggcttaaataaaaggatgaacctcctgctgtgtgttcgtgtgaaaatttctgtgtttttnaagcttttgtgtgtctctagggaaggtagagatatgggnaaatggatgtaaaaaaggatgtaaatagggggcccccaaaggcaaagtgnggnccatcatccattaaggtaaagnccaatcgggcttttcctttttgtaaatcagctcccttccncgggggg

SEQ ID NO: 132373 - DNA, 511 bp, Arabidopsis thaliana
gccggcactaatacgactcatatagggaaagctggtacgcctgcaggtaccggtccggaattcccgtttcgacccacgcgtccgcccacgcgtccgcggctgcgagaagacgacagaagggggattcaggagaaaacaagataacaggattggcgtttggaggaaatagaatgtttgtgacccgaaaggatcagcagtctgttcaggtttggcaaagtcctagtcgtggaatatctatctaatgagcaagtattaagctttggttcgaggtgatcacgagttgcttaaagccgaatccaacaaaaactagttagcgacttacgttgtgttaaagaagaatgaatgatcttaatcccaatacttgatgaagctattccaaccatgaatttcttatctctgataatcttataaaaaggacttacatcgttcgtcagaccaggctgtgaaggatgtttgcattctaacgacatgaccctatacaagtactgcagagagaagcagatgacgatgc

SEQ ID NO: 132374 - DNA, 618 bp, Arabidopsis thaliana
  unsure (1)..(618): unsure at all n locations
atgattttcgccnnnnnnnnnnnnnnnnnnnnnnnnnnnnnnnnnnnnnnnnnnnnnnnnnnnnnnnnnnnnnnnnnnnnnnnccacgcgtccgtacggctgcgaagacgacagaagggtacggctgcgagaagacgacagaagggtacggctgcgagaagacgacagaaggggtctggattgttgagtatccctctggctgggggtgctaatgtgaagtctcgaactttgttggaatcggctaagtgataatttcgaagcttgatcggtaaatccaggagcttttggatcggaatctgttcgctgatgctttggtgaaaatgggtttcggtgcaattagatcgattttgcgtccattgtcgagaaccttagtttcgcgtgccgtcgttaactactcgtctgcgccgttcaacgcgacgattccggctgctaaacccgagttatgttccttcttcggtggatcgatgactcatttgaggttaccatggattccaatggctaaccattttcatagcttaagcttgacttgatactcggntcccgaagagacgncccatgacttatcccaagngggnaaagnttccaaatttnnaacctccaggggccttatgcataccg

SEQ ID NO: 132375 - DNA, 637 bp, Arabidopsis thaliana
gggagagaagtctgtgtctttgcctcaagttttcattatgggcaagtatgttggtggtgctgatgtgatcaagagtttgtttgagattggtgagcttgctaagattcttaaagagtttccaatgagacaaccagggtttgtttgccattgctgtggggacattcgatttgttccgtgttccaattgtagtggcagcaagaaactgtttgatgaggatgaagatagggtcaagagatgtcctgaatgcaatgagaatggattgatacgttgtcctgattgctcttcttgagatatatcatcaatgaacctgaaaaaaccattaaaaaaaagaagaaaaaagaggtatttatttctcttttgatgtttccattgttgtgtagaacagtgaatgatgctgccacaagtatccgaaaatctcttttggatcagcagcatttcactttgggttttttaaggtttgcgatcaacggtaatgggaactgccggtgatcgtggatttagtttatgtatgtgtttgctactaagggctaaatgtaattgtgtaatcaaaatgtctgaaacgggtagtaagcattttgactcttgtgtgtcaatgttgtgaaagacaactgtgttcttatgctatatatttgattgt

SEQ ID NO: 132376 - DNA, 421 bp, Arabidopsis thaliana
ctctaaagtccgtcgtattacgcagtccgcccacgcgtccggacgacagaaggggacttcatcgctcttttatcgttaataatcataaagaaaatcaaagactcgaaccgaaatcttcctccgagcccactgaagctaccggttatcggaaacctataccagcttcgaggattgtttcacaaatgtcttcacgatctctccaagaaacacggacccgtgttgcttctccgtctaggttttctcgatatgtttgtgatctcatcgaccgaagcagctgaagaagctcttaaagtacatgaccttgagtgttgtaccagacctataactaacgtcacatcagaactctggcgtgacggtcaagatatcggcgtagccccatatggtgagtccttgagagagtttgcgaagctttccttttctc

SEQ ID NO: 132377 - DNA, 563 bp, Arabidopsis thaliana
  unsure (1)..(563): unsure at all n locations
aacttcgaaagatttagcgattttaacaaacgccgcgttacggtttatnacacaaacgcgaaaaaagcgtcaggaaagattggccccttgcgcactcttgcttttttntggaaacgtctctgaacgaccaactatagatcgtggaaaattcagattccattgcgacgaaaagaaggcggcggattcaaagaacacccaaatacaaatcgaagacggagccttttcagcaatttcgttttattcaacctctggaacaccaatcatctcaaactgattgaatgagaagccctcccccgtctctgctctccctcaccgtcaacgccgccgtcttaaacatctctcgcatcaacgatctctcccatcttcctgatcacatcgtccttgacctcttcgcgaggacattggaagctgggaaattgaatgagagagttctgagactctttatggcatctggaaacgaagaagttctttctgttatcgacgccctcaaaatcaaaatcaacgtttccccgatccttcctactcgatgtgatgagaagtttagattgcacgggactagacga

SEQ ID NO: 132378 - DNA, 683 bp, Arabidopsis thaliana
cggccggaattcccgggtcgacccacgcgtccggacagatcatcggcaactaatctcgtcatcgcatgcgtcataaaccaaattaactaagtcatccatttaatccatttgtgcttatcagatcatccttttccttcctacacaagaaatggcgaattacatgtcggaagcagcacagctcagaagaggtctaaagcctaaagggaagacttatgggttgaccaatcagaagagacgagagatcagagagatctttgatcttttcgacatagacggttcaggtagcatcgatgctagcgagctcaacgttgctatgaggtctcttggatttgagatgaataatcagcaaataaacgaattgatggcagaagtagataaaaaccaaagtggagccatagatttcgacgaatttgtgcatatgatgacaaccaaattcggggaacgagactccatagacgaattgtctaaggcgtttaagatcattgaccacgacaataatgggaagatttcacctcgtgatataaagatgattgctaaagaattgggagaaaatttcacagataatgatatagaagaaatgatcgaagaagcagaccgtgacaaagatgggagaagttaacttggaggagttcatgaagatgatgaagagaacctcttacggctaagtataaatcaattagtaa

SEQ ID NO: 132379 - DNA, 538 bp, Arabidopsis thaliana
  unsure (1)..(538): unsure at all n locations
aagaaatggcgaattacatgtcggaagcagcacagctcagaagaggtctaaagcctaaagggaagacttatgggttgaccaatcagaagagacgagagatcagagagatctttgatcttttcgacatagacggttcaggtagcatcgatgctagcgagctcaacgttgctatgaggtctcttggatttgagatgaataatcagcaaataaacgaattgatggcagaagtagataaaaaccaaagtggagccatagatttcgacgaatttgtgcatatgatgacaacccaaattcggagaccgagactccatagacggattgtctaaagggcgctttaagacccattggccccggccattacttggggggggttttcccccccgggggtattaaggttggtttcctaaagaattggggggaaatttcccccggtttggtgttgttggggggcccgaaaaccacccggngcaaagtggggantttccttggggggtcccnaanntgttgaagncccctttnggnaagnnaaccccttgaa

SEQ ID NO: 132380 - DNA, 576 bp, Arabidopsis thaliana
  unsure (1)..(576): unsure at all n locations
ctcgcgggtcgacgcaagcctctatactgatgcgaaataacgacagaaggggaatgttaaagcccatttccgaagaggacccgcacagagaaatgttaggcgattgcaagggagccatagaagattccagatacgccccttgggcgggaaccaaacaacaaacgagcgtctctctcagcagagagactgagaaaattccagtgagcttcttttgtccgtaccccaccgatcattgagaaaacgtttgttccttaaaatttgtccaagagtataggccaattttgtcaacccctgtcttttgcgtttgatatttaggcattttatctaaagaaaccttttgcaagtcccccgagaatggaaaattataatatccgatgtttattttaaacgttctctaaaattggatatcaaaaagtaatgttaatcttaaacaccggaaaccggcattcccggttgaaaaaaaaaaaaaaaaaaaaaaaaaaaaaaaaaaaacaaaacccanagggcggccgctctagaggatccaagcttacgtacgcgtgcaggcgacgtcataatcttctatagtgctcctaa

SEQ ID NO: 132381 - DNA, 811 bp, Arabidopsis thaliana
  unsure (1)..(811): unsure at all n locations
gagtatcgattagagggcaaattcgctatcgataatctctctaaaaccgctaagaacgaatgtgttattagtcgtgtttttcatacacggactgatggtacgaaggagcatatgtccgttggtttacctccgctgatggattcttctccatatctaaagagtaggggacaagactctttagccgggaccacccttggtgggttgttgtctcacgttacctacttctccgaccaaacaaccgatgacaagagtcttgtggccgattttaaaactaccatgtttggttccggatcgactaactttttaccaaacataggttctctactagacttcgatcctctgtttctacaaaacaattcttcagtactgaagatgttgcttgacaatgaagaaacccaatttaagaagaatcttcacaattcaggttcatcagagagtgaactaacagcgagttcttggcaaggtcacaattcttatggttccactggtccagtgaatcttgattgcgtttggaaattctgaatttggaaaatcgaaaatttggatgttaactagggggtatatagggtttttaaaaacagtgtatatatgcgttatgtgttagctttagattctaggatatacaaagatgacactaatagattcttataacattttgtaaaaaaaaaatcattgtagtgaatactctcttgccatttgaaatccattgtgtttgcattaaaaaaaaaaaaaaaaaaaaaaaaagggcggccgctctagaggatccaagcttacgtacgcgtgcatgcgaataaagnnnnnnnnnnnnnnn

SEQ ID NO: 132382 - DNA, 843 bp, Arabidopsis thaliana
  unsure (1)..(843): unsure at all n locations
caaaaaacctgaggaaactccacagagaagcggttcaaaacacgactaactccataacggtagtggcggttntttttgcttccatagcgttcttggccatattcaacttgccgggtcagtatttcacggaggggtcgcatgtgggacaagccaatattgcagggagaaccggattccgcgtgttctgtcttttaaacgcgacatctctgtttatatcgttagcggttgtggtagttcaaataactttggtggcgtgggacacacgggcgcagaagaaagttgtgtctgtagtgaataagctaatgtgggcagcttgtgcttgcacattcggagcatttttggcgattgcatttgcggttgttggaaaggggaactcgtggatggcgattaccataacgttgcttggagccccgatcttggtagggacattggcaagtatgtgttatttcgtgtttcggcagcggtttaggagcggcaacgattcccagagaaggattaggagagggagtagtaagtcgttttcatggtcttactctcatcatgtatccgattttgaagatgaatcagatttcgagaaaattattgctctttgaattaagtttcttaagcgtctttgtatagatcgtctcttctctttgcctttcttccaacgcaagtctgtgttgtattcttagaataaatcttgttggggcacattagtttcatatatagcaataaagtggcccccggccatatctgtnnnnnnnnnnnnnnnnnnnnnnnnnnnnnnnnnnnnnnnnnnnnnnnnnnnnnnnnnnnnnnnnnnnnnnnnnnnnnnnnnnnnnnnnnnnnnnnnnnnnnnnn

SEQ ID NO: 132383 - DNA, 455 bp, Arabidopsis thaliana
  unsure (1)..(455): unsure at all n locations
ctcgtgggtcgacgcaagcctctatactgattcgaaataacgacagaaggggggagaaagtggttgatctcttcggagtcggagaagctaattcccagaagctactcgaaggaggcaaagatctcagcgagatccaacagggattgttcataggatcagtagctgaagcgaataacaaggattttctcaaaagctctaatatcacccatgtcttaaccgttgctgtggccttggctcctccttatcctgatgattttgtctacaaagtcattgaagtggttgatagatccgagaccgatttgacagtatatttcgatgagtgttatagcttcatcgaccaagctattcaatctggtggtggtgttttggttcattgcttcatgggaatgtctangaggttttgattcttttgcccttaaatctcatacattcagttattagatttagtgtttaag

SEQ ID NO: 132384 - DNA, 399 bp, Arabidopsis thaliana
gggcgtgaacttggattgatagatgatagacgatggaagttataccaagagaagcaagcaaggatttcagaagagaagaagagactgaaaactgtcaaggtttcagttgcagtaggtgatttggctgccgaagtttctagtgtgtcttctcagccagtcaaagaatcagcgacactagagagtctcctaaagaaaccacatatccactacaagcttcttgagaagcatggctttggaaatgaagcattatctagaatggagaaagactgtgtagagatcgatataaaatatgaaggtttcattgttcgccagcaaaaccaactgcagcagatggtccaccaacaacatagacgacttccagacgatttggattactattcgatgacaactctatcccat

SEQ ID NO: 132385 - DNA, 571 bp, Arabidopsis thaliana
  unsure (1)..(571): unsure at all n locations
nnnnnnnnnnnnnnnnnnnnnnnnnnnnnnnnnnnnnnnnnnnnnnnnnnnnnnnnnnnnnnnnnnnnnnnnnnnnccacgcgtccgcccacgcgtccgtacggctgcgagaagacgacagaaggggtaaacaggttcccatgaagaaagaaaatggtcagacggctctggtgcctctgttccatagtcaagacactatttccgggaaggtttgcattgaaccatatcaagggaaaaaggtggagcataatggtgtaaaagttgagcttcttggtcaaatagaaatgtactttgacagaggaaacttctatgatttcacttccttggttcgtgaactggatgtacctggagaaatatacgaaaggaagacatacccttttgaatttcctactgtggagatgccatacgagacatacaatggtgtgaatgtgcggctaagatatgtcctcaaagtaaccgtcactcgtggctacgctggaagcatcttggaataccaggagcttgtggtacggaactacgctccacttcctgatattaataacagcatcaaggtggaagttggaattgagga

SEQ ID NO: 132386 - DNA, 535 bp, Arabidopsis thaliana
gttgatcgtcacgaacccaactgtcataatcttcgtcgatttgatcgattcttcttcgtctctctccgagtgaaatagacccttgatttcactacagaaagttttttttttgtgatcgggaattgaatcttcttatcatgaattatcttcttggagctttcaagccagcatgtaatatttcaatcacatttactgatgggaaaaaccgtaaacaggtacccactaagaaagataatggacaaatagttatgattccacttttccagagtcaagaaactattgccgggaagattagcattgaaccatatcaagggaaaaaggtggagcataatggtgtaaaagttgagcttcttggtcacatagaaatgtactttgacagaggaaacttctatgatttcacttccttggttcgtgaactggatgtacctggagaaatatacgaaaggaagacatacccttttgaatttcctactgtgggagatgccatacgagacatacaatggtgtgaatgtgcggctaagatatgtcctcaaag

SEQ ID NO: 132387 - DNA, 973 bp, Arabidopsis thaliana
ctcgtgggacgacgcaagcctctatactgacgtcgtgactagaagacgacagaagggggaagtgacacagcgaagttcgagtatgagccgcaagagagataaaccctacacaaaccgtcacacgccggcgcgaatttcgaaacgccggcgaccatgggcgccttcgtcatcggagcacgatgagattatcgacaaaccgatcaccaaacctccgccgccaccggcgttggtagttatgggacttcccgccaactgttcagttctggagctaaagtctcgattcgagatctacggttcaatctcccgaatccgaatccataaggacggaattggctccgtttcgtatcgaaccgccgagtcagcagaagccgccattgctggtagtcacgagccttctttcggtatctccatcgattccaaaaagttggaggtggtttgggcgacggatccattggtgaagtggaaggaaggtgtgacggcgggagaaggaaaggagagaacgtcgtcgttttcgtcgaagcttttacgacctgtgatgcctttgagaaaacatgggagaagcagtaggttagcgtcagctattgttaatccgagaagtgataatactaaaggaattagtgcagatggagggatatcatctccggcgacgacaagtgaagttaaacagagaaatatagtaacctacgacgatatcgtttaacaccattctactacaattatagtaactttgattcttttacatattttggcaattttatgagtttagctaatcctgttggtaatctcagttgtcgaatgttgtgaaatgagttgagttttgtttatttgccccattgtaacttataagaaagagaaggattccaaaatgggtaaaaaaagaaaaggtgaacgaacccatagagcggccgctctagaggatccaagcttacgtacgcgtgcgtgcgacgtcataactcttctatagttgtaccta

SEQ ID NO: 132388 - DNA, 573 bp, Arabidopsis thaliana
gttggacgtcgcaacaccctatagtgagtcgtattaaccacagaagggggctttacgaaagcttttgtgggaacaacagctacgcgttttgccgtcctgcctgtggagtgatccctgaacagcggcacatggcagttcctgtgccccttgttggagcagcgcttggtgttggcgtgcaggtgtatgccaatgccgtgcgcaagctgccgctgatgcggaagccctggctacatgttctgtgcggcagcgcaggctacggcttcggctcgtggctcgtggaatttgaagcaaagacgcgcaaggacctgactgaaatgttgaagaatcgcgagaatgcgaacaagcacctgcagccgtggcaacatccttgcgcagcgaacatgcatgctgagaggggccagcccagcagcagccaagcctcacacagccaccgccacacatcacgtgcccctcgcaaatggtttaaatgtcccagtattgggagaaaaaaaaaaaaaagaaaaacccataacggccgctctagaggatccaagcttacgtacgcgtgcaggcgacgtcataactcttctatag

SEQ ID NO: 132389 - DNA, 464 bp, Arabidopsis thaliana
  unsure (1)..(464): unsure at all n locations
cgtgggtcgacgcaagactctatactgagtcgtaataacgacagaaggggacataagagggaaaaggaaaatgacttatggggaggaggagccggttagcccgatggcgcgtgtattccaatcgccgggcatagacttatgtgccgtgaccatcatgggtttcaaaacaaagattaatcccgacgttgttcttgatgccttgaagcaaaatgtctccaagcatcctcgtttctccagcatactgtccgataatggtgcaaaatggatcgagaccgaagttagtgtagaagatcatgtaattgtaccatacatagacgcggaagagataggtgaaggtggacaaagcttcatcgatgattatatgtcacgtctcacgatgattcctctcgatagatcaagaccctttgtggggcatttcacatcccttaacgtcaaaaactccagaggnctttaaggcagtcggt

SEQ ID NO: 132390 - DNA, 605 bp, Arabidopsis thaliana
cctatagtgagtcgtattaaacaatagggaacactacgccggagaccaataaccagactttcatcaaccagcatggtctgatacagtttgatccaatcgataacatcaacctcaggagtaccggcaccaacaacagcttcttcaccctcggattctttcacgaaaacacgacgaactcagagacgactcctccctctctatatagcaccgacgttcttgttcatcaccgtgacagaaaacttcaacgcgggttctaacgtgtcagccacggcactacttcagaaagctacacaaatgggtccagtcacaagcaacgacccatctgctttgttcagaggcttagcttcttcgtctaactcatcaagtgttatcgctaatcactttggtggaggacgaattatggagaatgataataatggaaaccttcaaggtctaatgaactcattagccgccgttaatggaggtggcggatccggtggcagtatcttcgacgttcaatttggagacaatggaaatatgagcggctcggacaagttaacgttagattttcttggagttggaggaatggtgagaaatgtaaatcgcggtggtggtggtggtggtcg

SEQ ID NO: 132391 - DNA, 544 bp, Arabidopsis thaliana
  unsure (1)..(544): unsure at all n locations
nnnnnnnnnnnnnnnnnnnnnnnnnnnnnnnnnnnnnnnnnnnnnnnnnnnnnnnnnnnnnnnnnnnnctcgtgggtcgacccacgcgtccgtacggctgcgagatgacgacagaagggacaaggttgttgaagtgaatcctatcagtaagaaagaaatcaaatggtctgattataagaaggtgcctattcttactgtagatggtgaacaaatggttgattcttcagtgataatcgatagcttattccaaaagatgcaccctgaaatttccaagtccgaagatgatgaagagactaaatggcgcaagtgggtggacaaccaccttgtgcatcttttgtcaccaaacatatacaggaatacttcagaggctcttgagtcctttgaatatatcaccacacatgggaatttcagtttcactgaaagattagtggcaaagtatgcaggagcaacggcaatgtactttgtatcaaagaaattgaagaagaaatataacattacagatgaacgtgcggctctttacgatgctgcagagacatgggtcgat

SEQ ID NO: 132392 - DNA, 881 bp, Arabidopsis thaliana
  unsure (1)..(881): unsure at all n locations
gatactccnnnnnnnnnnnnnnnnnnnnnnnnnnnnnnnnnnnnnnnnnnnnnnnnnnnnnnnnnnnnnnnnnnnnnccacgggtccgtgcggctgcgcgaagaccacagaaggggacaaccgaccgagtcggagatcgaagttttgaacctaagaatctcgttgtcttcttcttctgcagagcctccaaagtctaaatcttttggttacgtctctcaaaccccaacctttatactcactctctttctttttctctcttacctccattggcttcttcttgagatctcgtcaggctctgatcccaatctatgttcgatctcactctcaccgagatctcatcttcctccattttttcaaagatccatatatgagctctaaaaccacagatttcaatctgtgaatccgtatatatgctcaatcggagccagattctaacaaatcaaagaaaggaagaagaagtgaagaacaatgggagctgaaaagaaatggcttttcacactcttctctgtagtatgcctctcagtgttccttctcttactttattctatctctgctttcaccgctaaaccattcccttcttcaattcggcacggggctcatgaacccacctgcttttgcttataacataaccggtggtcgtggagataatgaccggatctctcggttattgcttgcggtttatcatcctaggaatcggtatcttatccatctggggtgctgagctacctnatgcagagaggctagctccttctctctgatttgaaacntgtccnggctgtgaatgctttttgggnattgttgatntttaggggnaagtttaancggttntnctnngnatngggcctcnaaggattgcttctactnttnacggttgtttcaat

SEQ ID NO: 132393 - DNA, 507 bp, Arabidopsis thaliana
  unsure (1)..(507): unsure at all n locations
nnnnnnnnnnnnnnnnnnnnnnnnnnnnnnnnnnnnnnnnnnnnnnnnnnnnnnnnnnnnnnnnnnnccacgcgtccggacgacagaagggggctcacaaaaaaaagaaagaaagccagagtaagaaaccatggaagacgccatatatgttgcagtgaatcaagatgttcgagaaagtaaaaaaactttgttatgggctttgaaaaatcttcaagtcaagaagattttccttcttcatgttcatcttccattttcgttgaccacttcttcaagtaggcttgaacaaagtgagatcgatgcaatccaagattcagaactgaatacttcagtaaatagcctctacaagtaccgtgatatctgcataaacaaaggggttaatgaaaaagatgtggatacatcaatgatctcaggacatgatgtgggggaagggattgtggaactcatctatcaagacattatcacgaacctcgttatgggagcagcagctgatcctcactattccagggg

SEQ ID NO: 132394 - DNA, 535 bp, Arabidopsis thaliana
atgattcgccggcactaatacgactcatatagggaaagctggtacgcctgcaggtaccggtccggaattcccttgtcgacccacgcgtccgtacggctgcgagaaacgacagaaggggagagccaaacataaaaaaaaatcaatacatatgcaaatatatagcaacaaccgaacgatgaggaccaaattttcacttaatctgatttctccggcgaagaacatggtgaagattcatcctgacaaggcgtttcctgcggattttagcgtgggagaaggcaagacttcgccgtacttaacgacggagaaagagagtttcacgatttggatgagatctcttgtgttccatagtaaaggctgcacagtttttgattccaaaggaaacttagtctatcgagtggataattataactccaagagttgtagtgaagtttaccttatggacttatacggcaaaatcttgtttacattacgtcaaaggaaattgggattatgcagatcttggaaaggatataaccaaccgggacaagattcaact

SEQ ID NO: 132395 - DNA, 936 bp, Arabidopsis thaliana
aaagaaattggctgcaaagggtaggaagatggtgaccattgtggatcctcatatcaagagggatgactcatacttcttacacaaagaggctactcagatgggatactatgttaaggattcatctggaaaagactttgatggttggtgctggcctggttcatcatcttacattgatatgttgagcccagagattagaaaatggtggggtgggaggttctcgtataagaactatgttggttcaactccatcattgtacacctggaatgacatgaatgagccttctgtattcaatggtcccgaggttactatgccaagagatgcattacatgttgggggtgttgaacacagagaagttcataacgcatatggatattacttccacatggcgacttccgatggacttgttatgcgtgaagaaggaaaggataggccttttgtattgtcaagagcaatctttcccggcactcaaagatacggagcaatttggactggagataacacagccgaatgggaacaccttagagtctccattccaatgatattgacacttggtcttactggaattacattctctggagctgatattggtgggttttttggaaatcctgaaccagaacttctagttaggtggtaccaagtgggtgcttactatccatttttcaggggtcatgctcatcacgaataccaaaagacgagagccttggttgtttggtgaacgggacacagaactcatgagagatgccatacacactcgttacacactgctcccatacttctacacgttgttcagagaagcaaacgttacgggtgttcctgttgtacgcccattatggatggaattcccgcaagatgaagctacttttagcaacgatgaagccttcatggtcggtagtggtctactggttcaaggagtttacaccaagggaacaacgcaag

SEQ ID NO: 132396 - DNA, 862 bp, Arabidopsis thaliana
  unsure (1)..(862): unsure at all n locations
ctatgacgtcgcatgcacgcgtacgtaagcttggatcctttaaagcggccgcccttttttttttttttttacaaatcattgttttctttggccatttcatctttaggcttttcgatttgtacaatcgcttgtgaccagtaagaaaccattgttctgataaggggaaaattcatatgtaataaatatgctttgtttgccttttgatacaaaatccacaatggacgattggcagtgtatggagttgaacaacttgaaacaacgaaagagaacaacaacaaatgaaacaaaattacatttcaatgaaaaagcagataatgattactcttctttgccacctccccatatcaaggttgctgctgagcgtccatgtaaccagcgtcggcgagcactttctccctcttggccagctcaaggtcttcgtccaccatcatcttcaccagcttctcgaaccctacttttggcttccaccccaacatttcctttgccttgcttgcgtctcctttcagattgtcgacctccgtgggccggaagtaccttttgtcgatctcgacatggtctttccagttgagccccacgtacccgaaagacacgtccagaaacttccttgacggtgtgtgattcctcagttgcaaccacatagtcatctggtttctcctgctgcagcatcagccacattgcttccacgtagtctcctgcgaaaccccagtctcttgaagcctgtatatttccccggaagagcttggtctgcaatccgaccttgatccttcccaaggcccgagtgattttccgagtcacgaagntctctgctctgcgaggtgactcgtggttgaagaggattccgttgcaggcgtacagaccgtag

SEQ ID NO: 132397 - DNA, 688 bp, Arabidopsis thaliana
  unsure (1)..(688): unsure at all n locations
cnnnngggagttgagaaaaccttgctacgagcgtttccagatttctcccaaaacggaactgctgattccttgaataaaattccctaatcggagtctgtgaagcaaatgggagcatcagattcaactctgctaggctctcaggaaaatcgaggtgatgtgattacgactatatctcatcgatcagaaatagtcgatcccattctcgagaatcttaaagctctcacagtaagtaggccaatattgaagtctcctcccacggaaagtagcttaacagatatcttagtgagaaaagctctatccagttcctcttccaatacggttgatcctcaaatacttgtagagctcttctccatttaccgagaatggcaagagaacaaagctcaagaaattaccaagagacaggaagatatagaaaacaagatagaagtcgcagatgctttggcgactaaacttttacagaggtttaaccactctgtttctgcaatgaggacaactgcccagcatttaatctcaagttcatggtttgcagggggagctccgggaagcttaaaggaagattgacagaggtggtccagcaactggcgatacaattatgtaagaagaattaaattctggagggaaccccggaatcttttgggagggcccacacatgggcggccctctttttctttttttggcaatcctcccc

SEQ ID NO: 132398 - DNA, 1372 bp, Arabidopsis thaliana
  unsure (1)..(1372): unsure at all n locations
aaccttgctacgagcgtttccagatttctcccaaaacggaactgctgnttccttgaataaaattccctaatcggagtctgtgaagcaaatgggagcatcagattcaactctgctaggctctcaggaaaatcgaggtgatgtgattacgactatatctcatcgatcagaaatagtcgatcccattctcgagaatcttaaagctctcacagtaagtaggccaatattgaagtctcctcccacggaaagtagcttaacagatatcttagtgagaaaagctctatccagttcctcttccaatacggttgatcctcaaaatactttgtaggggcccttcccccctttaccggggatggccaaggcggcccaagctccaaggaaatttcccnagggggcccgggaggtttttggaaacccaggttggaagtcccanttnctttttggcggcctaaactttttcagggggttaacccccctctgtttctccaatgggggcaactgccccccatttacctcaagttcatggtttccaggtggagctcggggagcttaaaggaagattgacagaggtgatcagcaactgcgatacattatgtaagagaattaattctgagggacctgaatctctgaggtccacagtggcgcctttttctcttgcatctcccgattcggtcagtataaatactactacaactctgtcttctaaacccgaggcataagagtaaatactcttaatggtagttagattggtgaatcgaatacgtgtagttctacagcatactttctgatctcctctgattttgcatagatgcatgatgatgctattgattgatctttttgttacaaatcattgttttcttttgtcatttcatctttaggcttttcgatttgtacaatcgcttgtgaccagtaagaaaccattgttctgataaggggaaaattcatatgtaataaatatgctttgtttgccttttgatacaaaatccacaatggacgattggcagtgtatggagttgaacaacttgaaacaacgaaagagaacaacaacaaatgaaacaaaattacatttcaatgaaaaagcagataatgattactcttctttgccacctccccatatcaaggttgctgctgagcgtccatggtaaccagcgtcggcgagcactttctccctcttggccagctcanggtcttcggccaccatcatcttcaccagcttctcgnaccctactttngggcttccacccaacattcccttgcctggctgnggctccttcagatgtcgacncggggggcgggaanacctttggccganccgaatggggcttncagtgngccnnggaccgaagaacgccagaaacctgngggggggntccca

SEQ ID NO: 132399 - DNA, 396 bp, Arabidopsis thaliana
gaatgttgatgattctgcttttagtgagattagcattgatgaattgagggcttatgctcgtgatattatggagaaagagattgaaaagcatgctgctgatggccttggccgagttgattatgcattggcttctggtggtgcttttgtgatggagcattcagatccttatcttgttggtaaagggagtagctggtttgcgactaccatgcggcgcgctcatacgaatgcggttaagatgttatctccgagcttcggtgagcctggacaatgttttcctctgaaaggtagcgagggctatgtgcaaatcaggctgagaggaccaatcataccagaggctttcacattggagcatgtagctaagagtgtaacctaccacagatcgagtgctccagaaga

SEQ ID NO: 132400 - DNA, 538 bp, Arabidopsis thaliana
  unsure (1)..(538): unsure at all n locations
aagattttcgggcactaaccgcactcatttagggaaagaacgtacgcctgcaggtaccggtccggaattcccgggtcgacccacgggtccgtgcgggtgcgagaagacnacagaaggggtaatgccagaggggatatctccgagtctggcgttcatagtgcagtcttgttgggtggaggacccaaacatgaggccaagcttcagtcaaattatcagactgctcaatgagttcctccttacccggactcctccgcctcctcagcctctgcctgagactgccaccaacaggaccaatggccgagccatcactgagttctccatccgtccaaaagggaaatttgccttcattcgccagcttttcgctgccaagaggaacataaactcttaggtacaagaaggggtcttctttgtctttgccactgccactgctttggtggataaatgacattagcagagagagagaagtagaaaggtagacttacttaaagtctatagcggagttaagtactcaatcttctttttggcaaggggataactg

SEQ ID NO: 132401 - DNA, 541 bp, Arabidopsis thaliana
  unsure (1)..(541): unsure at all n locations
gactacacgcagagctagacacacacttatatcaactgatcttctcccaaagcctgagaataaagaaaaacctccatctttttacatatatagataatcatcaaagaagatgaagatgatgaaggtgatgatgttgatcgtgatgatgatgatggtgatggtgatggtgagtgaaggaagtataatagagccaacatgtaaagagacaccagacttcaatctttgtgtgtctctccttaactccgatccacgtggttcctctgccgacacttctggcctcgctctcatcctcattgataaaatcaagggcctggcaacaaaaactttgaacgagatcaacggtctatataagaagagaccagaactaaaacgggctttggatgaatgtagtcgaagatacaaaaacgatcttaaacggtgatgttncccaagcccattagaaggcttatctctaaaagggggtncccgaaaattncggaggaagangggttntnatccgnggccggttttgnaagnnttttnttttntcaaggaggggttt

SEQ ID NO: 132402 - DNA, 511 bp, Arabidopsis thaliana
acgactcactatagggaaagctggcacgcctgcaggtaccggtccggaattcccgggtcgacccacgcgtgcgcccacgcgtccgtacggctgcgagaagacgacagaagggggtatgagcgctcttcactcttagcaaccacgagcacaagaaaatatgagcgaccctagcggccaatcttcaacaacgactgtcggtggaattgccggcggtagcggttgtaacggaggaggtggtggaagtggcagtggaagcggcggctcctttgggaatcagccgaggagatcaaaggtgaggaagcaagtgtgggctggagtactcggcatctcatccgactccaccaacaattaataggttcttctttctttctcttttcacctaagaaatcatgtgtagtgaaaaatggtgggggaaattactatgcttgatccttggggtatgttaattgtgtctataaacaagcgagagaattgttggatctcccccttcggcgtgtgagtgagattatgg

SEQ ID NO: 132403 - DNA, 426 bp, Arabidopsis thaliana
ggtatgagcgctcttcactcttagcaaccacgagcacaggaaaatatgagcgaccctagcggccaatcttcaacaacgactgtcggtggaattgccggcggtagcggttgtaacggaggaggtggtggaagtggcagtggaagcggcggctcctttgggaatcagccgaggagatcaaaggtgaggaagcaagtgtgggctggagtactcggcatctcatccgactccaccaacaattaatagtttcttctttctttctcttttcacctaagaaatcatgtgtagtgaaaaatggtggtggtaattactatgcttgatcatcgtttcatgttaactgtgtctaaataacaagcaagaaatatattagaccaccaccatcgtcattgttatgagattatatgaagtatatatatttttaccttctgc

SEQ ID NO: 132404 - DNA, 876 bp, Arabidopsis thaliana
  unsure (1)..(876): unsure at all n locations
atgatatgccggcatactatcgactcactttagggaaagctcgtacgcctgcaggtaccggtccggaattcccgggtcgacccacgcgtccgtacggctgcaagtaaaaacatcaccatgaccaccgattcttgcgtcagcctcgtaggtgaacgaaatggagtgcctatcggtccagcggctggatcggattggcttttgatatatcccaagggtattcgtgatctcctactacatgcaaaattcagatacaatgatcccgtcttgtacattacagagaatggagtggatgaagcaaatattggcaaaatatttcttaacgacgatttgagaattgattactatgctcatcacctcaagatggttagcgatgctatctcgatcggggtgaatgtgaagggatatttcgcgtggtcattgatggataatttcgagtggtcggaaggatacacggtccggttcgggctagtgtttgtggactttgaagatggacgtaagaggtatctgaagaaatcagctaagtggtttaggagattgttgaagggaccgcatggtgggccgaatgagcaggtggctgttatttaataaaccacgggcctttggtcaatttagtctactgtttcttttgctctatgtacagaaagaaaataaactttccaaaataagaggtggctttgtttggactttggatgttactatatatattggtaattcttggcgtttgttagtttccaaaccaaacattaataaataaataaataaaagagtttgaggttnnnnnnnnnnnnnnnnnnnnnnnnnnnnnnnnnnnnnnnnnnnnnnnnnnnnnnnnnnnnnnnnnnnnnnnnnnnnnnnnnnnnnnnnnnnnnnnnnnnn

SEQ ID NO: 132405 - DNA, 522 bp, Arabidopsis thaliana
aatacgactcactttagggaaagctcgtacgcctgcaggtaccggtccggaattcccgggtcgacccacgcgtccggaagacgacagaagggtccagaataagtacagaaattgtaatctttgtcaaattttgtttattttgagtttcttagtgaactcagttggataacagtgacacatatgagatttgagatgaatttattttctggtaaatgcatagagattattaatggttcttactgatttgagaattgcaaggcattgtcctttgagtttggtgttaaagttagcaaattggtgactatctctattgagtttacatgttttcttggttgttattgtgaggatttaagatttgcctgcttttgtatttctctttggtcttgtaatgtcagaattgtttctttcttaaagttgatttctttgtcaatctttaaacagagatcgaggtgtttttgacgcaatagaagatcgttctgcgtgttattatccaagaactgctttagtgttataaacatttga

SEQ ID NO: 132406 - DNA, 552 bp, Arabidopsis thaliana
attcgttccttgccatcactggtggcgctggaatctttgaaggtgcctacggactggttaagcttcaacagcttgtgtatccgacaaaactgttctacactttttatcttaaaggattggctaatgatttgccactggagctcataggaactccggtaccaccgtctaaggacgtggagccagcaccggaagctaaggcgcttaagcccagtggagttgtaagcaactttacaaattagtgaataaaattagtcttatctttctcgtgtcctgtatatataataatctttttcataaagaattttatattcttagacttgtaatcaaataatttgtatggatcttagtatccttgtgaatgcagtatgtttgagttgaaaaatacttgtaatcgaatctttagttttgagttgtccccttttggggagtaaaatatcttcttctttttagaaaaaaaaaaaaaaaaaaaaaccacaaaaagcggccgctctagaggatccaagcttacgtacgcgtgcatgcgacgtcatagatcttctaagttgcacctaa

SEQ ID NO: 132407 - DNA, 721 bp, Arabidopsis thaliana
  unsure (1)..(721): unsure at all n locations
accagaaaaccagcaaatggaagagaagaggctctaaaccatgtggaagcggaacggcagaggagggagaagctgaaccagagattctacgctttgagagcggtggtgcctaacatctccaagatggacaaggcttcgctccttgcagacgcaatcacttacatcacggatatgcagaagaaaatcagggtgtatgaaacagagaagcagataatgaagaggagggagagtaatcagataactccagcagaggttgattatcaacagaggcatgatgatgcagttgtaaggctaagctgtccgttggaaactcatccagtttcaaaggtgatacaaacgttgagggagaatgaagttatgcctcatgattccaacgtggccatcacagaggagggtgtggttcacacattcactctccggcctcagggtggctgcaccgctgagcagttgaaggacaagctccttgcctctctatcacagtaactatcccaccagtaactgctatgtaataagtgtacccgtgttggaggttgtatcaatgtactattgcaagccacccaaaaaaaactccagcttagtaggatcgtgtaattttccttatatgtaatgttgagatttgtcttttacatataaagatttgagcaaaaannnanccngcccanacccccnnnaaagcagccgctctagaggatccaagcttacgtacgcgtgcatgngacgt

SEQ ID NO: 132408 - DNA, 677 bp, Arabidopsis thaliana
gtacggacgaggagaggaagatgaatcttgagagagacacgtgtcctggttttatatcggacggtttagggagagtcatttggacgaacggttcttacagagagttggtggttgggaaagatcatgagcagtgtggtaagatgagtgtgtggcttgtgatgaaggagaagcctttggtaacgtaccggacttttacgtgtacaatgagattgcagtacacgtgtcgtgataaggaggtgagttcgattacttcgttctgtgatgtttggaggatgagtgacggtggctttgcgtggcggcttgatgttgatgctgcactttgccttggacggtgaggattgggccgttggattagagatgatgttagattgatgagatgaggatatttaataacggcatgcaagttagatagatatttggacttccaactttatgagtgtacatacatatttcgcaattttgtagcttttaagttttaacattttgatttcaatgttctgttttaatttgtagtgtttggtgttttattcttcttcttttttggggtttgtataaaaactcttggttagtcggtatctttcttttttctagtattgtgctttgtaggattatggaattagtacttaggtgaggatcttatgtttaatcacacaatggaatgcattaaattttttgct

SEQ ID NO: 132409 - DNA, 565 bp, Arabidopsis thaliana
  unsure (1)..(565): unsure at all n locations
cnnnnnnnnnnnnnnnnnnnnnnnnnnnnnnnnnnnnnnnnnnnnnnnnnnnnnnnnnnnnnnnnnnnnnccacgcgtccgcggacgcgtgggcggacgcgtgggcggacgcgtgggcggctgcaagaagacgacagaagggggacacaaatggcagcagcgatatcagcgactttggtattcgctgcaagacgacgtccattgttctatagcttatcatcatcgtcttcttcgaaaccaaacacgagaaagcttgttctatactccaaacctggttgttgcctctgcgatggtcttaaagagaagcttcacgctgccttcactctctccaccggtcctgattcactcaacgacgttactcttcaggtaagagatataactacgaatcccgagtgggaacgagcgtatcagtatgagataccagtgttggctaaagagaattctgatgggaaagaggaagttttaccgaggttatctccacgtttaagtgcagaactcattcagaaggaagctacttgctgcctttagttgatcaattacgtgcacgacaacganaaaaagagac

SEQ ID NO: 132410 - DNA, 545 bp, Arabidopsis thaliana
  unsure (1)..(545): unsure at all n locations
tggaaagagtattgctctggcgatgcttgtncactgggcacgtaacgaaggctggttagtttnatatgcaccaaaaggacgtgactggactcacggtggctacttctataagaatccacatacagggttttgggacactcctctacaagctgagaatattctcaaggattttgtcaagttcaatgaatcccgcttaagagagttacggtgcaaagtccatgatcctatcgtgcttggagagggtgcgggtgttggatacttgaaaggagcagatgctatgcctattcccgaggattcaactctgtatgaccttgtgcaaatgggaattaagagcactcatgcagctgttaatgtcgttgtgcgacttagaaaagaactctcagttgttaaagatgtaccagtgttgattgtaatccatcaatataacagttggtttacattcagcgagtttgaagagcccgtaacaccgcgttcttgccgacctatacatgccagagaacttacaacggtgaatgctttcagaagcatgatgcatgaagatatga

SEQ ID NO: 132411 - DNA, 667 bp, Arabidopsis thaliana
  unsure (1)..(667): unsure at all n locations
nnnnnnnnnnnnnnnnnnnnnnnnnnnnnnnnnnnnnnnnnnnnnnnnnnnnnnnnnnnnnnnnnnnnnnnnnnnnnnnnnnnccacgcgtccgtacggctgcgagaagacgacagaattagagagaaaagatagagagatgtcaggttctgtcttcgttcccggtatggcgattggagttcccacgctttctcgttcgagctctgttcaccggagcttagaaccgacgaagaagatgactatgagtagtgtcaaattcgtgaccagttttcgaaacccgtcaaactgttcagggacaaaacggtcatttcgcgttatggcttccgatgaccggtcggaacaagcagatagcggtcaaggaattcaggaggacttaaactacttgttgaagatcggagttggttcagtggcaggtgcagctataatcaaatacggaagtgtcttgttcccgcagatcacaagacctaatctcactctagccctcttcattatcatagctcctgttgtaatctccgttatccttttgtccctatcatcatcatcttcctccaagaaacagaactgattggttaaaaaaatgtgtaaatgtatttcacctcattgtgaaaaagatcgtgttaaaggatgagaaagtttcagtataatccagaataaaagtttcaatctt

SEQ ID NO: 132412 - DNA, 547 bp, Arabidopsis thaliana
  unsure (1)..(547): unsure at all n locations
atgatcctgccggctannnnnnnnnnnnnnnnnnnnnnnnnnnnnnnnnnnnnnnnnnnnnnnnnnnnnnnnnnnnnnnnnnnnccacgcgtccgtctgcgagaagacgaccgaaggggggcggcaatggacaaagtcgtggaggtttatgaaagagcagtgctgggagtgacatgttcggtggatatctggttgcattattgcacttttgccatcaatacatatggagatccagaaacgatcagaaggctgtgtgaacgagctttggtttacgttggaactgattttctttcctctccgttgtgggacaaatacattgagctaaaaatcgtcgtcggtggacgcaacagagagaaaggtgaagcaatggtggctaagctgggagagaattctgaattttctcaagtagatatcaatgatgctaagatgcttgagacaagtttaagagacgttgatcttgtagtccatgccgctggaccattccaacaagcacctcgatgcactgttcttgaagctgccataaataccaagactgcatatctcgatg

SEQ ID NO: 132413 - DNA, 456 bp, Arabidopsis thaliana
cccacgcgtccgcggacgcgtgggcggacgcgtgggaggacgacagaagggggaagaagcagagattcaaacattcctctgcagattagtgaaagcaaatcggaagaagcagcgaatcagcttcagatgggagattcaacatttctcgatagaatgcttctccagcttcgctccacttgcaagtattacagcggttaccctaaggatctcgggccatcgcgggttctccattttacatcagaaagagagtttgtccaactccttcaccagggctatcctgtggttgtcgcattcaccataaggagtaactacacacaacatcttgaccggatgcttgaggaagctgctgctgagttctatcccaacataaaatttatgcgtgttgagtgttccaagttatcccggattctgcataactcgccagaaaaatgaatatcctttcattgaaatattcca

SEQ ID NO: 132414 - DNA, 514 bp, Arabidopsis thaliana
  unsure (1)..(514): unsure at all n locations
cnnnnnnnnnnnnnnnnnnnnnnnnnnnnnnnnnnnnnnnnnnnnnnnnnnnnnnnnnnnnnnnnnnnnnnnnccacgcgtccgcccacgcgtccgtacggctgcgagaagacgacagaagggggcaacaacaacaaaaaaaaacagaacagtatccagactacgaacacagcacacgcagagcacgaagaacaattcagtgaatgggtacttgttacacacacctcacccaaatccccgcgtactgacgcatctacccctccaaactcaccgatattacatccaagccaccgccgtgaaaatccaacgatcaacgacgatgatgaagattctgttgtcccctccaccgtgaatctttggcttccgtggcgagtgattgagactaccaagaagcgattaatcaagaactcagtgtgcatctttcaggccgtccaaagggtgcgttgtaattacctaactcgtaaaagggtattttggtcattaacaatcattggaggcttctcgttggtcttga

SEQ ID NO: 132415 - DNA, 534 bp, Arabidopsis thaliana
  unsure (1)..(534): unsure at all n locations
nnnnnnnnnnnnnnnnnnnnnnnnnnnnnnnnnnnnnnnnnnnnnnnnnnnnnnnnnnnnnnnnnnnnnnnnnccacgcgtccgtacggctgcgagaagacgacagaagggtacggctgcgagaagacgacagaagggtacggctgcgagaagacgacagaagggtacggctgcgagaagacgacagaagggtacggctgcaagaagacgacagaagggtacggctgcgagaagacggcggaaggggaggaagaaaatggatgaggagccatccaaggagactagaaatgatagtgccggagaagaggttttgaagaactgtcatgttgaagaagataaggaaaaagaagctcaagaaggttgcagtgaaagaagtgataaagaatatgagagggttggtggtggggctaagagggtagagcaggtggagattgagttaaggaagaaaagcgccgtaggagaagatgacctgaactgtactgttagagaagatggagagacagaaaacttacaagaaattgaagaagagtgtca

SEQ ID NO: 132416 - DNA, 609 bp, Arabidopsis thaliana
ctccgctctaatccgcactcatttagggaaagatcgtacgcctgcaggtaccggtccggaattcccgggtcgacccacgcgtccgcgagaagacgacagaaggggcagagattgagaagcatgaccgtagggaagttcgtcaccctcatttgtctgagagagactaccagacgtatgatcatcttacttctagacgggaaatcttggttcgaaactcgcctgacccaccagattcagcggttactctggattcctacaggagagatccgtattacatttgtgagcgccatgctcttgaaagaccaccaaggacatacatggtttctccaggtagacaagatgatgacctgtattcccggtatgtaacaccggattcattggctgagtactaccgatcatcacaaagatacccaagcgtaactgaacctgagcttccgccttcgttagtaacatcccggtatgcttattctcggtctttgccttattctccccgctgaaatcagaatgtgtaattctcctattcctttgaatttatctgatgtttaatgtatcttggatatggatactaaagagttgctgccaaagggttccccttaaatttggtcggcc

SEQ ID NO: 132417 - DNA, 520 bp, Arabidopsis thaliana
acgactcactatagggaaagctggcacgcctgcaggtaccggtccggaattcccgggtcgacccacgcgtgcgtacggctgcgagaagacgacagaagggcaacgcattgctcagtacagagctggaatcgtccctgtttcctacagaagggttccttgcaggagaagaggaggaataagattcgcgataaacggccactcatacttcaaccttgtgctgatcacaaacgtcggtggtgccggagacgttcactcggcggcgatcaagggttcaagaacagtgtggcaagctatgtcaaggaactgggggcaaaattggcaaagcaactcttacctcaacggtcaagcactttcctttaaggtcaccaccagcgacggccgcacagttgtctccttcaacgccgctcctgccggctggtcttatggccagacttttgccggtgggcagttccgttaaaaagggcaagttggttaatctctcttccatttatctaaagtaaactcatttgtgtggttatat

SEQ ID NO: 132418 - DNA, 673 bp, Arabidopsis thaliana
  unsure (1)..(673): unsure at all n locations
gatctagatttgtcaggtctcttcgaagaaaatgatgataagagatataaaacaagaattgggtccaagaacacagcgcaagaaacaatcaagaagattgaagctgcagcaacttgtgttagtttatcagttgagagaataaagcacttcaaggttaagattcagccaaaggagataagatcaagatcttcttatgacttattatcagcagaggtgatagaggtgactccaacaaattgtgttatagaaatatcgaaatccgcaggcgagttaagactatacatggagttttgccagagcttatcaagcttacttaccgcggaagtaagctaagatagagagccatagattctcaagtaaaaatgttaaaacagaggaagcaaatgaagcatatttttgcagattgaagttgaagtgtaaagaagacaatgaagagaagaaatccaaagaatttagttatgtcttggatcttggtgatcccaaagggttcttattcaggatgtaaaatgatagattggtttctaatcaaactcgtttataaaatagatatataaaaagctgaacaagttctatttcgccgaaaaaaaaaaaaaaaaaaaacaaaaagagcggccgctctagaggatccaagcttacgtacgcgtgcatgcgacgtcataactcttnctatagt

SEQ ID NO: 132419 - DNA, 534 bp, Arabidopsis thaliana
  unsure (1)..(534): unsure at all n locations
atgatactgccnnnnnnnnnnnnnnnnnnnnnnnnnnnnnnnnnnnnnnnnnnnnnnnnnnnnnnnnnnnnnnnnnnnnnnnccacgcgtccgcccacgcgtccgtacggctgcgagaagacgacagaaggggactggttggaggttttgggctgtggggtgaccgagcaagtaattctgaaacaaagtggattagaaaataatgttgcttgggccttcggacttggacttgagagacttgctatggttttgtttgacatacctgatatacgatttttctggtcatccgatgaacgattcacgtcccagtttggaaaaggagaacttggagtgaaattcaagccatattcaaagtatcctccttgttacaaggacatcagtttctggataagtgatttgttcacagagaataatttttgtgaaggtgttagaggaattgctggggatcttgttgaagaggtgaagttaattgagcaattcaacaataagaagaaatggctgacgagtcattgttacagaatcgtgttccgttcc

SEQ ID NO: 132420 - DNA, 465 bp, Arabidopsis thaliana
  unsure (1)..(465): unsure at all n locations
atccgactcactttagggaaagcacgtacgcctgcaggtaccggtccggaattcccgggtcgacccacgcgtgcgcccacgcgtnncgccacgcgtncgtacggntgcgagaagacgacacaaggggaagacaaatccaatcagaggtcagcaacaactgaaacttcgattggagatagcattctattgatcgtagctctctgttttcactctgtcttctaaggcatagctattggtatttcagagactaaatcagatgcttggagagctctctggacaataacactccataagatatttgcagcgattgcaatggggatagctcttctccgtatgatccctgaccgtcctttattctcctcaatcacttattctttcgcattcgccatctcgagcccaattggtggtgccatcgggatagccatcgatgcaacgactcaaggggccatcggcggattggatatt

SEQ ID NO: 132421 - DNA, 488 bp, Arabidopsis thaliana
cagctctctacgactcactatagggaaagctggcacgcctgcaggtaccggtccggaattcccgggtcgacccacgcgtccgtacggctgcgagaagacgacagaagggggcatttctctctgcctctctttctctcttcatatttcccggtgcttcgtcgacgttaggggtcttttccgttgaccggagccgcagatttcttcgattctctttaaaccggcggtccatgtggtcttaccgacgagaaggccctaatttcagggattagatagctttttgaaacaaattagagcaatgaacacagagagagctcaagaaggtgataggaacgatgccgcatcttcctctggctgctccgagtcctacgagtttagccacgcagccgctaaagctgcagtagctcaagtctgcgagagcgttgggtacgagaatttcaaggattcagctctcgaatctctatctggattcgcactccagtacattcttc

SEQ ID NO: 132422 - DNA, 555 bp, Arabidopsis thaliana
  unsure (1)..(555): unsure at all n locations
tcccttttccccnanctnatcggccccctngggnaanttgtcccccnncgggtcccgncccggaatcccgggnngccccccgggcccgggaatctctaaggaagaagaaagaatgaacgtagacgaagagattcagaaactggaagaagagatccatcgtcttggttctcgtcagaccgatggctcttacaaggtgacgtttggagtgttgttcaatgacgatcgatgtgccaacatctttgaagcattggttgggactctaagagctgccaagaaacgcaaaatagtcgcatttcaaggtgaacttttgcttcaaggcgttcacgataaggttgagatcactctccgaccaacaccaccgccaccgcaagctgctgctgctactgcagcctcctcctaagttcccatttctgcttttaatctttatactattgagtgtaatgaaatgataaacttgaagatcaatcattcctttgcttctctattgtcatgatcacattgcttgagctatatttttaagttgttgcatgtagtaacaaagtcactattaacaag

SEQ ID NO: 132423 - DNA, 779 bp, Arabidopsis thaliana
  unsure (1)..(779): unsure at all n locations
atgatactgnnnnnnnnnnnnnnnnnnnnnnnnnnnnnnnnnnnnnnnnnnnnnnnnnnnnnnnnnnnnnnnnnnnnnnnnnnccacgcgtccgacggctgcgagaagacgacagaagggtacggctgcgagaagacgacagaagggtacggctgcgagaagacgacagaagggtacggctgcgagaagacgacagaagggtacggctgcgagaagacgacagaagggtacggctgcgagaagacgacagaagggtacggctgcgagaagacgacagaagggggagacctgaaatctctaaggaagaagaaagaatgaacgtagacgaagagattcagaaactggaagaagagatccatcgtcttggttctcgtcagaccgatggctcttacaaggtgacgtttggagtgttgttcaatgacgatcgatgtgccaacatctttgaagcattggttgggactctgagagctgccaagaagcgcaaaatagtcgcatttgaaggtgaacttttgcttcaaggcgttcacgataaggttgagatcactctccgaccaacaccaccgncaccgcaagctgctgcttgctacttcagcctccntcctaaagttcccatttcctgcttttaaatcttttatactattgaggtgtaaatgaaaatggtaaactttgaaggntcaaatgatttccttttgntttccnnnaattggccatgggccanaattgcttgngnctatanttttaaaggttgttccaatgntggtacaaaggnaccttttttc

SEQ ID NO: 132424 - DNA, 515 bp, Arabidopsis thaliana
  unsure (1)..(515): unsure at all n locations
cannnnnnnnnnnnnnnnnnnnnnnnnnnnnnnnnnnnnnnnnnnnnnnnnnnnnnnnnnnnnnnnnnnccacgcgtccgcccacgcgtccgtacggctgcgagaagacgacagaagggaaacaccgttcccatctcttcgtcttctcccgtttccatctccttctgctgctctcgggatccttctggatgattcaacagtgccaggcatttggtttcatggttatatctttctctcaatctaacatagctgttgcattgataacagagttctgtcctgttgccacatacttcctgatgctcggcaagatcaaccgcaggcaatggaaactcacagaactcgcatgttacaatcctcttggggcaaatttctcctttatgactatcgaaaatctcacgttctatggtctctttgcacatcgagcatgctatcggagcatgtgtgttcaagtagggttcctcagcatgctttttgggtaccataccacccacaaatctctaaattcaaaaccttga

SEQ ID NO: 132425 - DNA, 531 bp, Arabidopsis thaliana
  unsure (1)..(531): unsure at all n locations
ccggcaannnnnnnnnnnnnnnnnnnnnnnnnnnnnnnnnnnnnnnnnnnnnnnnnnnnnnnnnnnnnnnnnnnccacgcgtccgtacggctgcgagaagacgacagaaggggatctccattactcgactctcctcacctaaagattcaaccttttctctgtttcccaattcagagatgaagcttgtggagaagacgactactacagagcaggacaatggagaagatttctgccgcaccatcatcgaggtttccgaggttaacagaaacgtgtttcaggctccgggcggtgaagctgatccctttcgagttgtctccggcgaagaacttcacctaattccgccgctcaacttctccatggtcgataacggtatattccggtctggattccctgattcagctaacttctcctttctccagactctcggtctccgctcaatcatatacttgtgcccggagccctacccagagagcaatctccagttccttaaatccaatggaatcaggcttttccagtttggtattgaaggca

SEQ ID NO: 132426 - DNA, 550 bp, Arabidopsis thaliana
  unsure (1)..(550): unsure at all n locations
gggtcgacggaatagtcagggcgcccccggctagtatcgccgnnnnnnnnnnnnnnnnnnnnnnnnnnnnnnnnnnnnnnnnnnnnnnnnnnnnnnnnnnnnnnnnnnnnccacgcgtccgtacggctgcgagaagacgacagaaggggatagaaaattaaaagataacaaacattttaacaaacccaaacccaaaaattctcaaggaggccgaagaagaagaagaagaaatgagcgttaatggtgagaacaaggtctcaggaggagatagttcatcttcagatcgacctgttagagtctacgccgatgggatcttcgatttgttccatttcggccacgctcgtgccatcgaacaagccaaaaaatcgtttccgaatacgtatctgcttgttggatgttgcaatgacgaaattacgaacaaattcaaggggaaaactgtgatgactgaatctgagcgatacgaatctcttcgacaattgcaagcgggcttgatgaagtgattccagatgcaccatgggttcttacaaccagagtttcttgataagcataa

SEQ ID NO: 132427 - DNA, 707 bp, Arabidopsis thaliana
  unsure (1)..(707): unsure at all n locations
atgatctgccggctactatacgactcactttagggaaagctcgtacgcctgcaggtaccggtccggaattcccgggtcgacccacgcgtccgtacggctgcgagaagacgacagaagggggatggaagcagaagtagaagaggaagaagaagacatgttcgaagacgccgtgtgtaccacgcaagcaagagtcaacacgccattgtccgtaatcacagaggccttcgaagatctcgcggatctggtgaaaccgcaacgatctgatgagatcgatgaagacgaattaaggcttgatgatttctgcagtgcgtgtactcacgtctctgttctcttcaattgtcttggattcgctttcaaatttgcggaaatggagtacatcgccaaggttaaggatttggtggaagcgtcgaaaacgttcgaaacgttacacaacattcttgacctagacgtggagaaagaaacggttaaaacaccggggagccattcgcgtaacctaagacgtgtgagacaagggtttaagatctgatcccgacgccatcttttgaacaattttttgatccgcagatgacttattccgttgaaagaccgctgctgacaacgggctttcacggganngttgttcaccgttcccaacggtgggccnttaganccccgggttttcgccggattttttnacttcccgcggggggtncaacttttnttacggg

SEQ ID NO: 132428 - DNA, 746 bp, Arabidopsis thaliana
tgatactccagctctctacgactcactattgggaaagctggcacgcctgcaggtaccggtccggaattcccgggtcgacccacgcgtccgtggctgcgagaagacgacagaagggggtcgtcgtcgattcaaaatccgtcgcttcgcttccaacgttcgccggcaatctaaacattttccgggatggaggaagagatgtcgaaccgtcgagtatcaaatcggactcgtaaggtcgctacgaagatggcggcggctcttacaagcaacgacaatcgaactcaggctgctatagctaggctagaggctttagagaacgataatggtgctattgaagtgatagatttgaacgatgatgaagaagcttctcttgatgaagatgatgatctcggttacttacagaagaagcaacacaaaggatcaaagcgtaaaactcgacaagcgaaagctttagaagctcgtaaagctcctaaatccttccttgagctattgcaagaggcaaatttggagtctttaccgtcgcatgtaccgacttacttgaaagcagcagttggacctccgagttcgtcttctcgtcgctatttttgctcggtttgtggttacattgcaggttacaattgttgtttatgtgggatgaggttttgttctattcgttgtcaaaatattcacaaggatactcgttgtcagaaatttgttgcataggaaaggagtgtgaaaacaaatgtaacatatttttcaaaatgtatttg

SEQ ID NO: 132429 - DNA, 707 bp, Arabidopsis thaliana
  unsure (1)..(707): unsure at all n locations
cnnnnnnnnnnnnnctcactttagggaaagctcgtacgcctgcaggtaccggtccggaattcccgggtcgacccacgcggtccgcccacgcgtacgaccacgcgtgcgtacggttgcgagaagaccacagaaggggaccatcgtcgtcaatggaaacgagaatcctttgacctctcctctcagtcgtctctctctctcgccatctccgccgtcggtctgaggcatcatcttggtcgaagaagaatcagcatcaacttccatcacgctcacgaaattggtcgaagaagaagaatcagcccttcttttggttggtgaagatttggcgaagagcaacggcaagccaaagatgaaaaactcatgaaattcgatgaaatcgaagagaatagaggcaatcttggttcgtgaagcagaagcaagattctactgcacacgttgatatcacaggctatcaatgctggtctctgtgtcagagagagaagtggcctgatgcccacaacaagaaagcaggagcacatagtttcgaagcaagcaatgaaacaccaatcttctacctcatttttggaagacagcatatgttgagagattgtcagacatttcatcctttctttctcttgtcttctctccgtgcaaactcattagttcgttttggtcccttggtagttttaatgttattgactaaatcagttttacatgattctgtttccctt

SEQ ID NO: 132430 - DNA, 663 bp, Arabidopsis thaliana
gggaaagcacgtacgcctgcaggtaccggtccggaattcccgggtcgacccacgcgtccgtgcggctgcgagaagacaacagagggattgccagagaattcatcaggttgctttttggctgtttacgtgtcttcatagcttattggaatttaaaagattaaaaggaaagaacactttctgacagagagacgggaaggagcggctctttatgggggggtatgtgctcatgcttcttcttcttctcagaatactctatcaccataccgaaactactttgccctctgatagtgaacaactctcaataactgggagcagattgatgagtataatatataagccactcggctacctatataatatcgttagcagagtatatatataaccttaaagcactggacatggttggtggtcacattcatcaacattaccttccttaggtttcggccaggtttcaaagttgtgtaataattcaccaagcataatttaaatgtgaatgtataatttgcaatttatgtgattccatgtaaggattttaaaattttcaaaatttgttagcaaatgtttgtgcaatatagtgtttttctttccttacaaaagatattttaataaatttgttaacaaatgtttgtgcaatatagtcacgagaaaagtcatgttttgcat

SEQ ID NO: 132431 - DNA, 440 bp, Arabidopsis thaliana
agaagggggattggcagagatttcatcagtttgctttttggctttttacgtgtcttcatagcttattggaatttaaaagattaaaaggaaagaaaaaattctgagagagagatgggaatgagtggttcttcaggtttagttcatgtgctcatgcttcttcttcttctcagcatcctctttcaccataccgaatctactttgccctctgatagtgaacaactctcaataactgggagcagattgatgagtataatatataagccaaacggagacatatataatatcggaagcagagtatatatatcaccttgaagcagtggacatggtggtggtcacattcatcaacattaccttccttaggttttggccagtatacaaagttgtgtaataattcaccaagcataatttaaatgtgaatgtataatttgcaatttatgtga

SEQ ID NO: 132432 - DNA, 520 bp, Arabidopsis thaliana
  unsure (1)..(520): unsure at all n locations
tnggaggtgcctcncattncacagccgggtttcgggccggtcaacccatacggaattccaggatcttgatgaggtgattgcaagggccaacaactcaaggtacggtttagctgctggagtgttcacacagaatcttgacacagcacaccggctgatgcgagcactcagagttgggactgtttggatcaactgttttgatgtacttgatgcatcaattccatttggagggtataagatgagtggcattggtagagagaaaggtatctacagtctcaacaattacttgcaagtcaaggctgttgttacttccctcaagaaccctgcctggctctaaaccataccaggtggttacacttatttctcgagtttggtttatgatttgcacttttgctttgaaaacctggagttgtactgtgtctctaggatttctagattttgagagtaatttatcttcaatacattttgcaaataaagctacatgacaatgtgtgattaataaacacaaactcttattagtttc

SEQ ID NO: 132433 - DNA, 539 bp, Arabidopsis thaliana
gactcacttagggaaagctcgtacgcctgcaggtaccggtccggaattcccgggtcgacccacgcgtccgtacggtgcgagaagacaacagaagggggagtccgagagaggagaacaatggaagagaagaagaagacgatggagatggaagcaacaacaatgaaaggcacggcggcggaaggtataacggagagactctcttctctcgacaatctctattttccacgcgccgtccaattaaccgctgcatcttccgaccaacgcaaatccatcctcctcgacctcctccgtcgtgatcccgccgtttttctagagagatatggatcggagctactagtagatgaattgcttgagtttgatgctatgaaacatgactacgaggttgattggcatttgaaaaacctgcggaagaagataagtccgacttcagaagagattaaatcgaggtctgtagctgtgaggaataggagattggcttatttgaataagcttgtatccgagggacagtatttctcagaggatgctatgagagatagaga

SEQ ID NO: 132434 - DNA, 1008 bp, Arabidopsis thaliana
  unsure (1)..(1008): unsure at all n locations
nnnnnnnnnnnnnnnnnnnnnnnnnnnnnnnnnnnnnnnnnnnnnnnnnnnnnnnnnnnnnnnnnnnnnnnnnnccacgcgtccgcccacgcgtccgtacggctgcgtgccaactaacggtgggaaaccggtggagagaagacggaaagagtctgagagagagagaagaaatggggagagaagtggcggagagctgtgtagacactatgttaatggagatggtggcgatgtacagtggccgattctatgctaacaagccggaactcgccgctcggaggatcgaggccattggttatcaggtcggccaccagctctccgagaggtacactatggaaagaccaaggttcagtgaccatctagaggcaatcaagtttatctgcaaagacttctggtctgaggtcttcaagaagcagattgataatttaaagacaaatcaccggggtacttttgtattacaagacaacaagttccggtggttgtctcgtgtctcaattgacccttcatctgagaatgaaacccaagatccttctactccaggggaaagcaaagctgcacaagcggtgagcatgtacctctattttccgtgtggaatcattagaagtgtcctctccaacttggggatacccttgtgctggctctgcagatatatcaagcccttcccacatggctcttttcgtgaattcgggtccaaagggctggatttcttgcatttttaggcctcggaggttacctttgggccttttaattaacttttttccaaagggggaaaggaaattagtattccccctcttcggggagttcctggggaatccaaaatacctctaaaaaacccccccatattgtgccaaggggcctttcctggggtttcgggcctggatctcccttttttggaccaccaaccctttaaagccccctttgtgtgggggcctcttggttttttaaaacaagggggaggggccctggggtttccattgttttggaaaaggaacttttaatatttttccgggc

SEQ ID NO: 132435 - DNA, 707 bp, Arabidopsis thaliana
  unsure (1)..(707): unsure at all n locations
gggccncttggggganncaagntttnctcaaaangcttngggcnagggggntncaaananccggttggaaaatttaaggccaaatccccccggggaacttttggaattttccaaggccaacaaagtccccggcgggttgccccggggncccaaatgggccccttcatcctgggggaatgaaacccccaggaaaccttctaccccaggggaaagcaaagctgcacaaccggtgagcatgtacctctattccccgtgtggaatcattagaggtgtcctctccaacttggggataccttgtgctgtctctgcagatatatcaagccttcccacatgctctttcgtgattcgggtcaaggcttgattctgcatttagctcgagtacttggctttatactttcaaggaagatagatccttcgggtctgatcaatctaaaacccattgcaggcttctgtttgctgttcttttgacacactttagccttgtggtgcttgttttaaacagtgagggcttggtttcatgtttgaaatgacttttatttttctgttgtaaatttttgttgatatcttatatacagtaattcctggtgcatctccatttcttttccaaaaaaaaaaaaaaaaaaaaaaaaaaanagcggcagctctagaggatccaagcttacgtacgcgtgcatgcgacgtcatagatcttctatagtgcgtcctaa

SEQ ID NO: 132436 - DNA, 607 bp, Arabidopsis thaliana
  unsure (1)..(607): unsure at all n locations
aggtcacaacgactcactattgggaaagctggcacgcctgcaggtaccggtccggaattcccgggtcgacccacgcgtgcgtacggctgcgagaagacgacagaagggtacggctgcgagaagacgacagaaggggattcttaacgggaactttgattgggctagcttggcaggtcttaatccaattccagagctagctccgaccaatggattaccgagttacggtggttacgatgcgtttcgagcggcggaaggtggggcggagagtgggcatgtgaatcggcagcagaactcgagcgggttgactcagagtttcgggtacagctcgagtgggtttggtgtttcgggtcaaacattcgagtttaggcaatgagagagatgtgaagttactgatgggtgaaaaaagtaaaaaaaaacttggagatagtagagtggcaattgatgtaaataatagggatttatatggggcttttaccgattcggtgaggcttaggattccactaaggaaaaaggctcgactggggactagtttgatccaacttgacggcccacaaatgtgtaatgtttctcaacggagagaaaaataaatggtcaccaatatttttnc

SEQ ID NO: 132437 - DNA, 732 bp, Arabidopsis thaliana
ttttaaagatgaactaacagagaggtatcctgaagcaaggagagcttacttaaagagtggaggagatttcccattcctatcacggcccgacgaagtcaatttgcatctacagctacacttaaggcgggtaggagtagaaccacgacccgaagtggttaaaagcattccaaaaggcggcgcagatggcacagacggtagcagccagagcaagaagaagagtgatgaggagaaggacgaccgtaacaacaatatgcctcaagactctggaagctcatcttcagatcaatcaccgacatttccagaaagttccggaagctccaacgatccgcctttacccacagacaccattcagttactgagttcatcattgaacaacctcatattagttcaactcgctggtgaagtttatcagtcttgtgtggttttcacattgtgttactgtacattggttttggttcacggtggtggttttatctccagacaattggtttagtgttctttatttatttattacctcttttgttgtttaaatctttttacttttgggtttctttgatctgttttggtttctcttgactttttgtataagtttgtaagacaaagcaagagttctctgtatgtttcaagttattacacttttggaagaaaactttggttgggttttgggattctctagaggatccaagcttacgtacgcgtgcatgcgacgtcatagctcgtcggatagtgtaa

SEQ ID NO: 132438 - DNA, 296 bp, Arabidopsis thaliana
ggctcctttcttcgtgttgctcgagttcttcaatcgttttcgggtatgaaccatatcccggttttcaagcgcgtgtgaatgccaaggtagaaagtgacatcaaggaatataggccacaagaagcagaagaagaataagatcacataagcttggattatatataactgaagaacttgaacccattgtcgtgtttctataaccgaaatgataataagaccaccatgatccatggattgatgtattggtgtgtaaactatgtttcaatatattgaatataatatgtttcagtcaaaaaa

SEQ ID NO: 132439 - DNA, 344 bp, Arabidopsis thaliana
cgagagacgacagaaggggaacaccacaaacacaaacaaacatatagaaaaagagagaggaggataataatatggcgagcaagaaagcagctatggttatgatggcgatgatcgtgataatggctatgttggtcgatacatcagtagcgatagatctctgcggcatgagccaggatgagttgaatgagtgcaaaccagcggttagcaaggagaatccgacgagcccatcacagccttgctgcaccgctctgcaacacgctgattttgcatgtctttgtggttacaagaactctccatggctcggttctttcggtgttgatcctgaactcgcttctgctctcccc

SEQ ID NO: 132440 - DNA, 556 bp, Arabidopsis thaliana
atacgactcactttagggaaagctcgtacgcctgcaggtaccggtccggaattcccgggtcgacccacgcgtccttacggctgcgagaagagacagaagggtacggctgcgagaagacgacagaaggggaagaagtagcagaacaatggcgacttctcagcaatttttaaaccctacactcttcaaatccttagcttcctcaaacaaaaactcatgtactctctgcccatctcctttcttgcaactcaagtccgcctccacaattttcaattacaaaccacttacttcctcctccgccacgatcatcacacgcgtcgctgcatcatcctccgattcaggcgagtcaataaccagagagactttccacggcctctgcttcgtcttgaaagacaacatcgacaccgatcaaataatccccgccgagtacggcactctcatcccttcgattccagaagatcgcgagaaactcggctctttcgcgcttaacggcttaccaaaattctacaacgaacgtttcgttgttccaggagagatgaaatcaaagtactcagtcatc

SEQ ID NO: 132441 - DNA, 540 bp, Arabidopsis thaliana
ccctagctatggaaatggctccagtgatcatgtggcgagaagacaacaggcctgaatcttatcgggaatactggagacgcccgtcaaggagtcctaagaaaagtaacgactttgaaactgctactccatgggacttgctctcaggtaaacacaaaaacacttggctcctatactctttgaagcacagtttcattacgatcattcttctctttcatggttaatggttataaacagatgaaggagaaggtccagatgcatcctcatcaatccctctagatgatatcgcacgagttgattttggagcggtcgaggttgtccagtgcctaattgaacaccacaatgcgattttcactgatgcagccgagactgtatggaggtgaaaccaccacagttaaccaatattgatctggttacaagaacatatgcattttgatctggatgatgattgactagtggtttcagtaaataagatctcgagccgaattccgagcttacgtacgcgtgcaggcgacgtcataactcttctatagttgtacctaa

SEQ ID NO: 132442 - DNA, 647 bp, Arabidopsis thaliana
  unsure (1)..(647): unsure at all n locations
aactggggtcaaaccccccttttcccggtgggccccgaaanccctttttancaaaagggnttcccnatcccctncctgggaaaggggcccccggntaccctttgnccggaaaccaaccgggcccttaatcttaccgggaattactggcacccccccgtcaagggggtcccttaggaaaagttaccggctttggaaactgcttcccccatgggacttgctcctcagatgaagggaggaaggtcccagatgcatccttcatcaatccctctagatgatatcgcacgagttgattttggagcggtcgaggttgtccagtgcctaattgaacaccacaatgcgattttcactgatgcagccgagactgtatggaggtgaaaccaccacagttaaccaatattgatctggttacaagaacatatgcattttgatctggatgatgattgactagtggtttcagtaaataagatgttgtttcatatttggttcttctgtaacaatttttagactttagaactctgatgattaaaagataagtttttcttataagaaaatcaagnnnnnnnnnnnnnnnnnnnnnnnnnnnnnnnnnnnnnnnnnnnnnnnnnnnnnnnnnnnnnnnnnnnnnnnnnnnnnnnnnnnnnnnnnnn

SEQ ID NO: 132443 - DNA, 503 bp, Arabidopsis thaliana
  unsure (1)..(503): unsure at all n locations
tnnnnnnnnnnnnnnnnnnnnnnnnnnnnnnnnnnnnnnnnnnnnnnnnnnnnnnnnnnnnnnnnccacgcgtccgtacggctgcgagaagacgcagaaggggaggatgctacaaaagaaaaaagagatcggagacgtgtactatagagtcgactatacttgaggacgcattttcttggaggaaatatggacaaaaggagattcttaatgccaaattcccaagaagttactttagatgcacacacaagtatacccaagggtgcaaggcaacaaagcaagtccagaaggttgagctcgaacccaagatgttcagtatcacatacataggaaaccacacgtggtacaccaacgcagaaactcccaagagcaagacttgtgaccatcatgatgagatcttcatggattccgaagatcacaagagtcctagtttatctacctaaatgaaggaagaagacactcctcatcgtcatcatggatcgtccacggagaataacttgtcattg

SEQ ID NO: 132444 - DNA, 242 bp, Arabidopsis thaliana
aaacaacacagagggagacaacacgagattttacgattactcaccaactctacattcataacactttcaccccaaagggcctacatggtcagctctgggaatgaaactggcgcatggaccaaggccatcacaacggccttgatctcacttcgtgaacatcataccttcactttccgatgttaacactcgcatcaatcaatccgtatctagatgtacaacatcataccgtaacagctctgtca

SEQ ID NO: 132445 - DNA, 320 bp, Arabidopsis thaliana
caaggattcacagagaccacagaatcgatgtgttcatgtaacatgaacttgagggcagtctcactggctgccacatttgcgctgggtcaccacaagtcaaacattgggtacgttggtgttgcagaaaagacacgtggccgacgcaatgacaaaaactgaggaccattacggggacaagcatcctaatgttgctgtgattttaactcctgtggctctgacgtatggaaatcaatcatatcatgagcactcacgttctatcctaattcacaacggcctctacagatgagcattcgagctcatcacaccacctccactggatt

SEQ ID NO: 132446 - DNA, 370 bp, Arabidopsis thaliana
cacggattcacaaagaccacagaatcgaactgttcatataacatgaccttgagggcagtctcacagactgccacatttgggcagggtcaccacaagtcaaacattgggtactttggcgattacgagaaaagacacgtgtaccgatgcaatgacacgaactgaggaccattacaggaacaggcatcctcttggtgctgtgcattaaactcctgtgtctcagactgtttggaatctttgatttcatcagcactcacgtcctcgcctacacctcaacgccctctgaagatgaacattctggcccatcactccaactccactgtcttcctttcggactctcaatatgattttcatgtaataatatctttcacaa

SEQ ID NO: 132447 - DNA, 233 bp, Arabidopsis thaliana
ggactgctgcagaagaacaccatggaggtaaagctgcacacgatcgacatggggggatcaacaatgaacagcacagcggcttatgatcatagcggagagagtctcttcgcacttcatctcccgattttgtacgcacagtcccaatgctcagcatgaatcgtccgcccaccgcacatccaacttcctcgaactcatccatctagaataccacgtattatcacagagctcatggg

SEQ ID NO: 132448 - DNA, 364 bp, Arabidopsis thaliana
ggagtgcgacaaaggaaagcaatggaggagatgatgaacacgatggacatggagggatcaacaatgaacggcacggcggcggaagatctagcggagagactctcttctctctacaatctctattttctacgcgccgtccagttctccgctgcatcgtccgacgaaagcacatccatcctcatcgaactcctccgtcgagatcacgccgtttttctacagagatcaggatcggtgctactggtgtatgagattgcttgcatttgatgctacgaaacatgactacgaggttcattggcatttgaatcgcctgcggaacagatgtaatccgacttcagcagagattatatcgaggtctgtatctgtg

SEQ ID NO: 132449 - DNA, 362 bp, Arabidopsis thaliana
gggacaccccaaatcgaatctgcttctaaccagctccaacctctcaccacgctagacgaacattacattccccaaagttctagataatgtgcgttactttcactgctaacgatcacgttggcttatgttcagctcagttgtatcgtgaaaaacatcgtttgcatgaggctgctagtatccaatgttccgaccatgcttagcattaatgccgttgtctccaatgatgaatatatttgtgcagtaatcagtacgctttatgattatgaagtgggacacaggacatctaggtctcacactcatcatcaatctcgagcctatgcataatcaacaatatatcagtcatacacataaccttacaggtg

SEQ ID NO: 132450 - DNA, 309 bp, Arabidopsis thaliana
gtgacacccgaagtcgcatctgcgactaaacagcttcaacttatcaccacgcaagacgaacattccattcccacagagttcagataaagtgcgtgaaattacacggtaaacttcacgttgccttgggttcagcatcagttttatcgtgtgaagcatcgtttgcctgaggcagatattacccaatatcacgcccatgctcatgcattattctgttgtctacaatgatgagaatattgttgcagtaatccgtacgctggataagggtgatgtgggatacaggaattctaggtctcacacggttcatcattc

SEQ ID NO: 132451 - DNA, 328 bp, Arabidopsis thaliana
aacaggcgtcagtacagcagagaagggtacagatgcaaaaagactcaatcagggcacagcagcaaggaattaaacatgatgcgtagaacacatgtcaacatcaatatttgcatcagcttatggtagccgtaatcggatgcatcactgaccgttagcatccgtcactcgcaaacccgcaggctacactgcaggtcatcaatgtcggtctactcggcaccatagtttcacacaacgagctcgtcatctccttcagcactgaccacactcgtatcaaaattatcaacaccgacatcacctccgcaatgcactccaacatgaacttgacgga

SEQ ID NO: 132452 - DNA, 302 bp, Arabidopsis thaliana
tacagctgcgaaaagactacatcagggtacggctgcgaggaatacgacataatgcggagaacacatgtcaacaacaatattttgatcatcttgtgatagacataacggcatgctatcactgatgctatcatccgtgacactcaaaccacctggtttcacggtggtcaacactgcggctacaggactaccgtcgctcacaagagctcgtccctccttcaacactgtccccagtcgcatcaaaattatcaacaccgacaaccccttcccaaattaacgccaacatgaacttgacggacggcgtc

SEQ ID NO: 132453 - DNA, 1018 bp, Arabidopsis thaliana
  unsure (1)..(1018): unsure at all n locations
aatacgactcattanagggaagacggtacgcctgcaggtaccggtccggaattccgtacgaccagcgtaagctggctgcgagaagagacagaagggggaggacctactgctgaatcacgtggatccttaaatctgaatatccaatactggacaagtcgaggttgggcatttgttgatgtcaattatggtggaagcacaggttatggtcgagagtatcgagagcggttgttaaggcagtggggaatagtcgacgttgatgactgttgtggctgtgctaaatacttggtatcttctggcaaggcagatgttaagcagctctgtatatctggcggttctgcaggaggttacacaactcttgcatcattggcgttcagggatgttttcaaagctggagcgtccttatacggagtggctgatttaaaaatgttgaaagaagaaggtcataaatttgaatcccgttatatcgacaatcttgttggagatgaaaaagatttctatgagagatcaccaatcaatttcgtcgataagttctcttgtcccatcatccttttccaaggactagaagacaaggttgtaactccagatcaatcacgtaaaatctatgaagcattaaagaaaaaaggtctgcctgttgctcttgtcgagtacgaaggagaacaacacggttttcgcaaggcggaaaacatcaaatacacacttgagcaacagatggtgttctttgcccgagtggttggagggttcaaagttgctgatgacatcactcctttgaaaattgacaacttcgacacttagaaaacgatgcttaaatagatatgtttggaaaagatttgctttttttttattatttagagaaaatacatgcttggactaacgttttcggataatttgttcatcaaaagtccaaaaccttctatattcactagaaaaaaaaaaaaaaaaaaaaagggcgccgactctagaggatccaaggttacgtacgcgtgcatgcgacgtcatagatcttctataggtcgtctaa

SEQ ID NO: 132454 - DNA, 959 bp, Arabidopsis thaliana
  unsure (1)..(959): unsure at all n locations
nnnnnnnnnnnnnnnnnnnnnnnnnnnnnnnnnnnnnnnnnnnnnnnnnnnnnnnnnnnnnnnnnnnnnccacgcgtccgtacggtgcgagaagacgacagaagggggatttaagtcgacgggtatgacgtcagcccagaagtctcagtcgtcgccgcttcttcaaacgagaaaagatcctccgtcttcctaaccaccgaatggatcaaaaccaacacagctccggtcacaagcgctccaacaatattaaacgtcgcgttggtcaacaggagtaaaacgacggttaacaccgataaaacaatcaagaccgtccgatcatcgatctgaaaccggaacagcttgataggctcatcacggagaaaatacagaaagatccaaacaacgaccaagacggtgaagacgatgagcgatgtcggatgccagatcaagctgaagaagataacgatcaagacaacgattgcgtagttcatacggaagtaagcaagattggtcttgattcttgtgaacgcatcggagacaccgtgaggcagtcccatggagtggaaatcgaacatcactctccaagcacggcgcgtggctagcccggctttgatacggtgtttagcgcgtgagagagactcgacatccaccaacggagatgcatgagacgacgtcggaatcgcaccgtagttcgtcattagtaatatcgggttatggtttagcgcgtgtgagattgaatagagaaagtaaatgaaaagactgtttgttatgtgtatatatgaattctgaaaggtcccaagaattaggtgatacacatttgcatatggcgttttctaaactaatctatgtttatgaaataaaacaaaatttaatttaaaaaaaaaaaaaaaaaaaaaaaacnnnagcggccgctctagaggatccaagcttacgtacgcgtgcatgcgacgtcatagatcttcntatagtgcgtcctaaat

SEQ ID NO: 132455 - DNA, 537 bp, Arabidopsis thaliana
  unsure (1)..(537): unsure at all n locations
gggggngtttttaaatttttacaaatttggatttgttcaaccttcaggcagggctcaaaactcggaaaacaaaagggagagagaaagtctcaaaccaaactcacaccaataaaaattgattacgcataattaaaaaaacaagataatatacaaaaatagaaaagatacacaaatttcgagatgaaacgatttaagtcgacgggtatgacgtcagcccagaagtctcagtcgtcgccgcttcttcatccaagaaaagatcctccgtcttcctaaccaccgaatggatcaaaaccaacacagctccggtcgcaagcgctccaacaatattaaacgtcgcgttggtcaacaggagtaaaacgacggttaacaccgataaaacaatcaagaccgtccgatcatcgatctgaaaccggaacagcttgataggctcatcacggagaaaatacagaaagatccaaacaacgaccaagacggtgaagacgatgagcgatgtcggatgccagatcaagctgaagaagataacgatcaagacaacga

SEQ ID NO: 132456 - DNA, 379 bp, Arabidopsis thaliana
ccggtacgacaacacaacggtacgggagcgaaaagtcaactgttaggttgtgctcccatccaactccactctcgcattgatcccatacttccatcttcgggtacatcatgtacatatgacgacataatggaaattatgtcccttttaggtttaacatcattcatgcatttccattcatcttaaaaattatcctacataaaatttcgagtagggttagcatcgaggggagaaacgtggaccaacatgatacaccctccaaagtattcaccatattgaaacattgacatgtatccctttttcttttctgtgtatacttaattttactgtaggtcacatcatttaatacttgtatacaggcaactaccttacattgaccaat

SEQ ID NO: 132457 - DNA, 264 bp, Arabidopsis thaliana
cgagatgcggggaaagagagacagggataatggcgttcagtgcgtgtttcctacactagaccgcattggcttcatcagccggacgatcatcaccttcctcctcatcccagcgtcacatgtcgctctccagacctgttcagatcatctgtaaggctcaagatctctcatgaagactataactccgcctgtctcacgccgtcatgctctcactctcctcgtcggcgccgctgctgttggttccaaagtgtctcctgctgatgccgg

SEQ ID NO: 132458 - DNA, 364 bp, Arabidopsis thaliana
gactccagctctgctcaaagaattgggtatagcagaaggttacactccggcaaagttcaaagagatgccttactgggtaaacaagctgtcgatgggattacattgcgttgatgctttcattcgataaactcagcagcggtcgtagcattctgagagttggctctgtcagactctcaatgattcatccaacatcatcaaccacacgagcacctaaacagtcactctcaatacgtcttagtctccctctgcagaaatctatgaagcgagctcactttatactcgagatcaacctctacttaccatgtcactcctccatgtaaaaataatgtgttcgcttgctcaaccttctacaattcacaattcc

SEQ ID NO: 132459 - DNA, 362 bp, Arabidopsis thaliana
gactccacttctgctcaaagaattgggtatcgcagacgattagactcaggcaaagatccaagaggtgccatactaggtacaccaactggcgatgggattccattccgttggtgctttcatcgataaactcagcagcggtcgtggcatactgagatttggatctgtcacactctcaagacctcgtccacatcatcaactcacagctcctaaacgacacctacatacgccttgtctccctcgcagaattctgtgaaaccggtcactatatacccgaactccaccttcaccacgatgtcactgctccagttaaaatcaatgttttcgctaactaaaccttcaacgattcacaactcctactgcat

SEQ ID NO: 132460 - DNA, 1130 bp, Arabidopsis thaliana
  unsure (1)..(1130): unsure at all n locations
ccnnnnnnnnnnnnnnnnnnnnnnnnnnnnnnnnnnnnnnnnnnnnnnnnnnnnnnnnnnnnnnnnnnnnnnccacgcgtccgtacggctgcgagaagacacagaagggagcgagactcatttgttgaagctctcaaatccgccttcttatcgatgtttcttctatatacattcggttgcctagaatctctctcatttgcccacttatctgcgccgccgacctacagaatctcggagaaaccttaccggcggggcgggaaccatgcgtcttcactcagcaattactcttcgaaatctgttcaccagaaagtctctccgaatcccacagaatctaagcattaccgcttccccgttattgattggagatgtctccggtcaaatcaaaccttcatcaacgtctcactattcgaaatctagtctctcagaagcgtcatcatcatcatctagctcactaattttccagatcccaaacaacgcttcattcttcctggaaaatcagaggagatacagcaccggctccagcagcggttcaccgccagatgtaaaccaaggttagtggccgggatttaatctcaagttcgctgaagctcgtgaagagatcgaaatggctatggatgcgaaggagacggtttacttcaacgaagaagcggagtgcgcgagagacgccgtggcagaggttttggagatgtttcaaggtttgctcgggaaagtaacagagaaggagaaagcttctctgcgacgatccatgggactcaagatcgaacagctaaaagctgagcttgaacagctgaacgaatgatcgattgctgattttgattccgtggagaaacgaagaggttagcagaaattttcctcttcttcaccgagccattgttgttagctgattatcatctgtgtgtgccttaataaatctactccatttaggtcaaattcagagcatttgcaatgcttgtgagttgtgactgtactcttttgattacaggaaaagaaaacttgaaacagtttattataagtttctattgcagtgagcttcgttgagtgtgttgatctttgaaaaaaaaaaaaaaagggcggccgctctagaggatccaagcttacgtacgcgtgcatgcgacgtcatagatggtcta

SEQ ID NO: 132461 - DNA, 364 bp, Arabidopsis thaliana
tggaggcgttcttgatcatactctcagtcacccagcttatttacatcgcagcagttcatggcgtgaggagaccttaaggaatcattcatgggcgtcggatttcttttcttcctagtgtggcaatcatccgaaactcgggattgtgtgtgtgagcgtttgtatttgtgtgagtgtgctttattttcttcataggaagcttaagataaattcatgcattctttatgtacaaaaggattagatcttgttttgtgtgttgtcactttgtgttcatggaataaaatcgaactttgaggcaaaaaatcaaaagatacaatcctatttacaccaacaacaagtagaaaaaagctggcgctctaaaggatcc

SEQ ID NO: 132462 - DNA, 778 bp, Arabidopsis thaliana
  unsure (1)..(778): unsure at all n locations
agggaaggttggtccccttgcaggtcccggtccgaatttcccggttcaacccaggggtccggagaacaacaaaggggagaccgtaattcacgataactatgagctcaaggccagagaggcttctgcacttaagaagatcgaagagttatctaagttgctagaagaagcttcttccacacatgagaaaggggaagagattactaataccaatccttttgataacagtaccggagaacaaaaagtacaagaaagtcctttggaagctattgatagacatttgaaagatgacacaacaattcattggtcagctcacaacgttcaagtaataggaaaaggagagaaaggtaaagataaagacaccgtggaaagcgaagtgtatcatttagaaaagagagaagcttcttcagagagagacacagagcatgactttgctgaagaagaagtcgactccaaagcagaaggtagtgagaactttgatcagttaagtaatggtttgtctttagcagaacaaacagaagatgtggtctcaaaggcccagcaccagacaaagaagaagcctttgcttcggaagtttgcaaatttactgaaaaagaagagcagtagccagaaatagaggtagatgtgatgttttactacaatctctgtcgcaactgaccattccaaattcaatgaaaggtctttgatctcaaaaaaaaaaaaaaaaaaaaaacaaagggcggccgctctagaggatccaagcttacgtacgcgtgcatgtgacgtcatnnnnnnnnnnnnn

SEQ ID NO: 132463 - DNA, 394 bp, Arabidopsis thaliana
ggtgtatacaagaagatatgcaaacgagaccctcgatgagcaaagttgttcaaatgcttgaaggtgtttttccggtggtccagccacctagttcttccactatgggatcgagactttactcaagcttctttaagtccatcagcgaggacggcggtgctactacgtcatctggaccgtccgattgtaacagtgagaattatctctccgccgtgagactctccggtccgagatagcaatctttttagccaatttttagtatcttatataataggtttttggctcaccatgttttgttgtatattgtttttgtgttacatcttaaaagaatagccatcactcagttttgtaacgttccgagatcaattatttcatagattacccgtctgtttttctt

SEQ ID NO: 132464 - DNA, 336 bp, Arabidopsis thaliana
tggcaacacgacaacgagatacgggtgcggctgcaagacaacgagatacgggtacggctgcaagacaacaagataagggtacggcaagacggcattgcgtttacgatgagagaacgagacagaaagattcagttgcaaaaaatcgccagcatgattcggtgtcgatcagtcaacctgatggcacagctgagtgcatacttcagaaaggtacttctagcaacatgacgatattccggataccgatggccgacttcgtcacttcagtctcggtccaaggatatcacagccaggtacagctccaacaacacgaacaaaagctaccgctactctcatacc

SEQ ID NO: 132465 - DNA, 755 bp, Arabidopsis thaliana
  unsure (1)..(755): unsure at all n locations
nnnnnnnnnnnnnnnnnnnnnnnnnnnnnnnnnnnnnnnnnnnnnnnnnnnnnnnnnnnnnnnnnnnnnnccacgcgtccgtacggctgcgagaagacgacagaagggatggttctttttaaaatcaaggaatctagtttttggaatatttttaacaatttttattgacaatttaaattctaatctatttgaaaactcacaaccattctgaaattaagagcaagacggctattttagatcatcaaacaatcaaatctgttctccgtgttgattggaggcgtacgacagacgctcctcttctctgtcgttactctggctttgttctcttgcataggtggttttgaccgttgagaagatgaagaagatttgttgggcttctcagttaagttgacattgggcttgttaggtgagtggcccaatatcccttttcctttgtttactgcagcgacgtcgttctgactcgttgacccttcatctgcatttgagtttttctccgatcttgtgtcagattctggagctgatgacggagccgtggagctcttgctaatacattcatggctaggcacagtttactgagtccgccttatgacagtcctctttcattgtacatattctctttttgatgataaataaatttaacattttgttgtgttcnaaaaaaaaaaaaaaagaaaaaaacnaaagcggacgctctagaggatccaagcttacgtacgcgtgcaggcgacgtcataatcttctatagtgcgtcctaa

SEQ ID NO: 132466 - DNA, 481 bp, Arabidopsis thaliana
  unsure (1)..(481): unsure at all n locations
ttgttcatgaccttgttatgtatgttatgagcaggcagtagcatacttgtgtgtggcgggggttgcaaccgcggcgcagtctgcggcctttgcaaagttgggtgagccagagcttcaatggatgaagatttgtaatatgtatgggaagttctgtaaccaagtgggtgaaggaattgcgagcgctttgtttgcttgcattggaatggttttgatctcttgcatttcggctttcggtgtctttcgtttgtacggcggaagcaaatctaggccaagctcacggtggtgaaggcctgtagtggtcttggaccaaccttgtttgtggaacctctattaaatgttgtggtgtgtgtcctcttatctctcagtgtgtatcccgctattacttactgtcatgatctcagctgatctataaacataatcatggcaattatggttgtttgatgaggataaaaattagttttttnnnnnnnnnnnnnnnnnn

SEQ ID NO: 132467 - DNA, 514 bp, Arabidopsis thaliana
  unsure (1)..(514): unsure at all n locations
nnnnnnnnnnnnnnnnnnnnnnnnnnnnnnnnnnnnnnnnnnnnnnnnnnnnnnnnnnnnnnnnnnnccacgcgtccgtacggctgcgagaagacgacagaagggggataataccatgaaattagggtttacgaagcttttaatcgtctctccttcccaatttcttccagaatggccgacgaagaagattctctctctcaattcgatatatccaaagaggaaacggattagttagtttcagaggtgattagattcatactgttcaagtttcaccaaagctcaggaactccaattaaaagagaagatttgactcagattgttactaagaactatcgtcaacgaaatctcgctacacacgtgattaacgaagcgaagaagaagctctctaatgtctttgggtatgatttgaaagaacttcaacgtgctcgttcttcttctactggtcaatctaggcttcctcagtcacagagttctgttgactcgaaatcgtatgtgcttgttagtgaattgccgt

SEQ ID NO: 132468 - DNA, 545 bp, Arabidopsis thaliana
  unsure (1)..(545): unsure at all n locations
nnnnnnnnnnnnnnnnnnnnnnnnnnnnnnnnnnnnnnnnnnnnnnnnnnnnnnnnnnnnnnnnnnccacgcgtacgcccacgcgtncgcccacgcgtncgcccacgcgttcgcccacgcgtncgtacggctgcgagaagacgacagaaggggagctagaacatgattacgccgatttttacaaaagttgtgtacaaaagagagcgtggcatatccgtccgctatcggtttacaacaggggatttgaggagaaggctgagagaggaaagaaagcgaacattgatgaggctgaatgcctcaaatggcttgactccaagaaaccaaattcagtcatttatgtttcctttgggagcgtggctttcttcaagaatgaacagttattcgagatcgctgcagggttagaagcttccggtacaagtttcatttgggttgttaggaaaaccaaagatgatagagaagaatggttaccagaagggttcgaagagagggtgaaagggaaaggtatgataataagaggatgggcacacaggtgctgatacttgacc

SEQ ID NO: 132469 - DNA, 284 bp, Arabidopsis thaliana
ggtattttgataaactggcaagttccagggccacaaattgaggctgtgaccaatgacaacttgattatcaatgtatacaacaccttggacgagcctttccgcttatcttggaatggagtgctgcagaggagaaactcgtggcaggatggagtgtatggtaccaattgtccaattctaccagggcataacttcacttatgttcttcaagtgaaggatcagatacgtagctacttctactacccttcgcttgcgtttcacaaggcagcaggacgttatggtggatt

SEQ ID NO: 132470 - DNA, 196 bp, Arabidopsis thaliana
gctccttcttgttcttcatcatcttcttcgctcactcctagtttcccacgtattcacttgtcaggagcaaaacccatttctctttcttgcagaggaacacgattgtgctccttgaaagggtctaagactctttggggtacaaaaagttttgtgcttggggctgggaacatgaccatggcagaggttgattctcatg

SEQ ID NO: 132471 - DNA, 904 bp, Arabidopsis thaliana
ttaggtccactatagaagagctatgacgtcgcatgcacgcgtacgtaagctcggaattcggctcgagaccaactccttggtaaaaggaagatacaggatctggtttcgcaggtggatgtacatgcgaaactggatcctgatgttgaagacctccttttggaggtggcagatgacttcattgattcggtcacatcttttgcatgtagcttggctaagcatcgtaaatcatctgtattggagcccaaggatatattactccacctagagaaaaacttgcacttgacaattcctggattctcaagtgaggataaacgtcaaacaaaaactgtaccaactgatctccacaagaagcgacttgcaatggtgcgtgcattactagaatcctcaaaaccagagacgaatgcaagcaattccaaggaaactatgagacaagcgatggtgaacccaaatggtccgaatcatctcttaagaccctcccaaaggtcagaacaattggtttcgcagacatccggtcctcacatattacaacacatgacaccgatcctaaaggaccttgaataatagcaaccctgagccagctcctcactgcctatgttcatccttctgggttgcaggagtttacacatctatggagagttgaaggcacaagtagtgaaactgtatgtattatatataaaattcatgagtcttataggcaatcaaataatacagttatttttttcgtagttgtgggactttctaactatttcgtcttcttttttagtgggtttttgttttttccttttgtaattttagttgtcctctccattttaagcttaaaaattttgcggccgcgaattcgatatcaagcttatcgataccgtcgacctcgagggggggctccggtacacaattcgcccgtagt

SEQ ID NO: 132472 - DNA, 701 bp, Arabidopsis thaliana
  unsure (1)..(701): unsure at all n locations
ttaggtacaactatagaagatctatgacgtcgcctgcacgcgtacgtaagctcggaattcggctcgaggaagaaagtttcaagaactcacctaaaacacaaacaaaggaactccactttttttccacaccacatcacaccatgtttagagccatgagcacaaggaaaatccatggtggctacgaaaagctcggcgatgaagaagcgagactgaagagggtctctagcgttccggctagtgtttatggtcattcaagaaacccggttcaagaagtgaagaagacaccgacagcgaaaccaaccggtggttctgttcatcctttgtttagtttctttgacgttcattttcaaagaaagaagaagaatacggcgaagaagaagagtttagcaacggcgaaaccagagtttgctaggtatatggagtatgtgagagaaggaggtgtgtgggatccgagttctaacgcaccagtgattcattacagatagattcgtcaaggaaaatgaataaaagatttgtatatcgtcttttttttccaagatatataatctatgagaaagccccccccaaagaaaaaaaaaaaaaaaaaaanaaaggnnnnnnnnnnnnnnnnnnnnnnnnnnnnnnnnnnnnnnnnnnnnnnnnnnnnnnnnnnnnnnnnnnnnnnnnnnnnnnnnnnnnnnnnnnnnnnnnnnnnatatcat

SEQ ID NO: 132473 - DNA, 446 bp, Arabidopsis thaliana
  unsure (1)..(446): unsure at all n locations
cactagtgttcgtnatctttnttcgattgaagtttgggaagtggtgatggtaataggagcagcagcgcgtgtagccatcggcggttgtcgaaagctcatctcgtcacatacctccctcctcctcgtctcttctcagtgtcgccagatgagtatggacgcacaaagcgtttctgaaaagcttaggagttctggtctattacgaactcaaggtctaattggaggcaagtggcttgactcgtatgacaataagacaatcaaggttaacaatccagcaaccggtgaaattatagctgatgttgcatgtatgggaacaaaagcagacaaagtgatgctattgcttcttccttatgaaagcatttacttcttttgagcaagattaactactgnagtggggngaaaagttttacgggtgatgggnattnncctncttcttttacacaaggaaa

SEQ ID NO: 132474 - DNA, 784 bp, Arabidopsis thaliana
  unsure (1)..(784): unsure at all n locations
cgagcaacgaagaagaagacctaaaagatcgggacttgaaactatgatcaaatcagaagcagatctctccgatgtgatcgtgattcgtgacgtttgggcttataatctcgagtcagagtttgacctaatcagaggaatcgtcgaagattacccattcatctcaatggatacagaatttcccggcgtgatttacaaggcggatctcgacgttctccgccgtggaaaccctaattatctctacaatcttctcaaatccaacgttgacgctttaagtttgatccaagtcggtcttactctctccgacgccgacggaaacctcccagatctcggcggtcaaaaaaaccgtcgatacatctgggaattcaatttccgtgacttcgacgtggagcgtgatccacacgctcctgattcgatcgagctactccgtcgtcacgggatcgatttcgagcggaaccgtcgcgaaggtgttgaatcggagaggttcgcggantgatgatgtcatcggggttgatctgtaacgagtctgtnagctgggtgacgtttcacagcgcgtatgattttggttaccttgtgaagattctcacgngccggcancttcccggtggccgttgcggtgagtttttaaggggttncttaagaggntttctttcggtgaanaggggtttantaaatgtgaaaaannatttntnagggttttttgaggcnaaagggttttattgggggggttttnnccccggnttcccngggcccttnaaaattaaacccngggggttggggnaattct

SEQ ID NO: 132475 - DNA, 457 bp, Arabidopsis thaliana
aggtgcactatagaagagctatgacgtcgcatgcacgcgtacgtaagctcggaattcggctcgaggggataaatcgcgcgacgactctttcttctctcacatgtcatactaatacctaagtcgtcgtctctggcagagaaaattcggattcgattgagagatggagaactctgtggatctagtaccggcgatggttgtatttctcgccgcagtccacgttatcgccttggtttactggatttatagattggcctctgatcgtccacctcagaggaaaaaaattcagtgaggtaactacgattcatcgattggtggattacgattccgatctgatgttgcgtttatcggcgtttttgtgattgttaagtttgatgaatttgtccttaagtaactttttggaattgaacttggtagtttcttgtgtttatgggaagtgatagattttgttacattttcc

SEQ ID NO: 132476 - DNA, 438 bp, Arabidopsis thaliana
aggtgcactatagaagagctatgacgtcgcatgcacgcgtacgtaagctcggaattcggctcgaggaaagaattaagggtcgagcggacttggagaagagaagagaagatggttggcgcgaatctgaaagcggagacgatggctctaatggacaagagaacagccatggagacggagatgaactctattgtcgaacgtctctgcaatcccggtggtcctggtctctccggcaatctcatcgactcggagggatttcctcgggaagatattgacattcccatggtgagaactgagcgccgtcgtcttgctggggatttctcttttcttgggctgaattagcccatagggtagggtgagactacaactccaagagttaagggagtgagcacggggagataacggtaaagataaatgtgaacattcaaattcttcattcag

SEQ ID NO: 132477 - DNA, 400 bp, Arabidopsis thaliana
aaggttgagaagaaatcaacagagacacaagcaaagaatcaacgattgtaaacattaaaattccaagatgaggcgactccgttactcatcactacttggttttctgtatgtacaacagagataataatcatagctatggactatggttcaagcttcatctgaagcgttggctcagaacagttgttgttgttgttgttgctctgttgctggaggatatctccaaaacccatctgaacaatgctttgcaggtcattattttcccagaatcctggtgtctcagtgtgaacaaatccatcgtttgaggggaattgtgtgtctgagaatcttggcatgttcttgccaagtgaatagtatgctgatgggagtcgttaacgcagtctctttacgcaatggcttgctc

SEQ ID NO: 132478 - DNA, 391 bp, Arabidopsis thaliana
  unsure (1)..(391): unsure at all n locations
tcgcgatctagaactagttagtcattttttttttattaagaatcccaaatgggcttatggaagatgggccaaacgacaaatacacggttacagaatgaaagaagcccaaaacaaacccagcgaaaacaagatcagaaccgtgcggtacaccggaaacacgaacatcgccttctagaaccgacgctagcaaggacgactcctatgtggctacgacctcgacatcaaacttttggcttgagctagcgaaccccgccgcaaatcaacgccaagaacaagcctaacctggaacaatcctttcggaaaagggagaaccgccacaaccgagacccaatccctcctctcccaacctagcaanacgaaggattcgaaacttacccccatctccactgat

SEQ ID NO: 132479 - DNA, 544 bp, Arabidopsis thaliana
cgcatgcacgcgtacgtaagcttggatcctttagagcggccgctttcttttttttttttttttttttttttttttttaaaggaaaaaattctcatttcaaatcaagagaattgcaaagggaacaaacaattagaatttaatttggaagtttgaatgtaaagttacaagtacatatcaagattggttccttagtaaacaatgatcataacaaataactacgctcatttgccagggagccaaatactgcatcagcttcagaattttcttagctcttccaaggtcaagtttctggacttgacgcatcaagaatgggttgtgaaaacgattcctcgtagcttaggtagacacatagtcatggcttcaacgtatcacagctagtttcattaacttctgcagactcatccagtttgttaatgggctgggaaaacgattgcaggagagttttttgtgcaggtaactcggcaatgaaaagcaatgtttgagcccaaccagcatattcaccatttttactcacaaaggcttctgcaactcggccatggagttt

SEQ ID NO: 132480 - DNA, 866 bp, Arabidopsis thaliana
  unsure (1)..(866): unsure at all n locations
nnnnnnnnnnnnnnnnnnnnnnnnnnnnnnnnnnnnnnnnnnnnnnnnnnnnnnnnnnnnnnnnnnnnnncttttttttttttttttttgtcaattattttttttttgtcacaagtgtcttattaatgttacaaagccaagtgaacagacccaattatacatagccaaagaaacaagcctacagtttaaaaaacaaacataacccataaaacaacaaaagcccaaagcccaaataaattcctttgccagaaggaaaagtgacgtgaacagcgcaaagagcacgtggcaagtcgaaaagagatggaagacacgtgggaagttgaagaggagagaatttccgatcaccggaaagtagaggtgacaccggaatcttcattccaagcagaaaatgtccagaatcttattcatcttcttcgcccgaagaattagaggcgaaattccaattgagtgttgatgaaattatgactccacttgatgaaaatctgaaaccttcttcatcttcttcttcaaaacttttcaatcggaaaggaaaatttatttttttagaacttgcttacatcaacccaaaaccggacaaaagccgggacataagccatccgaatctctcgaagacgaatcgatggagacgaagccagccaccgttgcggaagaagccaatcgatgctggaagtttgccggccaacggtgcataacagagccaccgatgccagaagaaaagttttgactgcttaataagccagtgaaacgccccatgaaattgcaacagaagtttttataaaaactcttgccgacgcaatcatatcgaaaacttttctttctctatgtattataaaggagagagaagagagagagaaaagttctcagtc

SEQ ID NO: 132481 - DNA, 477 bp, Arabidopsis thaliana
gatgcttggatcctctagagcggttgccccaggcgggcgaaccttttttttttttcgagcacaaacccatcaaagatggtgcgacaagagtaaatgaagagatatatattctacatgggctcgcatcgttgttacatttcatcacccaaaacttgaagagaaaaaaagacagcgaataagcaacagtgatcgaatgttgggactgtcaattaaggagagcagcaacctcttttgccagctccagatgtgtcttcaacgttaatcgttgttccttgccccggaatggcagaattagcagccgctgcttcttgagcagccaaagctgtttttgctgatgatgtggtaaatctctgctaacacggattgaaatgctgtctccacattggtggcttcaagagctgatgtctccaagaaagagagaccttctgtctcagctagagtctgtccatcttcctccgcaactgatctcaagtggga

SEQ ID NO: 132482 - DNA, 563 bp, Arabidopsis thaliana
  unsure (1)..(563): unsure at all n locations
taggtcnnnnnnnnnnnnnnnnnnnnnnnnnnnnnnnnnnnnnnnnnnnnnnnnnnnnnnatactattctttctttttttttttctttagaagttcaaaactttataatgcctatatgaggaagggaagaaaaatcgtgaagaatgttcatataccaattcactcatgagaaagagaagaacagtctccaaaatatattcagagaatccaagaactgttatcatctttcacctttgattcctctgaccatatctgcttcaccttctcccacaccaaatctcctccctttgaagtaaattcgacagtcgttttgcagcattggctttcatcctcgcattgctcccacttatcaaacttcactatccatttgccaggaatggtgtctgttaccagaacctgatctacccaaacccaaaacttcttccctcttttgtcaccataacacttcttcagctcatcaatggtgtctctcagagatttttctgcacctgatggatgaaaaaggacagcagcatggaggccatgaatcttttgaagctggtatggatgcncnanagnncttg

SEQ ID NO: 132483 - DNA, 532 bp, Arabidopsis thaliana
  unsure (1)..(532): unsure at all n locations
nnnnnnnnnnnnnnnnnnnnnnnnnnnnnnnnnnnnnnnnnnnnnnnnnnnnnnnnnnnnnnnnnnnnnnnnnnnnnnnnnnnnnnnnnnnnnnnnnnnnccttttttttttttttttttagcgaataatcattcaatactcattaatatttttccttacaaaaacaaaaatcagtaattttccttttactctggtcttgtaaatgttatctaccggtatatttcacttcagtacttttcttttacaaaaattataactatgaccccatcttcctataattgaagtatggaaccctattgtcaataacaacccaaatcatcatcatttgactctgttcttaactctcattctgatgctgcttaagcaaataagcctcatcgtgttcttcagctccaaaacacttcacttcgatctcatcttcctcttcattgagttgttgcatctctgactcgatcaaggcttgcatttttgctctgtctcggtccctcgggtatgtgcaatataggaacgagtagattgtgcaacagatca

SEQ ID NO: 132484 - DNA, 538 bp, Arabidopsis thaliana
  unsure (1)..(538): unsure at all n locations
aattgtatagttattagcattaaacaaaatgtgattatttatttacatggaaccatacaataaaacattacataagaaaaatatctctctccaacgatatgtatggaagataataaagcaaaacaatctaaaataagaatcaataaacaagtgtaatatgatgaactcgaagaagactataatagcattgactcttgactagcaatcaaaagtcaacgtcacacttggtcggctgaaaaacaaacccgctggttgaattagaggtaagaggaaccttgagatcgcacttgatcttgggcttgaacctccacgacttgatcaacccaaacttaaacctaatccttaagtctcagcttggcatcgatcccataggatctggggtttcacatcctcggtcaaaatccttcctctctccggcggtaagcagcaccaattggggnccncgngttaggtccaacaccggngggtcctatggcccgggaaaactcgggatggtggtacccaaccggacggggtnccgggganccccgctcgttta

SEQ ID NO: 132485 - DNA, 575 bp, Arabidopsis thaliana
  unsure (1)..(575): unsure at all n locations
nnnnnnnnnnnnnnnnnnnnnnnnnnnnnnnnnnnnnnnnnnnnnnnnnnnnnnnnnnnnnnnnnnnnnnnnnnnnnnnnnnnnnnnnnnnngacgtcgaacgcacgcgtacgtaagcttggatcctctagagcggtgaggagattacttttctttctactacaatttcatgcacatacatatgtcacaacgtacaataaaaatagcagaaataattacaaccacactttgaataacgatttcttcattttaacttattcaaacaagatcttttagtttactaggctttggacttaaccagaatcaactactttggggagtccttaaatgcttccgtttagccttcttgggctcaactcctaaccattgttgaatgagctcaaacactctttcatcacggagaagcccccgggggctacccgaaactcctacgctagcaactgctttaaactgagcagctgcagctgattcagcagggacaggtccatctccatctacatatgtatactcaggcatagttgacatatttcagacaaatcgtttatcggagaaggctctgggccataacaaacatc

SEQ ID NO: 132486 - DNA, 543 bp, Arabidopsis thaliana
  unsure (1)..(543): unsure at all n locations
nnnnnnnnnnnnnnnnnnnnnnnnnnnnnnnnnnnnnnnnnnnnnnnnnnnnnnnnnnnnnnnnnnnnnnnnnnnnnnnnnnnnnnnnnnnnnnnnncctttttttttttttttttttttgggtgtaaactcaatgatttgggattctattatccttttgtttaatccaccacctaaaccattgttaggatgagtaatgaagcctcttaattgtctatttcagctacagaacaaatgctatttgtttagttgggttctccatacaaaagttgaaaaccactgttctctactttgcaataatagacttcatcaccgactagctttcacagaagctttcaccatatccagacccccagatgataatccaaggaagtatctgctgctcataccaaacggaaatggcacctctgccttgccatatccttggtgtgacagataagacgacttttgcaccttgcctcataacttgaacagaaacggcttgtccctggttagactgagcttcagcggcagcctttgcacaggttgtcaccaccctccacg

SEQ ID NO: 132487 - DNA, 405 bp, Arabidopsis thaliana
tgcaaaccaaacaggaagaagaaaagaaacacaaaatcaacaacaatggcggtgaacaagaaagtttcatggagatcacgaagcgttggatgtttaggagatccagaggccctaatggcatcttcaaagacacctaacagaagatatgacgtcatcaagaaacagagctcttttcagagactatcgatacttgagatgagcaatccaagttccaacactttgtcagaagatctatcgatttctttggccggatcagatcttcatgtgtttaccctagcggagcttaaagtcattacacaaagcttttcatcgaccaattttctaggtgaaggtgggtttggtcctgttcataagggtttcattgatgataagctacgtcctggtcttaaagctcagcctgttgct

SEQ ID NO: 132488 - DNA, 151 bp, Arabidopsis thaliana
tgttctcgagaagggacctgaagcaggcgactttcctcttctcctcttacggattgtatagattcttctcttcaaatttttggaaaattcaatctatatgttataccaaaatagcttcctttgtgaagtcctattgaatctctcgcctttc

SEQ ID NO: 132489 - DNA, 549 bp, Arabidopsis thaliana
taggtagcactactagaagagctatgacgtcgcatgcacgcgtacgtaagctcggaattcggctcgagtccgaatccaattgcttcaattgatttcagaggaactatagttgggattaaaccggctccggttattgcttctttctccggtagaggaccaaacggtttaagcccggagattcttaaaccggatttgattgctcccggagttaacatcctcgccgcatggacagacgctgttggacctacaggtttgccgtcagatccaaggaaaacggaattcaacattctctccggtacttcaatggcatgtcctcacgttagtggtgcggcggcgcttctcaaatccgctcatccagattggagccctgccgtgatacgatcggcaatgatgacaacgactaacctcgtcgataactctaaccgctcgttgatcgatgaatccaccgggaaatcggccacgccttatgattacgggtcgggtcacttaaatttgggccgggctatgaatccgggtcttgtctacgatataactaatgatgattacatt

SEQ ID NO: 132490 - DNA, 562 bp, Arabidopsis thaliana
  unsure (1)..(562): unsure at all n locations
cttgattcgttcgacttttcccgaattgaaattaaaggtttactacttcgatccggagattgtacggacgctgatctcaacctccgtgagacaagcgctcgagcagccgttgaattacgctagaaattacctagctgaccttctcgagccttgcgtgcgtcgcgtgatctacctagattccgatctaatcgtcgtcgacgacatcgcaaagctctggatgacgaaactgggatcgaaaacgatcggagctcccgagtactgtcacgcgaacttcacaaagtatttcacaccggcgttctggtccgacgagaggttctccggagctttctccgggaggaaaccgtgctacttcaacacgggagtgatggtgatggatctagagagatggaggcgcgtagggtacacggaggtgatagagaaatggatggagattcagaagagtgataggatttacgagctgggatcattgccgccgttcttgttggtgttcgccggagaagtagctccgatagagcatcggtggaccacatgggcttggtgannaacgtaaaagaacttnaaa

SEQ ID NO: 132491 - DNA, 486 bp, Arabidopsis thaliana
  unsure (1)..(486): unsure at all n locations
tcttctttatccctttttgctcttattacaacttttttttttccatgtatttcctcaaattttaatattttnnctttacngtatattcatcaaatctcaagttctctaatttcccattcgacctcgaaatttgaccaatttctcttctctcaaatttcagattctcttcctctgaaaaaaatcaaaaaaccaagtcttctaattccatctcctctctgtacccatctcctaaaaatctcaactttgagtcaaaattttgtcttctctcaaaccaattcatagttctaaaaatctcacctttatctcaaatttttaatctttcatctgatttctgaaacccaaattctctaatctcatctttgagccaaaaagtttcaatctttcctctgatttctgaaaccaaaaatctctaatttcaaaaaaaaaaaatctcacctttgggtcaaaaatgtcagtagcttgtggactagaatgtgtcttctgtgt

SEQ ID NO: 132492 - DNA, 566 bp, Arabidopsis thaliana
  unsure (1)..(566): unsure at all n locations
ggacgtgcctggcccccttccgtaagcttggaatttaggttcgagctttatttggcaactacgcacggatccgccgcccaaagatcgcctgcatgaggcagcactgacagtcagtgttgaatagcagaccagttgacctgtcacgacagtaaacggcgagttgaggactgcatgcttagcgcatccagttgttgtgagtcgaatgcgggggacagcacgacaatatagtttgttgatgcttgttaagtagcattgttcttctggtgttcctacagcacagcatcttgtagcagtgcatccaagtcttatctagccttcgtatttacagctgtaaatagcctgcaggctgtacggtacattcacttcaccaatgcttaaattttaagcccttgttggcccctgttgatacttcattacacaagtgggtttttaaaagccagccagccccttaaaaaatagaattaannnnnnnnnnnnnnnnnnnnnnnnnnnnnnnnnnnnnnnnnnnnnnnnnnnnnnnnnnnnnnnnnnnnnnnnnnnnnnnnnnnnnnnnnnnnnnnnnnnnn

SEQ ID NO: 132493 - DNA, 848 bp, Arabidopsis thaliana
tggccgttcgcagtaccgcaccggaattcccgggtcgacccacgcgtccgagatgttactcaagccattgatgccagtcatctcactgccatcattacaggtggaacaagtgggattggattggaggcagctagagtgttagcaatgagaggagctcatgtcatcattgccgcaagaaacccaaaagctgctaatgagtctaaagagatgattcttcagatgaaccctaatgctcgcgtctactatctccagatcgatgtctcttccatcaaatcagtcagatccttcgttgatcagtttcttgcccttaatgttcctctcaacattctcataaacaatgcaagtgttatgttttgtcctttcaagctcaccgaagatgggattgaatcacaattcgcaacaaaccacattgggcattttctgttgacgaatctgcttctggacaaaatgaaaagtaccgcaagagaaagtggagtccaaggaaggattgtgaatctgtcatctattgctcatacttatacttactctgaaggtatcaaggtccaaggcatcaatgaccctgctggatattcggagagaagggcttatggacagtccagactctcaaacttgttgcactccaatgcactctctcgtagactacaggaagaaagtgtgaaccttcactataaatttcggtgcacccttggtctttggcacccactaattcctttttcgttacttccgggtttaagcaatgacaggctctttaaagggctaattgaccttttccttcttttgggggaaaaaaatattgacccttgaggggaggccagccaacacaaccattgccttcccgtttggccacc

SEQ ID NO: 132494 - DNA, 503 bp, Arabidopsis thaliana
  unsure (1)..(503): unsure at all n locations
agctatgcattatgttccaccgagaatttcaatggctgctgctagagaagaagctgaacaagtcatgtttggtgctttagataaccttttcgctaacactaatgtgaaaccaaaggatattggaatccttgttgtgaattgtagtctctttaatccaactccttcgttatctgcaatgattgtgaacaagtataagcttagaggtaacattagaagctacaatctaggcggtatgggttgcagcgcgggagttatcgctgtggatcttgctaaagacatgttgttggtacataggaacacttatgcgggttgttgtttctacttgagaacattactcagaattggtattttgggtaacaaggaatccgatgttgataccgaactgcttgtttccgagttcggtggctctgcggttttccttttcgaacaagtcggggggccaaaanacgggttnangtacagggntttaccatntnggtnaggncnnccccnngggncgngtt

SEQ ID NO: 132495 - DNA, 489 bp, Arabidopsis thaliana
ctatgacgacgcatgcacgcgtacgtaagctcggaattcgtctcgagcttggctcagacattcctttgtctgatcgtgaacttgtagtagtgttttcgtgatagaaaattttcaaagttaatgtgcatacactagctagtgaagaagaagaagactaactaagaatggaaggaacttgttttctccgtggacaacctctcacaacaataccctctcttcccagcagaaaagggtttcttctccaaagatggaagaccaatcggattgtcaggttttcaggttttaagaatcactcggtttctggaaagtcgaggtctttcgatcttagcctcagagcttcaggtcccattagagcaagctctgttgtaacagaagctagccctaccaacttaaattccaaagatgatgaccttgtctttgtacccggggctactggtaaagtgggctctagaactgggagagacctctggagctgggatttccggttaa

SEQ ID NO: 132496 - DNA, 499 bp, Arabidopsis thaliana
ttttaggtgcactatagaagagctatgacgtcgcatgcacgcgtacgtaagctcggaattcggctcgagcgaggacggagttcatccactggcttcaggacatcccagatcaaaaggctatcgttggccagtactgccgatacacagctgagatcaagaccggagtcaacatcaagcaaatggtcaaccgtgcccttcaattcgcgacgagtgacccggctgggccggtatacttgtgtgcgtgccagggaagtcatggagtccgagatcgaaccatactccttgaatcaagacttgtggtctccagtcgagatgggcggactccctgaccaggcagccagcaagattgccaacgccctggccggtgccgagaaacctctggttgtgacgggatacgcggctaggaaccacgacgcaccgtctgcccttgtcgagctagctgatacggtgaagggcttgaaatcctcgatggtgccggagtgaaatgttttttccaggc

SEQ ID NO: 132497 - DNA, 528 bp, Arabidopsis thaliana
  unsure (1)..(528): unsure at all n locations
tggccccctttcccggatcggttagttttcttatccggaatccgatttgggtgattgttacgcgtatgcagacccccagaaaaatgtcaaaagatcaatcagcggcccccgagtccccttcttctaatgcagaggctctggtcgctgttgacccgcgtccatatgggacctttaatacgattcgagaggtttacgatgaagctggaataactggcttctggaaaggtgtaattccaccattgatcatggtcagtaatccgtcaatgcaatttatgttgtgcgcgccaacgctaaccaaggtgaataaaaagcgtgccttcccgggtggcnnccnnccctccaaaatgaggggtttttcttctcggagctgtggcgaaactcggagctacagtcacaacttaccatatcttggttgtaaagtcgcgacttcaagccaaacaggtcacaaccgcgggcaaaagaaaaaaaaaaaaaaaaaaaagatagcggccgctctaaaggatccaagcttacgcacacgtgcgtgcg

SEQ ID NO: 132498 - DNA, 929 bp, Arabidopsis thaliana
  unsure (1)..(929): unsure at all n locations
aggtgcactatagaagagctatgacgtcgcatgcacgcgtacgtaagctcggaattcggctcgagcaaaagatcaaacggcggcccccgagtcaccttcttctaatgcagaagctctggttgctgttgagccgcgtccatatgggacctttaatacgattcgagaggtttacgatgaagctggaataactggcttctggaaaggtgtaattccaacattgatcatggtaagtaatccgtcaatgcaatttatgttgtacgagacaatgctaaccaagctgaagaaaaagcgtgccttgaagggtagcaacaacgttaccgctttggagacatttcttctcggagctgtggcgaaactcggagctacagtcacaacttaccctctcttggttgtaaagtcgcgacttcaagccaaacaggtcacaacaggggacaaaagacaacaatacaaaggaacattggacgcgattctgaaaatgattcgatatgaagggctttacgggttttataaagggatgagcacaaagattgtgcagagcgttttagctgctgcggttctgttcatgatcaaggaagagcttgtcaagggagctaagctgttgctctcaaacgctacctctagctaagtcaagtccaagccttcttgaatgaacgctagtagttagaaataaataaaaatagattaaatttccaatagttttcttgattaattattacactattgggattgttgttcatttcctgatgattgcaattgattattgtaatttctgcaagattctttagtaatgaaatctgaataaagtttggcaaaaaaaaaaaaaaaaaaggnnnnnnnnnnnnnnnnnnnnnnnnnnnnnnnnnnnnnnnnnnnnnnnnnnnnnnnnnnnnnnnnnnnnnnnnnnnnnnnnnnnnnnnnnnnnntagctg

SEQ ID NO: 132499 - DNA, 699 bp, Arabidopsis thaliana
gaatgttttaggtgcactatagaagagctatgacgtcgcatcgcacgcgtacgtaagctcggaattcgctcgaggtacactcaagaagatccaaatcttcctctttagagctcgaaaccctgctgctgatatacccgagtattttcttggaggaatagaccaagatcagtcaaatgatcatatggaacttccatctcctcttcaatgttctgtgaaagtgaagttcccacaatctgatccattcttggtgaacatgcttgactaccagatcattcctttaggctttcaatacataatgatcggttgggatcctgaatcattggcaaatggttacgtaggcgttgcttttcttccggtaaagaagaacggaggagacgaattcgttgtgcttcttcgctaccgtaatcatttgttggtgttgagaagttctgaaatgaggtggatgaaggtcaagaaaacctccattgcttcatgcaagggttttagtcagttttagaggtagattttatgtaacttttcttaacggggacatttacgttttcgatccttattcgttggaacagactctcctgatgccctcagagcctctgcgctcgagcaagtatctgattccaaatggcagtgatgagcttttcctggttgagaagttcaacccatttcctgaagctgatgtattggatttgagtcggttcgcatgta

SEQ ID NO: 132500 - DNA, 576 bp, Arabidopsis thaliana
  unsure (1)..(576): unsure at all n locations
ttccaagtcacgacggtgtaaacgacggccagtgccaagctaccctcactaaaggaaaaaccagcttgcatgcccgcaggtcgactctagaggatcccctcggggaattccaattccacattttcaagaaataaggaggcaaaaatgttcatatatgaattggaattatttgttttcttattaggcctatcctgaagccaaaggaaatgagatcggaattcctcggggaattccaattccacattttcaagaaataaggaggcaaaaatgttcatatatgaattggaattatttgttttcttattaggcctatcctgaagccaaaggaaatgagatcggaattcctcggggaattccaattccacattttcaagaaataaggaggcaaaaatgttcatatatgaattggaattatttgttttcttattaggcctatcctgaagccaaaggaaatgagatcggaattcctcgggggtaccgagctcgaattnnnnnnnnnnnnnnnnnnnnnnnnnnnnnnnnnnnnnnnnnnnnnnnnnnnnnnnnnnnnnnnnnnnnnnnnnnnnnnnnnnnnnn

SEQ ID NO: 132501 - DNA, 673 bp, Arabidopsis thaliana
  unsure (1)..(673): unsure at all n locations
cagcttgccaaagacattgagaaaatgtctgatgaagcagctgcaaattttgccgtcttgcaactccagagaattcttcccgatgcattgcctccggtacagtatctcgtatcgaggtggggatcggatgtgaattcaatgggatcttatagctacgatatcgtgggaaaacctcatgatctctacgagaggcttagggttccagtggataacttattctttgccggtgaagcgacgagctcgagcttcccgggctcggttcacggcgcttattcaactggattgatggcagctgaagattgtaggatgcgagttctggagcggtatggtgagttggatctgttccagcctgtgatgggcgaggaaggacctgcctctgtacctcttcttatatctcgtctctaaactccatcagttatcgtttactagaaggaacctcaagtgatgattgtcttaatatgaaactaaaattattctcgtgtcggatcgtttaaaacattcccagtcttattttctcagtgtttttaattcaataaattggaacattatatccttgtgatattatttatatatgataatcatctttaagaaaaaaaaaaaaaaaagnnnnnnnnnnnnnnnnnnnnnnnnnnnnnnnnnnnnnnnnnnnnnnnnnnnnnnnnnnnnnnnnnnn

SEQ ID NO: 132502 - DNA, 136 bp, Arabidopsis thaliana
agctgatcaagaccgtttcttcaacgccttctcttccgcgtttgtaaaattgtcgtcttacaaagtgttaaccgggactgaagcagtacttagaagcgtgtgtgacaaggttgattgatgtatatttataattatc

SEQ ID NO: 132503 - DNA, 558 bp, Arabidopsis thaliana
  unsure (1)..(558): unsure at all n locations
ttgtnnnnnnnnnnnnnnnnnnnnnnnnnnnnnnnnnnnnnnnnnnnnnnnnnnnnnnnnnnnnnggctcgagctcatcatcttgttataataacgatgatgggaggaatattttcgttattttgttttctttgtatatatatattaattaggttggagaactcattggtggaagccaaagggaagaacgatatgatgttatcaaacagaggatcgaggagatgggtctaccaatggagccatatgagtggtacctagacttgcgtcgttatggaacagtgaagcattgtggatttggacttggcttcgaacgtatgattcagttcgctacaggaattgataacatcagagatgttattcctttccctcgctatcctggaaaagctgatctctgattcctctctagacacacaattctggtctggtctcgacatggttttagtttccttttaaattggttaaatgaaaattgtattgatttttatctatactctgtttctcaagctgtgagagctaatatgaagggaaacaaagttatatgaagggaaacaaagttat

SEQ ID NO: 132504 - DNA, 536 bp, Arabidopsis thaliana
taggtacaactactagaagagttatgacgtcgcacgcacgcgtacgtaagctcggaattcggctcgagtggaggtgaaccggaatgtagtcctgtggtttaccagattcaagataatctcaaacaacctgtcttcagctgcaaattcagctccgatcgtaacggaagatctcggtctctaccatcaggatttacatatagtagtagaggatggattacaagaacattatcaggtgaccagtgggaaaagaaacaagcgagagaacgtaaaggttggatgataacgatccatgatctttcgggatcacctgtagcagcagcttcaatgatcactcctttcgtggcatctccagggtctgatcgtgtttctagatcaaaccctggggcgtggctaatccttaggcctcatgggacttgtgtcagtagttggaaaccggggcgacgtcttgaggcttggggtgagagaggagctattgatggattggggtacaaggtccaactcgggagggataacagtactagcacccggctttccta

SEQ ID NO: 132505 - DNA, 432 bp, Arabidopsis thaliana
ttttttttttagagcacaagtaaaatgcattttatatatatacacagtatcacccacggttaattactgtttagtctatacaaagtattttcaattattgcaagtaaaattaatacattgtttcacaagctatttattatccctcaagtcctcaagagaacgcttccgggatccgagattacgttccagcgtctgaggtgtaggtggtgttcttccacggcggaagagcactgccagagaccttgttttccgacaaagatcaaaaacagaggaggcctcaatctcagcgacaccttcacaccctttccctcccccttgtaataggtcacagtatctaacagcctcattcacatcttcgaaaaccagaactccatctcgaatgtcttctacgagcatatcgaatttaggggtgggtctagcctgctttggcct

SEQ ID NO: 132506 - DNA, 523 bp, Arabidopsis thaliana
  unsure (1)..(523): unsure at all n locations
nnnnnnnnnnnnnnnnnnnnnnnnnnnnnnnnnnnnnnnnnnnnnnnnnnnnnnnnnnnnnnnnnnnnnnnnnnnnnnnnnnnnnnnnnnnnnnnnntttttttttaaaacatttacttgttactaaattttgagatagtatcacatttctagagtgtaagtttgaagataaatttacagaaaaattataagtatcacaagtatacagattgattacttagacagcagctggtgttggtgctgatgctggagttgtcgttgttgaagaaggaactcggttttccggggggatctcagtaaactcggaaagaattgccctgaattcgtcaccgccaatagtttctttctcgagaagcacttcaacgagcttatccatggcttcacgattgttctttatgtggcttagagctatctcatatgcactgtctgatagtttcttcaccgcagaatcaatgtcttctgcaagcttctcagacatggagtttcttgccatcattctcatgatgacatccgtttgggccga

SEQ ID NO: 132507 - DNA, 557 bp, Arabidopsis thaliana
  unsure (1)..(557): unsure at all n locations
nnnnnnnnnnnnnnnnnnnnnnnnnnnnnnnnnnnnnnnnnnnnnnnnnnnnnnnnnnnnnnnnnnnnnnnnnnnnnnnnnnnnnnnnnnnnnnnnnnnnnnnnnnnnnnnnnnnnnnnnnnctgtgttgatttttttttcggcaacttttgggtctctatatatatatataaaagatatggaagttcatgtgaaacaattgagtgttgttatgggacgtagttgtatcgattaaagagataacagagattgttcatctaggaagctgtctcaatggtttgaatgcattcaagaacagatgcatttttggacattgcagccattagagcttcatggatggtcttgttgtttttgagaagagaagcagagtaaagaacagcccatcttgttagattttgctgctgctcgttgctgattttgggttggcttctgtttatgaatctctgaagagagaagagatctgcagattggccaattactttgtcatacttcagaccctcggcgggaagtccagccattgccaacagagccacctatcgagctcctttgagcaagct

SEQ ID NO: 132508 - DNA, 613 bp, Arabidopsis thaliana
  unsure (1)..(613): unsure at all n locations
nnnnnnnnnnnnnnnnnnnnnnnnnnnnnnnnnnnnnnnnnnnnnnnnnnnnnnnnnnnnnnnnnnnnnnnnnnnnnnnnnnnnnnnncttttttttttttttttcatgagacaaccatttttatagacatatttgtctgatgttgataacaagaaagttgagaacaaaacaaatattaagactcagggacaagtattctagtcatcatcatatcacagtgacacaacatacacacttcagaacaaagggtaccattaaagatcacaaaatctaataaaaacagaaccaacagtacgtctcaggtatccaaagcgagattttcagcttgcctctcaagccgaagagccacaacaggaaatgtgttgacgatcattactcgtatttctcttgagaatctccaaatattaagttcgtcttccgcccttcctgtatgtactccgtatttataggcaaacgttacatagcctggctcattggtgaacaaaattgagttcccactcacaccacaaccatcaggaagctccttagctgagcagcagacatttccaaagtgtccaataaacaacacacggtctcccaaatcgatcacctcaaccaattgaccagcctcct

SEQ ID NO: 132509 - DNA, 936 bp, Arabidopsis thaliana
  unsure (1)..(936): unsure at all n locations
tgatatgccnnnnnnnnnnnnnnnnnnnnnnnnnnnnactatagatgagctatgacgacacatgcacgcgtacgtaagcttggatcctctagagcggccgcccttttttttttttttttttttaaaacttcaatctctagttaaaatattaaggccaaacatcaaatgtcatacaaatcatagtttttatacatatgatttcctcgcaaatttatcgatatttccggttcaacatgaaccgttgagtaagcaaaacaaacctagtactcaaacccaagaaagaaaacccctcaacacacccacaaaaagtagtagtaagaaagcaaccaatcttctgaaaaaccggttatagattagacggttgtagtagatttccggacagtgtaacggtaagcagcaactttcttcttgcgagagagagtattgtcaacagagagaatgagcttcccagcttctactgtagtgaaagagttgcaaacagcttcatctgtagctttcatcttcttcggtttctcgacaacgatcgcgtaactctcttcagcgttaggaacaaactctgcactgtactctaaatcccancctccactactataatcaatgttatggttgcttcacctcaatgcctnaatctgaatgtaacttnctcaccaccctgatggaaattcagacgccggttttgcggccgttttgcgatcagtaggccggtagaccaccgatggaccgaatatttctggcaatgaatngaaaggttctgtgattgctttttgactaacaattgtttgtcttgataggatgcctgacttggagaccctgagccaggcgtatgatattatacaccataaggatttctgaaaaaagtctgtaaacatctactttttagtttttaaactgactgaatgataacacccgttaatgactttacctttcaaccgactc

SEQ ID NO: 132510 - DNA, 540 bp, Arabidopsis thaliana
cgattgtattaggacacactatagaagagtcttgacgtcgcctgcacgcgtacgtaagcttggatcctctagagcggccgccctttttttttttttttagagagaaaaaaaaattgaatcaaaaccaaagcgaagcagtcaatggcagcattcagacagacaagaacatggtctctccagtttctatcttaattatacgtttctcaaaaaaaaaaagaccattcctttacgaccttcttgcatccaaggcaacaaacataggcgaagctaagagcttagtaccgtctgaaactgccatcatctcacaaaccctctttacttcgaagcgccctccagaatatgcgtttttgagaataggaagtcatagattggtgctcaatattggcgccttggaggcctagcctcagcttccgagactctaatttgtctaccgtccaaatcagcaccatccaaggacttgatggcattttggacctcttgagaagagtcgtatgtcacaaatccaaaacccttggatcgaccactgtccctgtcgtagat

SEQ ID NO: 132511 - DNA, 514 bp, Arabidopsis thaliana
ttagaagactatgacgtcgcacgcacgcgtacgtaagctcggaattcggctcgagctcgcggacgtcaagaccaaggacgacaaggccgtcacctgcctcacggccaccgtgcagttcagccgcgacggctccgtcaatgttgtggacaacttcaaggccgactacaagcagagcctcaagaccaagtacaaaatcgacatctagattggctggagtagtagcagcagcacgagcggctgaacagttgccgcggatatcgcgaatggagatgttgtcgacggcgtccttttttcacttctctccaaagcatgacctgagcgttatcgtttgagcattttactttcgctgtcgcttacgcagatagaggtggatgtgcagaatgagaggtccgatggctggtagtttacggcgtaatgtctcatgtttccttggccatatatttaaagaattcggggtctttgggtatcctgtctatactggcagcccaaaccttttacttttacaaaaaaaaaa

SEQ ID NO: 132512 - DNA, 720 bp, Arabidopsis thaliana
cccgccttccttaacttggaattcaggttgagggcctggtccaattttggagttagaaggttggccttggtagggattggaagccatgggaggtagtccgatggccctcgcacagggcagccaggacggaccacctggggtggagcgtatcacctcggccaaccgaatcttcaccaccaggctcatatctatggtccaccaactaaacaacgctcattccgatgctagtttcacttacatcaatgcttatggcgcttttcaggatataatcgccaatccctctgcttatgggtttacgaatacgaacactgcgtgttgcggaattggaaggaacggaggtcagctaacatgtttaccgggagaacccccgtgcttgaaccgagatgagtacgtgttttgggatgcatttcatccttcggctgctgcaaacacggccattgcaaaaagatcttacaatgcacaaagatcttccgacgtttatccgattgatatctcgcaattagcacagctttgaaaggacagagaataggagagttttacaacaattgtatgcttttcaggttataaattgaattattggaaatgattctgatgttatgtgtgtacccaaagtgttcgactttataaaaaaaaatagggattgcattaaaaaaaaaaaaaaaaaagggcggccgccgactagtgagctcgtcgacccaggaattaattccggaccggtac

SEQ ID NO: 132513 - DNA, 476 bp, Arabidopsis thaliana
  unsure (1)..(476): unsure at all n locations
tacgtacaaaggaatattatctaaaagacgagagtacaagtgagaaatggcgttaaaggtgatcaagatctcccgagtcagccctgcaaccgcctccgtcgacccgctcattgtcccactctcgttctttgatttacagtggcttaaactcaaccctaccgagcaagtcttcttttacaaactcaccgaatcatcatcatctcgcgacgttttctactcctccatcctccccaagctcgagcgatctctttcactcatcctcactcactttcgcctattcacgggtcaccttaagtgggattcacaagatccaaagcggcatttagttgttctttcaggngncacacttctntttcaaaagtgggctgagacttgatgcggntttttcaangnatctctggnaaaaggntttngtccanaggntagaggttcggcngctaaatacncggggttccggttttttttnnncttggggg

SEQ ID NO: 132514 - DNA, 808 bp, Arabidopsis thaliana
  unsure (1)..(808): unsure at all n locations
aacaagaacacattgagtgttgtttatgagagaggtctcattggtatctatcatgactggtgtgaaggcttttcaacttatccaagaacatacgatttcattcacgctagtggtgtcttcagcttgtatcagcacagctgcaaacttgaggatattcttcttgaaactgatcggattttacgaccggaagggattgtgattttccgggatgaggttgatgttttgaatgatgtgaggaagatcgttgatggaatgagatgggatactaagttaatggatcatgaagacggtcctctcgtgccggagaagattcttgtcgccacgaagcagtattgggtagccggcgacgatggaaacaattctccgtcgtcttctaatagtgaagaagaataaaacaaaaacaaaaaactcctcaggttactaagcttgaagtgtagatctattttacaacataaaattcttatcaaaaaaggaaggaatcagaatttccattaaagaaaggtgtcaaaaaaaagttgtaaaactatatagtagtgatcaagacgaatatgtgcatttatgttttatttttgttccctagtttttaattttatttttttgaaggaagaaaaaattagttccatgtgtttttgcaagatagttgaaaccttggacgcttgttatgtatgatgcgatcttgacattttttaataacagttattttaaataaatttatgatataagcggaaacttctagaaaaannnnnnnnnnnnnnnnnnnnnnnnnnnnnnnnnnnnnnnnnnnnnnnnnnnnnnnnnnnnnccgggg

SEQ ID NO: 132515 - DNA, 636 bp, Arabidopsis thaliana
  unsure (1)..(636): unsure at all n locations
aaaaaaaaaaagggaggccttaatggagcccacctctngctgnagggggataccgcatgcacgcgtgcgtaagctcggaattctgcttgagagaggttaaacagctactgagaaaagccacaacacaagaaatggttggctttgacaattacaaagagaatggtcatccttttcctcactcaatcaggcgttttcatccatcgcatgcctccacgactactttgaatgggcctgttacatcaggagcgggggacacaatggaagctcatcatcataactaccactgagaccacgccctgggctcctcaatagaaaaccatcaatttcaaatgccaacttcaccaaaggttctcatgatcccccgaccccgacaacatctttgtacttcccaaaaaccacaaggaacaagtgaggtcgagctggggcaattccggcaagttttcctctctcagaccgaatgaccaaaggtctcattctctctacactagaaagccgggaaggggggatgatgatccgcgggcaaaaccctagataaatcactctccattatcttgattcggacacacatgggaggtgggcattttataaaactcaaatgcgggctgggagacaaccttaaaagacaccggggaccac

SEQ ID NO: 132516 - DNA, 481 bp, Arabidopsis thaliana
  unsure (1)..(481): unsure at all n locations
cagttacatcctgcagatgaagaatccttcaagcccttggattggccttcaaggctgaaaatcgcgattgggacggcaaaaggattggcatggcttcatcatagctgcaacccgagaatcatccatcgcaacataagctcgaaatgcatattgttgactgcagagtttgagccaaagatctcggatttcggtctagctaggctgatgaacccaattgatacccatttaagcacattcgtcaatggagaatttggggatttcggttatgttgctcccgagtattcaagaaccatggttgcaactcccaaaaggggatgtctacagcttcggctgttgtgcttctagagctagtaacgggccaaaaagcaacgagtgtaacaaaagtttctgaaggaaaaagcttngganggaaactttaagggtaaccncgtgggaatggtttncaaaggtttcaantgnttcaaactccaggnngcattng

SEQ ID NO: 132517 - DNA, 492 bp, Arabidopsis thaliana
tatagaaaaatctatgacgtcgcatgcacgcgtacgtaagctcggattccggctcgagtttttttttttttttttttaataaaagtacccttaattgattatattatttctccaacctcgttacacaatacagtactataaaacttgtaaatgaacaagaattacccacattatcgggtgactaatgttcgttccatcggaaaacaaaaacacaacatactcaaaaccaaaatctccataaacatatatagagctattaattatcatattaaactctcacacactcttattataaaatgttttgactcctgatattagaccaactgcaaaaactaaactaatcactccaagatttaacaatcaatcattattatgattactataatctatatattactattaaaataaacctttttgtaatgaggatattgtgatgatctgatcaaccgtgaaccattccatacgacagagccatgagcaaaacagcagcct

SEQ ID NO: 132518 - DNA, 750 bp, Arabidopsis thaliana
  unsure (1)..(750): unsure at all n locations
taggtgcactatagaagagctatgacgtcgcatgcacgcgtacgtaagctcggaattcggctcgaggaaacctccaaaaaaaaaaacctcagagaaagaagaagaaagaaacaatgagaggactctccacaaaacccgttgcgataatcatcgcaattctcaccgtccacttcttattcgccgccgtaacctcccaatcctccggcgatttcgtaccgatcgagtcgaaatgcaacggtaccatcgccgagtgctccttatccacggcggaggaagagttcgagatggactctgagatcaacaggcgtattttagcaacaacgaagtatataagctacggtgcgctgaggagaaacacagttccttgctcacgacgcggcgcatcttactacaattgccgacgtggagctcaggctaatccttactctcgtgggctgtagcgctattactcgttgcaggcgataatctctttctctatggactttaaaatttttactctcaaattccttttgcttttgatttttatacaaattttcagattaattaatttggtttgnattgggggttaccaaggttaaaactttgcaatgnaaaaanaggttccatacaggcncaaaaaaaaggttggnatatgaccagaaagggggcgggaattcctgaancccggggggncncaaggtntaaagggcgccccnggggngncccacnttttgncccntagggnggggaatcngccttgggaacagggga

SEQ ID NO: 132519 - DNA, 508 bp, Arabidopsis thaliana
ggtgcactctagaagactatgacgtcgcatcgcacgcgtacgtaagctcggaattcggctcgaggcgatatatgcgcagtccaaaaaccaggagaagaaggcgtgaaccagagtgtaatccttcattgcctgcgtcttgcttcttcaagagcttctgcaacaacaaagataattagagatgcagttgaagcatacaaccggtgagaggagctcacagaaggtgaagccgcttcatgcgggggctaagtctgaagttttgggacctattgtagtttgtgttaggaagagacataattaaaacatttgctgggggcgtctgatggtaaatacaaattttagttgaaaaaatcttttgagcaacactaagctttaaaaacctctttttgttccacaaaaaaaaatggtccgttgttgtcggggtggggggcgtccaactatgaagcccgctacccccgaaatttatttcagagcggtgccctgtggcttccctgttttccttaagagagga

SEQ ID NO: 132520 - DNA, 473 bp, Arabidopsis thaliana
  unsure (1)..(473): unsure at all n locations
cccaagttccttttcccccggtntgggcccctaaaaagnnttccaagantgcgccttggtagggcttaaattggggagaaagcctgtgaagctgggcctcccaggggatcaaatcgggaacccacaatcatcatgcggcagctgtgggctccggtgatgccttccgctgcggtacatgcccttacaagggtctgccacccttcaaattaggcgagaaggtaaccctatctcaaaacttccttgaagctgacatataagcatgtgaaaggcatcttcatacatgggtgtttctcgccgaggccaaaaccttttgctaatcgcagagtagtttcatcatttactttgtgccctttcgtataatttgtttgttggtacttcttttattttgtggctctaaaagcttgtagaatattgtttgggttgcccacaaagcacacaccttagtatccaccaaggacggttttgccttggtt

SEQ ID NO: 132521 - DNA, 511 bp, Arabidopsis thaliana
tgacactatagcagagctatgacgtcgcatgcacgcgtacgtaagctcggaattcggctcgaggtttccatactgatagtctgattggttctggtgggtttggagatgtttacaaagcgactttgaaagatggaagcgcggtggctatcaagatactgattcatgttagcggtcaaggtgatagagagttcatggcggagatggaaaccattgggaagatcaaacatcggaatcttgtgcctcttcttggttattgcaaagttggagacgagcggcttcttgtgtatgagtttatgaagtatggaagtttagaagatgttttgcacgaccccaagaaagctggggtgagactaaactggtccacacggcggaagattgcgataggatcagctagagggcttgctttccttcaccacaactgcagtccgcatatcatccacagagacatgaaatccagtaatgtgttgcttgatgagaatttggaagctcgggtttcagattctggcatggc

SEQ ID NO: 132522 - DNA, 395 bp, Arabidopsis thaliana
aaaaaacaccatgtcttctctgatctcttttatcttccttttccttttctcattcctcactagcttcaaagcttccgctcaagatcctttttacttaaatcattattgtccaaatacgacaacttactcaagattcagcacttactccaccaatctcagaacccttttgtcctcttttgcttcccgcaacgcctcttactccaccggattccagaacgtcacggtgggacaaacccccgacctggtcaccggacttttcctctgccgcggagacctctcgccggaagtttgcagtaactgcgttgccttctccgttgacgaagcgttaactaggtgtccaagtcagagagaagctgtgttctattacgaggagtgtatactcagatactctgaca

SEQ ID NO: 132523 - DNA, 750 bp, Arabidopsis thaliana
  unsure (1)..(750): unsure at all n locations
cagtcattgctcctcttatcttcatattcggcatcaccaatttgggtttagcctgggtagtctccagaaatcaggcgttcacagtgtcgtctccatcatcgagaagctatgaagaaatgtggccgcaaattcaccagggcatcgtagcaccgttggtccaattccaaggggaaatgtttggccaccttaggacccaagacattcttctacacggcccctgtgacccctctcattatcacctctctcatccttcggatatgtgtgccgccagaaattcctacggagggttcgaacacacagctctcgaggtagcttgcccgtgagctgaagcagagtccagacctagaggagattttcagagcatacattccgcatagcttgagctctcacaaaccagaagaacacgagttcaaaggcgcaatgtctcgttatcaagatttcaacgcaatagcaggcgtttaaaatttgaatccaatccccaaattatctcatagatttgttttgctggttttttagaagcttttattgttatgtgtgtgaattttagggtttgtttaggattcttctttgtatgtgttccatggttgttgtaacttgtaactttgtaagctacttttaaacatcaacttgatttttcatcattnnnnnnnnnnnnnnnnnnnnnnnnnnnnnnnnnnnnnnnnnnnnnnnnnnnnnnnnnnnnnnnnnnnnnnnnnnnnnnnnnnnnnnnnnnnnnnnnnnnnnnnnnnn

SEQ ID NO: 132524 - DNA, 1251 bp, Arabidopsis thaliana
atcatttcttcttcttcttcctctgctttcttcctaaagcctactccttttcaatggcgacgttaggctttaacacaaggcgaatccagacaccatcacttccgagaatccctaaaccctcttcttttactaaacccatcaaaacccatcatctcttctcctccgaaactctgttgaaacgctgccgtttcgtctctagatcgttacctgagagctcactgtcgattacaaaagaacaagaggtagctaatgaagtagaagaagatgatccaacttcagagctgagctatctggatcctgaatccgatgcggatagcatcaaagagtgggaattggatttctgctcgaggcctattcttgattccagagggaaaaagatttgggagcttgtggtttgtgatgcttcactctcccttcaagtcactaaatacttccccaataacgtcattaatagtattactctcaaagacgccattgttaccatcactcaagacttgggtgttcctcttcctgagaagattcgcttcttcaggtcacagatgcaaaccattatcacaaaagcttgcaaagagcttgccataaaggcagtgcctagtaaacggtgtctgtctctgtttctgtggttgcaagaacgttatgacactgtgtacatgcgtcatcccggtttccaaaagggatcattgcctcttctgtctctcgacaatccctttccaatgaatcttccggagaacttgtttggggagaaatgggcatttgttcaattaccttactcagctgttagagaggagatctcagattttgatgagaagtttgtgtttggtgctagcttagacttggatttacttggcattgaagtggatgagaatactctgattcctggtctctctgttgctacttcacgtgccaaacctctagcagcttggatgaatgggcttgaagtatgttcgattgaagcagacagttccaaaggatgtttgattctatcagttgggatcgctacaaggtatgtctacgcgacctataagaagacccctgtcactactgatgaagctgaagcttgggaatctgcaaagaaaacaagtggaggtttgcattttcttgcaattcaagatgacttagattctgatgactgtgttggcttttggcttcttattgatttgccaccaccccctgtttgattttccttttgataaatgtttataccatattttgccatttagtaacagatttctgaaatgcttgaatttgaac

SEQ ID NO: 132525 - DNA, 694 bp, Arabidopsis thaliana
gccagcccgccttccgtagcttggaattcaggttcagaatggaattattttggtaggtggagggccagcccctccgaaaagggttaccacgggggccccaacaaacaatgcaggcccggcccaaccgttgccacagtggtttaagcctcgccgtttaatcaaatcaccgttactacggctgccacggccgcaggaatatgtttaccgaccaaaatagagaaagagggttcggtttttcgaggaaatcgagttttaaacgctctcacacttcttggatgcttgatccgaagaaaatcgtcctcttctttgcaactttgtcaagcatgggatcaatcttgttaatcatattcacactctcgatcagcaagtccaatcccggagatatgcctctagactaatagtaaacacacgaggagcattatatataacgcatatatatcatcgaccgacctaagtttgtggccatagaacaaaacacagtctcaccgacctacattttaaggagatgtatcagacagaagaacattacaaaaaatgaagagggtaaggttgtgataatagttttatttcgtatgattttttttaaatgaaaaaaaaaaaaaaagggcggccgccgactagtgagctcgtcgacccgggaatttatccggaccggtacctgcaggcgggccagctcttcccaaaagtgagttgg

SEQ ID NO: 132526 - DNA, 702 bp, Arabidopsis thaliana
attccccagaatctctcttccctttttgtctccaaccaaaacaaaaccttaatcacctttcttcttcttcaaacagagcacaacagagacgttcgttcccactctgtcttaatctcccctgtttcaattcctaaatcgatggaaaacggtggaacaattccgggtcaagaaatcggatcagggcttcaaaaacccgttaacccagatgggtttgtgacgatcgatgttgaaagtttctctaatgtcatccacaaagacttctcttcttctagtccaagaattactttgcagaggaatgtatcgaggaaagggtctccaagaagcaacaacgagagaaaactccattttgacgcaaatggtaatgacaaggagatctcatttcctcagtccccacttagagggtcaagcacgccggaaaaggctagcaccgtgggccccacagaacatgcaggcacggccacaaccgctgccacagctgtttcagcctcgccgcttcatcagatcaccgttactacggctgccacggccgcaggaaatatgattaccgaccaacatacagaaagaaggttcggtttttcgaggaaatcgagttttaaacgctctcacacttcttggatgcttgatccgtagaaaatcgtcctcttctttgcaactttgtcaagcatgggatcaatcttgttaatcatattcacactctcgatc

SEQ ID NO: 132527 - DNA, 541 bp, Arabidopsis thaliana
aggtgcactatagaagatctatgacgtcgcacgcacgcgtacgtaagctcggaattcggctcgggtttatgtatgggaagccggatgtgcctaaaccttctccagaagttatcgctgaggcccatgatatgctagttggttttcaaaccgaatataactagggacgcagcttgtggagttggtggtcaatgctggtgatccaaaagcttcttctttacctcgtaatgattggtacagactacgccgtagcctcgagatactcaagtcaactggatcgcctccgtcttcctttcgcattccttatgattcctttcgagtaaatttagttgctcctgatgctgatgacttccttgaggacggttcatcttgccgatatctctatccaaaacatagagacagatttggaccatgaccttcctttgcgttttcttaggccagcccacgggtgtgctctctacagatctattggtttcaagatgtgaagacctgcctttagggccgaatgggagttttgccaaaagctagatgggtttttggacct

SEQ ID NO: 132528 - DNA, 404 bp, Arabidopsis thaliana
gaaaatctctgaaaaactctcctgattcaaaagagtaagaaatctacaaaagaaaaccacagagaaaatctctactgatcagtttctctccattggtgatcgctcgtcagaaaaattgagctcgattttgtataaattgaagaaaaagaagaagatcatcaaatgcgtgatttttacttttccgttcaagtgattgatcaagggaacataagcagctagagaccacaccactcagttatttctatctcatagtgcttgtggatgttcaagctataagaatgtgctcggtggttctatgaatatataggaatgattggtgttttgaatgggatgggacaccaaattgcctaaggtttatgggtgttaatcaattactagtacgtgttatcttccgaacaaccacc

SEQ ID NO: 132529 - DNA, 552 bp, Arabidopsis thaliana
ctttcttcttcttcttctagttccttgataccaacgcgtaatcctaacccttaatctacttcctccttaattaatcagaggtttctacttattatttccacttctcatctctttcaatcgcaatctgagttctggctaaagattttgtcttgaaggtgagattcattgttccgaatagagtgagaaaaagacttataagattgaaaaagcaagatgcggattttgtgcgatgcttgcgagaacgcagccgcaatcatcttttgcgccgccgatgaagctgccctttgtcgcccctgcgatgaaaaagttcatatgtgcaacaagctagctagtcggcatgtacgtgttggtttagctgaaccaagcaatgccccatgctgtgatatatgcgaaaatgcacctgccttcttttacctgcgagatagccggtagttctctttgtcttgcaatgtgccatggcagtacatgttggtggcaagagaacacacggtcggtttcttttgctgagacagagaatcgagtttccaggggataagcctaaagaaaacaata

SEQ ID NO: 132530 - DNA, 1357 bp, Arabidopsis thaliana
  unsure (1)..(1357): unsure at all n locations
gggccgacggtatcgataagcttgatatcgaattcgcggccgcaatcttcttcgtgtggtttcacaggattgaaatgagttcgatctctggattggtggaagatgaaatcagttcgtttttcgaatcgtctccacctctgaagaacaaggaagagatcgtagccaatcttaatcagttcattgagctgaattcttcgtgtcaaggagggatgaggaggattgtatgtgtgacttcaggtggaactacagttccattggagcaacgatgtgtaagatacattgataatttcagctctggaaatagaggtgctgcttctactgagaatttcgtcaaggctggatatgctgtgatatttctctataggaggggaacttgtcaaccgtattgccggtatcttcctgatgatccattccttgaatgttttgagtttccagatgccaaaaacattcaagttcatgggtcacattcaggagctgtgaagatggctgttatggaccagcaagctgcagttgcagaaggtcgcttgcttaaactcccattctcaaccatatatgaatatctccagatgttgcggttgattgctacgatattgaaagatgtccggccatgttcgatgttttatcttgctgctgctggatctgacttctatgtgccatggttaagcatggcaagagtctcatcatatccctgtgattatggctacacaattcttgcgtctgaaaattgacttcttatatatttgtgaaaccagacagagcacaaaatagaatcaggatctggtcctttggacataagactagctcaagtccctaaaatgctttcaatcttgagatcaaattgggctccaaaggctttctgcatatcattcaagcttgagacagactcaaagattttgctagagaaagctacaaaggctttacaaaaatacaaagtgcacgcagttgtagcaaatgaactattaacgcgtaaggaggaagttgtggttgtttcaagtagcggtaatgttgtggtgagacgtgatagcaataagccggaatctatcgtagaagataatctcattcgtctcctcgtagatcgacattcaacatacatcaaagaatctctcacttgatccccaaattcttctacgtcaagaaaagttccaagtgttcgatgtgggatacgtgtaattgtgtatgagtgatgacttggaccataaattactcaaataattttcacactttcttatgtttttgacatgttgggaatatatgaatcctagaaatccgaaaaaaaaaaaaaaaaaaaaaagggcggccnnnnnnnnnnnnnnnnnnnnnnnnnnnnnnnnnnnnnnnnnnnnnnnnnnnnnnnnnn

SEQ ID NO: 132531 - DNA, 457 bp, Arabidopsis thaliana
gtttccagatgccaaaaacattcaagttcatgggtcacattcaggagctgtgaagatggctgttatggaccagcaagctgcagttgcagaaggtcgcttgcttaaactcccattctcaaccatatatgaatatctccagatgttgcggttgattgctacgatattgaaagatgtcggtccatgttcgattttttatcttgctgctgctgtatctgacttctatgtgccatggttaagcatgacagagcacaaaatagaatcaggatctggtcctttggacataagactagctcaagtccctaaaatgctttcaatcttgagatcaaattgggctccaaaggctttctgcatatcattcaagcttgagacagactcaaagattttgctagagaaagctacaaaggctttacaaaaatacaaagtgcacgcagttgtagcaaatgaactattaacgcgt

SEQ ID NO: 132532 - DNA, 522 bp, Arabidopsis thaliana
ggtacactctagaagcgctatgacgtcgcacgcacgcctgcgtaagctcggaattcggctcgaggcttaagaggaattaggagttggccggcgaattggagaagtacgacggcgtcaatgacgacgacggagagcgttagaaaggtaccgcaagttttaacagtggcgggatcagattccggcgccggagctggaattcaagccgaccttaaagtctgcgcagctcgtggtgtgtattgcgcttccgtcataaccgcagtcactgctcagaacactcgaggagttcaatctgttcatcttcttcctccggaatttatctctgaacagctcaaatccgtcctctctgacttcgaattcgacgtcgtgaagactgggatgcttccttctactgagatcgttggagggttcttcttcaaaatctatcaattttcccagtcgggcgcttttggttggtgatccctgggaggggttctaccaaggggcacggttttggggtggtcttctattttctcttatctttaa

SEQ ID NO: 132533 - DNA, 407 bp, Arabidopsis thaliana
atctctgtctctctctctctctttctctctgccagcgaacatccattggagctcctcactatacggcccaagagatagagggagagagaagacatcataattcccaaacaaaagactttgggtataaaattgggtttattgactttgtgaaacctacccagaaaatctaccaactgtctcgaagtctcgctcctctttcttgagacgggagagagggagggaagaacactaagaagatgaagaagattctagaaagatcaatggaaggttcagggacatggcaaggcttggtgctcgttggtattgtcacatggatctgtgcttcttcttatcttaaatttactcataaatttagatctcgcttacaaccatgggtcgctcgtcaagtcgttggtggtgtccctctc

SEQ ID NO: 132534 - DNA, 510 bp, Arabidopsis thaliana
ctatgacgacccatgcacgcgtacgtaagctcggaatcggttcgaggctggcacacacggtttacagatgatggacacgcacggacgactgcttgtagtgctgggttatggactatggccatcgatggttataatctcagaaatagtccaaacattcatattggcagatttctgctactactacgtttttagtgttggcgggggccaccttgttctaaggctcccatctggggttgtgtaagttctaaaggaaaaaagatatgacccattgtgacgaaatttgttacacgaagatagaatctagcttggggaaacctgagaaaccctcgggtacctctcaagtacccccctaggccaaggcccaaattttattaaccggggtgattattttgggggagggcataatcaaaaacagtccctgggatattaagaacagattgtttcccacgcattggggccaaataaaaaaaaaaaaaagggcggccccccacttaagacccctggacccgg

SEQ ID NO: 132535 - DNA, 492 bp, Arabidopsis thaliana
tgacgtcgcatgcacgcctacctaagctcggaattcggctcgagtggtgactctgatttcgaaattgatgatgtgtctgattctgagccggaagatggggaagatgatgagtatgaccagctgccaccatttaagcctcttcgaaaaacccaacttgcaaagctctcaaatgaaccgagaaaggcatatttcgaggagtatgattaccggggtaagctcctgccgaagaagccatggggagagggatttaagagggtggaagaaatggagaaaaaccggaagaagctgggtgaaagtgagtttgggttttccgggagaagaagatgatccagaaaaccggggttcaactgtggtggcctgttcatttcccgattttggtttggccacctcatttgatagggaatacctaacttaaccattccggatttctgaaaccaacttcacacttcttaacaagccaatggtggattccccagggtgggaaccttgact

SEQ ID NO: 132536 - DNA, 922 bp, Arabidopsis thaliana
  unsure (1)..(922): unsure at all n locations
tgagaaatcgcataaacattcgattaaagcaactnataatcatcacaagctaatatttntcccttccaagaaagtgtcagatgagtctgactcactagagaagagtggtttgacagatgagcttgaggaacctcaaaaacaccttggatatttgtttgatggaagtcagaatagtaagaagaggattagagatgattctcctccggctgttgaaagtctcatcaaagctgcacctgtagcaggtaaacctctacggattagaatggtcttcaaaaaaccaaaggaggaagttcctactctgcctagagaggctgttgtttgctccactacagttgcaaagtcgctcagtcaccaagatgtcataacaagttctatctcaagttcaaaaacatccgagcttgaaaagaatctgccgtcaacatcaatagcggcaatagatgaaacagagaagagaaagaaacccagatctagcaaagaagatcaatacaatgcattgtttgatggttggactcctccttccatgtgtattgctgatgcatcttcaaatgacaatggtgattattggctatttgggaacaagacgcaagaggtgcttaagcccaaagcagcagtcaaggttgatgatgacacgatgatgagaccgggagattcatcttggcctagagctcaatttttgtctgaagttgggatttattctttaccttatactgtcccgttctaatgctcgattctttttgttctagctttagacttagcttgtacagtgtttgactgtttgtaacaacaattctaatctaacccgattttgatacatcaaaaaaaaaaaaaaaaaaaaaaaaaagggcggccgctctagaggatccaagcgtacgtacgcgtgcatgcgacgtcatagtcatctatagttcgcctcaatcagtcg

SEQ ID NO: 132537 - DNA, 520 bp, Arabidopsis thaliana
atgcacgcgtacgtaagctcggaattcggttcgagagcggttgtaagctgacagtaatagtgggattgagattggtcgcactataaaaaagtttcccttgttgactccaagggagtatgtattagcgtggaaattgtgggaggggaaggataagttctactgtttcatcaaggaatgtgatcaccatatggtgcgcgcaacagaggaagtatgtacgtgtaagttatttcacatctgggtggcgatttaggaaagttcctgggaggaacgcttgtgagatacacatggttcaccaggaggatgctggattaaatgtgaaatggcaaagttgctttctaagaaggctatggaggtacttttggtaaatggaaaatgcacttcccaaggacattggcacccatcattggacccagggcccaccatatcttgtggaagcctaatggaaaaaattcattggaattaaaaggcaaccaaccactttccaacttcttgggaactacaacagtgggtgccccccggg

SEQ ID NO: 132538 - DNA, 519 bp, Arabidopsis thaliana
ggtgcactctacaagactatgacgtggtacgcacgcgtacgtaagctcggaattcggctcgagttccgttgctggggagatcccggaatctgatcaagaacctggcagtaataataatcacaatgatttaccagaaataatacggggggaaagagaaagatctggaaatactaacccgtgaattggacgacaaagtcaggttcaggcagaaaccagttgagaggcccgggtctggggcgggtagaacccggacatattcagaaagaacacattcccgggctggctcaattgatgaaaccaggagtgttgtatctacagagagacccagatcacgtggggccctcgatgcctgggtttagaccaccccatgagcagcgaagaacctttcagggaaccaaggagcgcggtttcttcagcaacaggtcttcctcttaggaaggtgtggttagaagaaaccaacaacacccaagtgggggtattttttaactactcctcccagttccaaattttgaaaaaaat

SEQ ID NO: 132539 - DNA, 528 bp, Arabidopsis thaliana
taggtgcactatagaagagctttgacgtcgcatgcacgcgtacgtaagctcggaattcggctcgagttgtaacggtaaccaagccgacatcaagatacagtttcagcttgacttgagtaagattatgaggggtgaagatccacggacaaccttgatgataaaaaacatcccaaataagtatacccggaatatgctcttagctgccatcgacgagaaaaacagtggaacttatgattttctttatttgcctattgatttcaagaataaatgtaatgtggggtatgcatttatcaatatggtgtctcctaaattcaccattgcattgtacgaggcctttaatggaaagaaatgggataagttcaacagcgagaaagttgcttcattggcttatgcacgaatccaaggtaaagctgcgcttattgctcactttcagaactcaagtttgatgaatgaagataggagatgccaacctattgtctttgatggatcagaatctaaatatccgatcatccgggagaattcgcagct

SEQ ID NO: 132540 - DNA, 488 bp, Arabidopsis thaliana
gacgtggtacgccgcgtgcgtaagctcggaattcggctcgagctcgagccgaatcggctcgaggaacggttacttgaacaattgagtcagatcgaagcgtcaggtaacggaatcggtagatctgggaatccaccggcgtcgaaatcagcgattgaatctttacctagagtcgaaatctcagattgtcatacgaaagcagaagctaattgcgccgtgtgtacggaggttttcgaagccggaatcgaaggtcgtgagatgccgtgtaaacacatatttcacggtgattggattgttccatggctttcgattcggaattcgtgtcctgtgtgtagatttgagttaccttcagatccaatcccacggagtaatgaagaagaacaccccgttgggataacgatttggagaatacctggaggggggttccctgtcggtaggttaaaccccggaagaggaaaaagagaaaagattttcccggggggtttgaccga

SEQ ID NO: 132541 - DNA, 565 bp, Arabidopsis thaliana
  unsure (1)..(565): unsure at all n locations
actatgacaccgcatgcacgcctacgtaagctcggaattcttctcgagctcgtaataatttcggaaccaaaagaacccaaaactagaaaacagagaagaagaagaagaagaagaagagagcaaaaattggtgatgtcagcttcccgatggacgttgatggatctaccatcgtacctgtcgtcatcgtgggcattccggtggccggaggtgaatctttcatccctgagctctggttggaacatgagattggtgtccttgtcgggtgatctctccatagttgatgatcttttgtggagttttgtctcaatcattgaatctttagctatcactgctacggtctgttgcttcttcttgttttgggggtggaccctctaattcccttttttcattatttaattttccgaattttattgccaactgaaatgtgggtaaaaaaaaataatcaattaaattcgagacctttttaggcgnaaaaaagaaaaaacgacaataccctcactcttaataaggaggggccgggccaccttcttgggccccccgcggccctcaaataatttccaggcgg

SEQ ID NO: 132542 - DNA, 526 bp, Arabidopsis thaliana
  unsure (1)..(526): unsure at all n locations
aggtgcactatagaagattatgacgtcgcatgcacgcgtacgtaagctcggaattcggctcgagcagaaagttgaaaacttgggagatgggtttctcttcggttgctggtcaaattgcgagatacattgtgacgatgacaagtactggagctattctttttgattggggttcaattatcagggtggagaatagttcgatgaactcatttggtttcggtattagttgggcttggtggaatttatcatttggaacccatgacctggtgctaacattgggtttgggaagatcattatccgagcccggcccacgggattggttgttattaaccggaaagcactacggggactagggaaaagctcttgctagagaagttccttctctctggagacagagtcattgtcacatctcgcagntcctgattctgttgatatgactgtcaaagagctagagcaaaatcttcaagagattttgagtaacgctagcgagtcagctagaaagaaactgaatgatgctaaggtagtggga

SEQ ID NO: 132543 - DNA, 798 bp, Arabidopsis thaliana
  unsure (1)..(798): unsure at all n locations
tcaggaggtacagggcatatcattagacggatgttttaaatgcagtaatgcttaccctaatcaggttcataaaggaggggaatttatgattcgcaaggctaacaaaaagaatggtgcctcgtcaaaaagaaatgctgccacaaacaagaatcaaatcaacaagaactttcaacgagtaaggaaattgtctagggccccggagaaattggccaacccaatgttgaatggcgtgggagtggtgagtggccccggtgatgggtccagttgttaaaagtcgaaagccacgggaaagccttttttcctcaattggttccaggggaggttctatttggcttcacttgatgctccttaatgaattacctaggccgcggctgaagcccgcaggagagaccaaactctttgctgcgacgtccaaagctacttacaaggaatgggttagtgagaggttaggtgagagcgcgggagaagctacgaaagatgtactaggcacggttgggcacgcagccggccctgcgtggaacgtcttcaatatccgcaaagctttctctccttcctcttcagtcacattggggatcctcaaaaacgcttcacgaaagtgatatttggtgtttgtatttatttgtgggcagagaccatatgttaaattaagtcagaatatgcaaatgtgtaatcttgaatctcaaacaaaggaaacctctcttctttnnnnnnnnnnnnnnnnnnnnnnnnnnnnnnnnnnnnnnnnnnnnnnnnnnnnnnnnnnnnnnnnnnnnnnnnnnnnnnnnnnnnnnnnnnnnn

SEQ ID NO: 132544 - DNA, 405 bp, Arabidopsis thaliana
gttctagatcgcgagcggccgcccttttttttttttttttttttttccgttctgttggatttggttttaatttttggtaggtgtaagaaatattaaaactcaactttggtttatggactaaattttttttgttcgatagttggtatataatgaactcagcatacagcattcctagttctttgtacattttttatcttataaaccatagtctttttggtggtaacacatgtatagagtaaggaaattgtctagggcgacggagaaattgagcaagacaatgttgaatggtgtgggagtggtgagtggctcggtgatgggtccagttgtaaagtcgaagccagggaaagcttttttctcaatggttccaggggaggttctattggcttcacttgatgctcttaataa

SEQ ID NO: 132545 - DNA, 375 bp, Arabidopsis thaliana
aagacataattttctctgttttcctagctctctcctctcaaattcttccattgctctctgttttggcaaatcgtgaactgccacgtctttaaggcatcagtgaagcaaagatggactttgacgaggagctaaatctttgtattacgaaaggtaaaaatgttgatcattcttttggaggagaagcttcttccacgtccccaagatctatgaagaaaatgaagagtcctagtcgtcctaaaccctatttccaatcctcttcttctccttattcgttacaggctttccctttttctctcgatccaacacttcagaatcagcaacaacaactcggatcatacgttccggtacttgagcaacgacaagacccgacaatgc

SEQ ID NO: 132546 - DNA, 486 bp, Arabidopsis thaliana
gtgattgtgaacatgaaaggccgagaaaacgagttcagaaatattgctattgagctcctcagacgttttcagactgaaataggagagcttggtactgaggagagcaaggactttcgggacagaaatttgtttattgtcttggtgccaaacaaggaagttattcggaaagtgcaagaaccacccccaaaaaagaagaaaaagccagcggatgataaagtttcagcagcaaatataactgcaaccccccatatatgatgcggaattgtctgatgtaaaatgttctgtgactttgataaatttctggatagtttcttttttaatatgcttcttgcatttccatgtaattgtaaccatagaaatagattatttgaatgaaaaaaagaaaaaaaaaaaaaaaaaaaaaacccaaaaagcggccgctctagaggatccaagcttacgtacgcgtgcatgcgacgtcatagactctctagtagttgcacctaa

SEQ ID NO: 132547 - DNA, 419 bp, Arabidopsis thaliana
cgaagagccaatatcatcccaaccttgtaaatgaagatgaaactgtgacaagatcagatcgtgagattttcaattccttgctctgtaaagtctcttcttcgaaccttcaagatcaaaaatcagctgccaaggagctaagacttctgaccaggaaaggcactgagttccgagctctttttggcgaatctccggatgagatcaccaggttggtgaatcccttgttacacgggtcaaacccagatgagaagcttcaagaagatgtggttacaacattgttgaacatatcaatacatgatgacagcaacaagaagctcgtctgcgaaaatcctaatgtgattcctctccttatcgatgcattgaggcgtggaacagtcgccacgagaagcaatgcagctgcagcgatcttcacttctgtcagc

SEQ ID NO: 132548 - DNA, 422 bp, Arabidopsis thaliana
aaaaaagattcttcaaaagagcaaaacaatcaatggagagagcaaagtcgaggaagcctcatatcatgatgataccatacccacttcaaggtcacgttatcccttttgtccacttagccatcaaacttgcttctcatggcttcaccatcactttcgtcaacaccgactccatccaccaccacatctccaccgctcaccaagatgacgccggtgacatcttctccgccgctcgcagctccggccagcacgacatacgttacaccaccgtgagcgacggcttccctttagactttgaccggtcactgaaccatgaccagtttttcgaaggcattctccacgtcttctctgcccacgtggatgatctcatcgccaaactctcccgccgtgatgatcctcccgtgacttgcttgatcgccgacacg

SEQ ID NO: 132549 - DNA, 514 bp, Arabidopsis thaliana
taggtgacactatagaagtatctatgacgtcgcatgcacgcgtacgtaagctcggaattcggctcgaggaagctcgatgctatgttgatcgatatgcttgacgccttctccgatactgagttctggtacactgatcgcggcatagttcttggtgattgtgacaaggggtcttacggttctccagcttccgttaggcaggaggacaagtggtggctgccttgccctaaggttccgcctaacggtttgtcagaagaggccaggaagaaactgcagcagtgtcgggactttgctaaccagattctcaaggctgcattggcaattaacagtggcgtgcttgccgaaatggagattcccgacccttacttggagactttgcccaagagcgggaaggaatgtcttggagagatcatctaccagtacttaactgcaaacaagttctctcccgaatgcctcctggactgtcttgatctctcatcggaacatcagactcttgaaatcgccaaccggattgagg

SEQ ID NO: 132550 - DNA, 425 bp, Arabidopsis thaliana
  unsure (1)..(425): unsure at all n locations
cctctagactactatgacgtaccatgcacgcctacgtaagctcggaattctgctcgagcgaaggctagagacttgcattggagcagctcgcggattacagtatcttcatactggagccaagtacacgatcatacatagagacatcaaaaccacaaacatacttctcgatgagaacttcgtcgctaaagtatctgactttggtttatcaaagaggtggtcctactagtgcttctcaaacgcatgtctccaccgtcgttaaaggaacgtttggttacttggatcccgagtactatcgccgtcaaatcttgaccgaaaaatccgacgtgtactcttttggagttgttctgttggaggttttgtgctgtanaccgattagaatgcaaagtgttccaccggaacaagcagatttgatccgatgggtgaag

SEQ ID NO: 132551 - DNA, 585 bp, Arabidopsis thaliana
ctatgacgacacatgcacgcctacgtaagctcggaattcggttcgagttgcgttcaagctcatggatcagcaatggctttcaatgcgtgcctcatacatggagtttaacacggtgatgaaatcaacaaggagacagctggagagagagctgatgctggaagacataatgcatcttgaggacttaccctcctacgctcttctcaggcaatagcccttatgatgatattaaatagtaagaagagtttcttacctcaggataacacaagggggccctactctctctctctcttcacttttcatcttcaacgctgttcggtcctacctcttcggtgaccttttcttggggtgggggggtctaagaaacaactccaacacccgggtggtactttgtttttttaaaaacagaaaaagaaggggagaaaacccggggagaggggggggaaaatcctcaatttggtgccagggggggggagctaaaagggaattggttcttacaaccgggaaggtttttagttccgggggggggatgaacctttgggggggggaaaaaaaattgggggaggcccaaattaaaagccgttttgt

SEQ ID NO: 132552 - DNA, 1221 bp, Arabidopsis thaliana
  unsure (1)..(1221): unsure at all n locations
atgacctactcctagaaggacttaaaagatgcaaatccctcggtgccttggccatggttcatgctgaaaatggagatgcagtattcgaaggacagaaaagaatgattgaactgggcattacaggtccagagggtcatgctctttcaaggcctcctgtgctcgagggagaggccactgctagagcaattcgtttggctcgttttattaacacgcctctctatgttgttcatgtgatgagtgttgatgcaatggacgagattgctaaagctcggaaatcaggacagaaggttattggagagcctgttgtgtctgggttaatccttgatgatcattggcttttgggttcctgaccttcacaaattgcggccaaggatgtcatggggccacctttcagaccagtagggcattgggaaagccctccaagttgcccttcccacaggaatccttcagcttgtaggggctgttcactgcactttcaattctacacaaaaagctctaggacttgatggtttccgcggaatccctaatggtgttaatggccttgaggaacggatgcacttgatatgggacacgatggtggagtctggccaactctcagctactgattatgttcgaataaccagcactgagtgtgctagaattttcaacatatatccacggaaaggagctatccttgctggctcggatgcagatattatcatattgaatccaaactcaagctacgagattagctcaaagtctcatcattcaagatcagacacaaacgtctacgagggcagaagaggaaagggaaaagttgaagtgacaatagcaggaggacgaattgtgtgggaaaacgaggaacttaaagttgttccaagaagtggcaagtatatagagatgcctcctttcagttaccttttcgatggtattgagaaatcagatgctaattatctatcttctcttcgagctccagttaagcgtgtcagaactgaagctacgtaaagagcaggtatctatctgcatatcgtgattctgtaagaacaattgtacataatttgtattaaaagtattgaaagagcgattatgaataatgtgcatgtagtctggttttgagaaaaaataaaagattgtaaaatttatccgtgagttaaaaaaaaaaaaaaagnnnnnnnnnnnnnnnnnnnnnnnnnnnnnnnnnnnnnnnnnnnnnnnnnnnnnnnnnnnnnnnnnnnnnnnnnn

SEQ ID NO: 132553 - DNA, 406 bp, Arabidopsis thaliana
ctctacagtcacagcttcctcgattttggacaggatgcagcacaagaaaagttatcggaatcactatacaactcagctgcaaactctacaggggaaggaatagttcctgacccttgtattcctaaagggtatatccttgaaacaaatttacaaaaggacttacctggattcttggctgataaaggcaaatttacagccacccttcaagctgctggtaatttctcagagtgtcgatctgctgcatttgccatgttgcaggaagaaaaagggaaatgtacttataagcgttgttctattggatcaatattcacacctaatcttcaaggaagttttttggctacagagaatttcttccacacatccaagttctttgggttgggagaaaaagagtggctgtctgaaatga

SEQ ID NO: 132554 - DNA, 415 bp, Arabidopsis thaliana
atgacgtcgcatgcacgcgtacgtaagctcggaattcggctcgagatgaagtgatagagccactgccttcgtacggaagagggcgagacacagatggtggaaggttcatcagtctactttttggttcaaacttaaccgatgttgttatccaccggtgagaatgggacatttgatggacaaggagaaccatggtgggggaaattcaagagaggagaactaaaatacacaggaccttatttgattgagattatgcattctgagggtatccaaatccccaatctcactttcttgaattctccttcttggcatattcacccggtctacagcaccattatatatatccaaggtttgacgattttacccccggtcacggtaccaaacactgacggtatcaacccagattcttgtaccaaca

SEQ ID NO: 132555 - DNA, 696 bp, Arabidopsis thaliana
  unsure (1)..(696): unsure at all n locations
gcnnaaaggntaaccccncnaacangggnaaccaccacncccacaggtaaanaccgcggncaaccacntcgaaaaccccaacgnaccggttaaccaccaacaaaaccccaccggntaacccccnaccacncgccaccggnccaaccacctacgtacaatcccccaactacaccggtaaaccacctacagcgccgcctgtcaaacctccaacaccccctcccgtaagaactcggatagattgcgtgcctttatgtgggaccaggtgtgggcaacactcgaggaagaacgtatgtatgagagcgtgcgtcacgtgctgctaccgctgcaagtgtgttcccccaggcacctacggtaataaggagaagtgtggatcttgttacgccaacatgaagacacgtggtggaaaatccaaatgtccttgaacctttatatgacgatggttgttaaacgaaataatttaaatcaatggagtttttataagtttgtaatgcgtttgtttttgttatagtaatattgagttggatctttgtttccgggacgtagaatactaaataatgaaaaaaaccttctcgatgaaaaaaaaaaaaaaaaaaaanaaagnnnnnnnnnnnnnnnnnnnnnnnnnnnnnnnnnnnnnnnnnnnnnnnnnnnnnnnnnnnnnnnnnnnnnnnnnnnnnnnnnnnnnnnnnngtagct

SEQ ID NO: 132556 - DNA, 674 bp, Arabidopsis thaliana
  unsure (1)..(674): unsure at all n locations
cccctnccccnttttcctgggttnggccccctgtaanatcgatggtaccggtcnttcccaatcggcnntncacctatacctccttcntcgcncaaacccccccncgccntcagcgngatttaatccgctatatancctgtgcccnccatncccncgcagctccaaacttttgaaatttgtggatccaagtggatgacaagaggcccgcaaggatccacccgggtattgggttgtatccgggtgcaagattattggtggagaaaggcaaaatctcattgaaggtgaagtattctctatttactccaatattgggagatgaagtgatcgaggaagcctatgaaggttaagagaaaatggtggtggtgtggctcagagccaatgagagaaaataggatgagtggtatgtttatgtctgtacgtgtacattcttaaggttttgtcgtttgtaatgttaatggtgtggatgtctaatatgccactgtaaaacttatatacacgagaagttgggatcgtggatatcaaatttatgggtttgaatagtgacattgcccaaaaaaaagggcggccgctctagaggatcctagcttacgtacgcgtgcatgcgacgtcatagctcttnnnnnnnnnnnnnnnnnnnnnnnnnnnnnnnnnnnnnnnnnnnnnnnnnnnnnnnn

SEQ ID NO: 132557 - DNA, 699 bp, Arabidopsis thaliana
cacgcgtccgggacctaagctatacgtgaataccactccggttgttgttggtaagaggccaatcactggcatgcggctctacctagagggtagaagaagcaaccgtttggcaattcatttgcaacacctttcctctcttcccaagatatatcagctcgaagacgatctaaatagaagtatccggcaagagtctcatgaccgtcgatgctatgagaaagtaaactggaagaactactctcacgtctgcacagagcctgtcgaatcagatgatgatctttctgtagtaacaggtgcgcagcttcatgtagagagccacggattcaagaacgtgctcttcttgcgcctttgtttctctagagttgtgggagcaacactggtaaagaattctgaatgggatgaagcggtaggctttgctccaaaatcaggactcatctcaacgctaataagccatcacttcactgcagcacaaaaaccaccaccacgacctgcagacgtgaatataaattcggctatatatccctgggggaccaccagtacccacgcaagctccaaaacttttgaaatttgtggatacaagtgagatgacaagagggccgcaagaatcaccccggtattgcgttgtatcgggtgcaagatttttggtggagaaaggcataatctcattgaaggtgaagtattctctatttactccaatattgg

SEQ ID NO: 132558 - DNA, 750 bp, Arabidopsis thaliana
  unsure (1)..(750): unsure at all n locations
ttgacgtcgccatgcaccgccgtacgtaaagctcggaattcaggctcgagatgggttttctgaggcatgtaagggagtcccacagccaatgaatcctccagggtttatgaaaacatctcaagcatcatcaacaacaaccaatgttcctgcactaagtgatgatgctttgactcgtgtcgccatgtcacttccttctccaaaaactgcgaataaagaagatggactgtgtgtgatttgtgtggatgcaccatctgaagcagtgtgtgtgccgtgtggacatgtcgccggatgcatttcttgcttgaaagagattgaaaacaagaaaatgggatgtcctgtttgtcgcgccaacattgatcaggtcattaagctatatcatgtttgaagcatatctcctctatggctggaagatattgaaactatctcctattttttactttgtctttaaaagataactacaaatttttttattgtgtgtatgttatgtggtgaagtcaaagaagtcgaaatatagaatcacgacaagtttagtttgtctttttatctttgttacatgatcaatgttaatttttccttcaatcttacaaactctatatgtaacaacctgttccctggnnnnnnnnnnnnnnnnnnnnnnnnnnnnnnnagnnnnnnnnnnnnnnnnnnnnnnnnnnnnnnnnnnnnnnnnnnnnnnnnnnnnnnnnnnnnnnnnnnnnnnnnnnnnnnnnnnnnnnnnnnnnnnnnnnnnnn

SEQ ID NO: 132559 - DNA, 559 bp, Arabidopsis thaliana
  unsure (1)..(559): unsure at all n locations
tctagatcgcgagcggccgccctttttttttttttttcggcgttctataaactgaactgttattgctctgctattcacttctctacattacaggctttttctttttatctccacacaaattacaaacaagcaagaccgtccttttcgccatgaaaatccgcggtaaacaacgcataaagaaagaaagaaataagaaaaagaagaaactgcggatgtatttatcgacgcgttctatttggcttcgcttcgtttgttttaggctttagcttctgcacgagcagtggctttgttggcaatgagctgctcatagagatctctgatcttcaatccaacaatggtttggaaaagaccagtaccgttgttgctacccgggaaatcagcatgtttgagcatttgttgagtgacttccccgtagaatttggtcgagagggtgcccaagtgactttccccgtaaaccaagcccgcccaaggggnccgtgggggcnanccggggaattccggacggganctncagggggaccagnttncccaaaagggnggccganaaaggctgggggaa

SEQ ID NO: 132560 - DNA, 904 bp, Arabidopsis thaliana
  unsure (1)..(904): unsure at all n locations
cacgcgtccgaatttgtaatccattacctgtcatcgttgtcttgtcaagaagaaacaaatcaactctaaaaagaaaaatgttgttcatcgaaatcgaagcttgacagtattcaaaatcagattcgagatgagctgcgacggaggcaaaccggcgccggcgaaactaggcgacgaacaactagcggagctccgggagatattccgatcatttgaccagaacaaggatggaagtttgacggagctcgagttaggctcacttctaagatctctcggtctaaagccgagtcaagaccaactcgacacattgatcccagaaagcagatcggaataacaacggactggtcgagttctccgagttcgtcgccctcgtcgagccagatctggtcaagtgtccttacacggatgatcagcttaaagccatctttagaatgtttgaccccgatggaaacggttacataacggcggcggagttagcccattcgatggcgaagataggtcacgcgttgacggcggaggagttaacgggaatgatcaaagaagctgatcgagacggcgatggttgtattgatttcccaagagtttgttcaagcgattacttcagcttgcgtctgataatgcttggggttgaagaaagaaagggtatatatatacatagtttgaaatacttgtgttttgtttttttggcttcatcctcaaatcaaagacatttggaagtatatgtgtgtaggtgcgatcccatggaaaatgtgtgttatttattgtttcatattattctttgatgaaattttgataaaaaaaaaaaaaaaaggnnnnnnnnnnnnnnnnnnnnnnnnnnnnnnnnnnnnnnnnnnnnnnnnnnnnnnnnnnnnnnnnnnnnnnnnnnnnnnnnnnnnnnnnnnnnnnn

SEQ ID NO: 132561 - DNA, 487 bp, Arabidopsis thaliana
  unsure (1)..(487): unsure at all n locations
cattcatcgtcttcttcttcttcttcttcttctgcttatcatcgttcttcgcttcaatcgtcatggctgatgaatataccggagaagcaacgggatcgtcggaagcaaaggttcacatcatctacaccgagaaacctaccgatgaagaacctaaaacctatcatctccgtaccctttcctctgctctcggcagtgaggaagctgcaaaagatgctttgatttacagttacaaggaagctgcttctggtttttcagctaagctcactcctgagcaagtcgctgagatatcaaaacaaccaggtgtgattcaagttgtgccaagccagacttatcagctgcacaaacctggtggtggtggtggtttcaagttgacctaacttgacttggggtattctctacttctcaactaaacctgtggcttacagaaactaggctgttgtggattgtggncttnaccagnttttacaaanangttgaggtnttgtnt

SEQ ID NO: 132562 - DNA, 492 bp, Arabidopsis thaliana
  unsure (1)..(492): unsure at all n locations
cactatagctgnactgtgacacagcatgcacgcgtacgtaagctcggaattctgctcgaggttgggatataccggggaaggaacatatgtcgaagccgccggtggtgaaaattttggcggaggtggtggtggttctagtggatcgtcctccactagagactactatgcaatgttttcaccaagggcaacattattagagtcaaattcaatgaccggggtatcatcagcccaaccttttcaaggaggcttccttttagagaaagtaatgggcccattatcaacgggtcatttagagctcaagacccgaaacccaaaagataacccgattgtgactttcaactatttccaacatcctgacgacctaaaacgttgtgttcgaggaatccaaaccatagagagagtcgggcaatctaaagctttttcgaggataagtacgcagatgtgtcatttgagtatttacttaacctcacggcgagtactcctgtcaatcta

SEQ ID NO: 132563 - DNA, 520 bp, Arabidopsis thaliana
acgtggcatcgccgcgtacgtaagctcggaattcggctcgaggtataattcgtggttacgaacaccagtgtggacacaaagcagagcaaagaagacttttgtaagaaaataaacacacaactaaagagatgtcgtcaaccttgagcaacgaagagtcaggactcggtgattcaaatcgttcgacggaagtagatggcggcgacggaggaaacttcacggcttacgagtctcgattccagtcgcagcggtttgactcttccttctctaattttgactcccaaccggagaaagagtcagacttaccatgcggcgattcatctcctcgacccgaaactcaatctccgccgtcgataaatagtttcgatgatacaaacgattcgatcttgccgccaccctcggccatggagaaagaggaaggtttcgctcttagagaggggcgaaggctaaatgctctggggttgggatgagaaagaaaggggagaaaaaagaattggcttcaacaaatttctaaaagcccgcg

SEQ ID NO: 132564 - DNA, 465 bp, Arabidopsis thaliana
  unsure (1)..(465): unsure at all n locations
gcnnnnnnnnnnnnnnnnnnnnnnnnnnnnnnnnnnnnnnnnnnnnnnnnnnnnnnnnnnnnnnnnnnnnnnnnnnggctcgaggtggcttcaaactgctgtcagaaggtgggaagcatagatgcaagagcgacaggagagtcagggggctcatcgtggaatgactgcgtgtccacttgtttacaaagcaacccaacatgtcaaaattccgtcgaggtcacctgagatgctcacagcagaacagagtcctgatctatgtgtttggtgatcacaaaaagagaggggttcccagacactacaacatgcaatgcggttccgaaggtttgtgcgatttctgtaaggaagtccacgctgctccaaaaaaaaaaaaaaaaagggcggcccccgactagttagcttgtcgacccgggaattaaatccggaccgggtcctgccggcggcccagcttttccctaaaataaattc

SEQ ID NO: 132565 - DNA, 467 bp, Arabidopsis thaliana
cttgacgtcgcctgcacgccgtccgaagcttggaattcaggttggggggaagaagaaccaatcgcggcgggatccaccgccggccccagaatctttcaggctttccgacgtgttggcgtctccttacaccttcctccgtcgctatcaccatccatgcgaagccaggttccaaagccgcctccatcaccgatgtgaccgacgaagcggtaggcgttcaaatcgacgcgccggctagagatggtgaagctagcgcagctcttctcgagtacatgagctctgtattgggggtgaaaagaagacaagtctctctcggttcgggatcgaagcctcgagataaagttgtgattgttgaggatatgacccaacagagtgtttctcaagctgtgtcccatgcatcagagcctacctaaagatctccaagcctgtaactaactatatggggaaactaactcatcaaaagctaaatg

SEQ ID NO: 132566 - DNA, 474 bp, Arabidopsis thaliana
cttagcttggaattcaggttgagaagagagggaagaccaagtaccgttatggtggattcttgagtttaccgctaacctcggagatttgggtttacctcgggggttagaccacaggattgaggaaccagagctggatccgagttacgaactctgtttcttccttccgtaaccaccagttccgagtcgcggattcgactcggatcggtgggactatcggctacttaccaccggagggtttccggaaaaaaaccgttgccaccgctaaaacagatgttttcagctttggtgttgtggttttagaggttgcctccggtagacgagccgttgatctttcgttctcggaagataaaatcattttacttgattgggttcggagattatccgataaccggaatttactcgacgccggggattctcggttagcaaaaggatcttatgatctctctgatatgaagagaatgatccatcttgctt

SEQ ID NO: 132567 - DNA, 295 bp, Arabidopsis thaliana
cggctcgagcgatatttctccttcttcttcttagctctcttcctccattatcgtattatcgtagcttctccattcgaaggatttgatgctgaagaagacgacgttaccgacgattcctctcaccttcttcaccactcactccctccgcctcttctcactcagtctcactcatcactctccgatcccgatccggagccggaaccttcttccgccgaatgtaaatccgatctcatcactgaatcagatctcgagcatcaatccgattcgaaaactctctcgtctacaccatttgagt

SEQ ID NO: 132568 - DNA, 634 bp, Arabidopsis thaliana
  unsure (1)..(634): unsure at all n locations
tgccccccttccttagcttggaattcagctttagggttgggccaatggttttatctcatccacctgaatccattttccagatttgggccaattctgggttggctggcctccttccacccgttatacctagaaacgtgtccggcgtttttgacggcttcaatcacctcatttgaggtccgtcttgccattccaggaagtcaagatatcaatttccgaagtctattcttattagcaagtgatgacaagagatcagaagcttcacctcgtggttgattgtttgctgacaacttctttcatgcttttgttctcggaaaagatccagtgatgagacgagaaagattttgaagattaaattgaatcttttatctttattcggtttaatagcttggttgtttttataacccggagatgtctccggttgttcactaaaaggaaattgtgccggcttctgtctgcatattttgctgaaggggttgtgggtaccggtttactaggttatccggttcacccggtttgtaagattggtttaatgaataaaaatcccttgttctagatcgcnnnnnnnnnnnnnnnnnnnnnnnnnnnnnnnnnnnnnnnnnnnnnnnnnnnnnnnnnnnnnnnnnnnnnnnnnnnn

SEQ ID NO: 132569 - DNA, 471 bp, Arabidopsis thaliana
aggtgacctatagaagatcttgacgtcgcatgcacgcgtacgtaagctcggaattcggctcgagaaatggcgaacaggagttgacattatacacgttccatgtagaagtgcggataatttcaatatgtcgatggtcgtgcgtgatcgagcattctatcaagctaagaaacgaggtgtaagaatccgcggcattataatctcgaatccttcaaatcccatgggaagcctactgagcagagagaatctctatgcgcttttggactttgcccgtgagaggaacattcatattatatcaaacgaaatctttgctgggtcagtccacggagaagaaggagagtttgttagcatggctgaaatagttgacacggaagagaatatcgacagggaaagagttcatatcgtgtatgacctttcgaaagacttgtctttccgggggcttagattcgctgctatctactcgttcaacgagag

SEQ ID NO: 132570 - DNA, 514 bp, Arabidopsis thaliana
  unsure (1)..(514): unsure at all n locations
gttgtgcccttgtaaacggtttctttgcacttgggccgagcttctctcgtggactcggcaatctactgcagcggctccttcgctccttaggaaagtggtcgcgcagctcgtggtgtacaacctgtggaggcagaggaatcttgttcttcacagctctcttcgggtctcttgctcggtggtctttcgtttagttgatcgcgagctccgcaatgtcattttgtctaggaggcataagaggcgttggcgggagcttttgttgctttggatccgttagctttccccaaatcttctcaagcttattgtaaccttgtttttatttctttttgccttggttgctctactttggtaaactttttgtattaccttaactcattttatatgatatttacaagtttagcaaaaaaaaaaaaaaaaaaaaaaaaaaaaaaaaagggcggccgctctagaggatccaagcttacgtacgcgtgcagtcgacgtcataatctnnctatagtagtacctaaatcaatcg

SEQ ID NO: 132571 - DNA, 504 bp, Arabidopsis thaliana
catgcacgcctacgtaagcctcggaattccgcttcgagcagggattcaacgccaaagaggttcaaacctggactaaattcttcgccctttcatgcttgttagctatttttatagatcccctcttcttcttcctcataaaagtccaagagcaaaacaaatgtattatgattgattggcctgtgactaaagctgtgggagctgtaagaagtgtaacagatgttatattcactatgaacattctacttcagttccgattggcctatgtagctcgtgagtctacggtagttggagctggccagttagttagtcatcccaaaaaaattgcccttcattacctcaaaggaaagtgtttccttgacttgttcatagtgatgccacttccacagatattgataccgtggataatcccagcccatgtggggggctcccgggcgaaactatgccaaaaaccttctacgggctggaggtcttttccatacattccaaaggtaattagacttctac

SEQ ID NO: 132572 - DNA, 762 bp, Arabidopsis thaliana
  unsure (1)..(762): unsure at all n locations
tggtgaaggcagtccgaatgttccttgaagggaatcatttggctcagcccctaaagccatagaaaatcttcttgttgatgatatcgagatcaaagatgatgctcctgagagcaaacccagtttagaagaactcgatgcccttgaggaagtccgtctagcaatcgaatatattgtaatcccgggaggtgaaccagtggagcttcttcctagacgatcagatataatagttcggcagctagagctggtggagagttaccaactcgcagttgagaacctcggcactcaccttaatccgcgccttcagattcttcctcgccgatcaaccaagaagacgttgacatcttcatccccccaaaaatcagcagatggtagcatggggactacgggtactcgtcttcctttccttaaggattgacatgtctgacttcagcatatggactacagtacatactacataagttggggacactcttgaacattgtacattttactgtaagtcttggtaaataaactgtttatatcgttgatcatttctcatttgcaatttatgtgttaccaatgcaatgctctttcttatttacccgagggggtaactctgtaacattgagggtgagagtgtgcaatctgtagatatttccttacctcttaataaatagaaatttctcgatttacccccacaaggcaaggccgctctagaggatcccagcttncgtacgnnnnnnnnnnnnnnnnnnnnnnnnnnnnnnnnnnnnnaacggaatt

SEQ ID NO: 132573 - DNA, 373 bp, Arabidopsis thaliana
  unsure (1)..(373): unsure at all n locations
tccctgcagaaaaagcacaaaaatcataaaaccctagcaatggcgacccaaccggcgaaagagtctgttcaatgtttcggaaggaagaagacggcaacagcagtcacctactgcaaacggggctcgggcatgattaagctcaacggttcgccgatcgagctttatcagccagagatcctccgattcaagatcttcgagccagtccttctcctcgggaaacaccgtttcgccggagttgacatgaggatccgtgccacgggcggtggtaacacatctcgggtctacgcaatccgtcagagtatcgctaaggccctcgttgcttactaccagaagtacgttgatnagcagtcgaagaaggagatcaaggacatct

SEQ ID NO: 132574 - DNA, 538 bp, Arabidopsis thaliana
taggtgcaacttagaagagctatgacgtcgcatgcacgcgtacgtaagctcggaattcggctcgagcgccgccgttcatcaatctctccgtcgtgtttctgccactagctctccaccaaactttctctctcgcattagttgtttagggataaacatggcaggagaaggtgaagaagatgtacctagagatgctaagattgtgaaatctctgcttaagtcgatgggtgtagaagactacgagcctcgtgtgatacatcagtttctggagttatggtaccggtatgtggtcgaagtgttgacagatgctcaggtttactcagagcatgctagcaaacccaacattgactgtgatgatgtgaagctcgctattcaatccaaagttaatttcagcttctcacagcctcctccaagagaggttctgcttgagcttgctgcaagtaggaacaagatacctctgccaaaatcgatagcaggacccggtgttccactcccacctgaacaggacacattgctgagcccaaattatcagctcgtgata

SEQ ID NO: 132575 - DNA, 790 bp, Arabidopsis thaliana
  unsure (1)..(790): unsure at all n locations
ttaggtgcactatagaagagctatgacgtcgcacgcacgcgtacgtaagctcggaattcggctcgaggaggaaaagagtttctattgcaaacgagatcatcattaatccttctctattacttcttgatgaaccaacctctggtttagattccaccactgctcttagaaccattctgatgctccatgacatcgccgaggcggggaaaaccgtgatcacaacgatacatcagccctcgagtaggctcttccataggtttgacaagctgattctactaggaagaggaagtcttctctactttggaaaatcatcagaagctttagattacttctcttccattggatgctctcctcttatcgccatgaatcctgcagagttcttgctcgatcttgccaacggtaacatcaacgatatctctgtaccttctgagttagatgatagagttcaagttggcaattcaggtagagaaactcaaactggcaagccatctcctgctgctgttcatgagtatctagtggaggcctacgagactagggttgcagaacaggagaagaagaaactattggatcctgtgccactcgatgaagaagctaaggccaaaagtacgcgtctaaagcgccaatggggaacgtgctggtgggagcaatattgcatactattctgcagaggactcaaagaacggcgacacgaatacttcagttggttgcgtgttacgcaagttctttccacagctgtcattttaggtcttctctggtggcagtcggacattangactccaatgggactacaaga

SEQ ID NO: 132576 - DNA, 754 bp, Arabidopsis thaliana
  unsure (1)..(754): unsure at all n locations
nnnnnnnnnnnnnnnnnnnnnnnnnnnnnnnnnnnnnnnnnnnnnnnnnnnnnnnnnnnnnnnnnnnnnnnnnnnnnnnnnnnnnnnnnnnnnnnnnnnnnnnnnnnnnnnnnnttttttttggataataacttaacgcttagattaaagaaatcaaaatgggggagaagaatatacatttgtgtttcttttttatcttgtctcctttttatgattctctgatattacagcaacccaacaacacagctgagatgtaatctattctccaaacctcttaaatgatgtcccaatagcatgcaccagaaaaggagctttgcaaggtaatccctggatgtgtccacctttctaccagttccatcaccaccttctgtagtccttatgccaggattttgcatgaaatttgaagtagtctggtcttcgaagagcctctctaatacgttttggacaagctgggttcacaatctcttccacttccggggaaaacagttgagataactcagccaccatctcggggtctaaagaccggcaaataatcccaacaaatcattcctggtttccctttctcaaaattctatccccaaagntttcctnccttttgggaancnaaggcccccccttcaagggnagnaaggccaggcnggnaaaaggnggaaaanancaacggttaggggggaaaggtcccaaaaccgggggggcangcccnnaatccccaaaaaatcccnaacccancatnccntnncggcaaanaaanggc

SEQ ID NO: 132577 - DNA, 535 bp, Arabidopsis thaliana
taggtacaactactagaagatttatgacgtcgcatgcacgcgtacgtaagctcggaattcggctcgagggaaaggaagattaaacatgatatcttagcatttgcagaaagattttactctgctgatgaagtcaagtttttgtcaactttaccggaccctgaagttcagagaaaggaatttattaagttatggaccctaaaggaggcatatgtgaaagcattaggaaaaggcttttctgctgcgccttttaataccttcacaatccagtccaaggttggaacaaaaggagaatacaatctttgcaagatgactgaaatgactgcaagttcgctggaggagacaaacaaatgcgatggagaatggaagttttcccttttggaggtggatgattctcattatgctgcaatctgtattgaagatgatgaagctagtggaggagctcctatgagggggattgtccgaaaaaccatcccgtttgtagaagatgaacttatatctgaaagcaaacttctttagttaggggagccttaaacct

SEQ ID NO: 132578 - DNA, 652 bp, Arabidopsis thaliana
  unsure (1)..(652): unsure at all n locations
cnnnnnnnnnnnnnnnnnnnnnnnnnnnnnnnnnnnnnnnnnnnnnnnnnnnnnnnnnnnnnnnnnnnngactagtgagctcgtcgaccacgccgtccgggtaaactcattctcatgggagttatcaacaatccattacagtttctcactcctctgcttatgcttgggaggaaagtgataacggggagcttcatagggagcatgaaggagacagaggagatgcttgagttctgtaaagaaaagggtttgagttcgattatcgaagttgtgaagatggattatgttaacactgcgtttgagagactcgagaagaacgatgtgcgttataggttcgtcgttgatgtcgaaggaagcaatctcgacgcttgatatcatgaaactcgaggctttttatacatactcgaatactcgatttaaacactcttatgtttgtttgtgagctttttcattcgtgtgtcactatttttcatgagaaagtggtaaaagatataatgatattggatttctaatcatggatcaaataaaaaaaagggggggcccctgggnncccccgggattccgggccgggacctgnngggggaccatttccccaaagggggcnataagctggggaaacgggnaaaggtcccgggnaatttcccncccaanccca

SEQ ID NO: 132579 - DNA, 294 bp, Arabidopsis thaliana
gatggattatgttaacactgcgtttgagagactcgagaagaacgatgtgcgttataggttcgtcgttgatgtcgaaggaagcaatctcgacgcttgatatcatgaaactcgaggctttttatacatactcgaatactcgattttaacacatatatcatatgattcatgattagaaatccaatatcattatatcttttaccactttctcatgaaaaatagtgacacacgaatgaaaaagtggtaaaagatataatgatattggatttctaatcatgaatcatatgatatatgtgt

SEQ ID NO: 132580 - DNA, 304 bp, Arabidopsis thaliana
ctcgaactcactactcttcagccgtcgacgccgcatccgttccatttccgagaagccggagtacttcctccgccttctcttcctctgcctcgtctcggagaagatcttcggatttcactttcgacgatgattatagcgagctgcttagagctgcttccgttaggagtttaggtcataagaatgagattgacatgatcatacaacaacagcaacagcagcagcagcaacggcaggagaatcgcgttgcgatgggagcggttacggttaaaggcggtttgcctaagagctcgagtgttgggatgac

SEQ ID NO: 132581 - DNA, 328 bp, Arabidopsis thaliana
gaagtctctggttcctgatcccatgaaacaagagcctttagtaattgaaaacactccagatcctttagcaggggaacagacatggccaacagaggaagaaatggctgaggctgacaaaaatcagaagcagggcaggctaaagaagaagactttgccgcgagggacttcagaatatcaggctgcttggattgtggatgaaacagatgaagaggattccgataatggtgattctgatgataatggtatggtattggatagaggagaggattccaatcaagaaggaatgtatgaccaagaatttgaggatgacggaaaatcattgaacctg

SEQ ID NO: 132582 - DNA, 556 bp, Arabidopsis thaliana
atgttttaggtgcactatagaagagctatgacgtcgcacgcacgcgtacgtaagctcggaattcggctcgagctttagaagatgtctttgaagaacttttgcaagaagagattgtggatgaaactgatgaatatgttgacgtacataaaaggattcgagtagcagcagcagcggctgcttcatcaatagcgagagctccttcaagccggaagttgcttgcgcaaaagggaactggaggacaaaataagcaagggcagacgaataaagttcctggtcaggaacaagataaaatgcttggaactattaccgagccgattcgaagaaacaactgatgttgtgttcttgcttaaggaggcaaaaactctgttgcggtataaagaaagaaaacaaagaataaattataagatccaggttcttctgtatactttgatccatcacataaattatatatatataaaaatataaaaagtcagcagaagcaatggttcaacccgatttttgaagatgctgtgcttccttggattatacaaaatacctaccatttggaattactccg

SEQ ID NO: 132583 - DNA, 837 bp, Arabidopsis thaliana
  unsure (1)..(837): unsure at all n locations
taggtgacacttagaagagctatgacgtcgcatcgcacgcgtacgtaagctcggaattcggctcgagttcagatgctgagatttgggaggttcttggcaagtgtcaactaaaagaagtggttcaagaaaaagagaacggcttagattcattagttgtggaggatggatcaaattggagcatgggacagagacagttgttctgtttaggcagagcagttttgagaagaagcagagtattagtcctggacgaagccacggcatcgatagataatgcaacagatttgatacttcagaaaacaatcaggcgagaatttgcagattgcactgtcattacagttgctcaccgtatccctaccgttatggattgtacaatggttctctccatcagcgacggacggattgtggagtatgatgagccaatgaagttgatgaaggatgagaactctttgttcggaaagcttgtgaaagagtattggtctcattacaactcggctgactcacgttgatgatgatgataacaaactataatgtggaaaatgtagtactagtaattttattgtcattgccactagtaattttcattttggaaaatgaaaatgtaatactagtaatttagaacatgtaattgtttgatatactctcgagtaaaacaaaacatgagatcataatgatttgcggtgcaactaataataatcatcttgtaaaaaaaaaaaaaaaaaaaaaaaggnnnnnnnnnnnnnnnnnnnnnnnnnnnnnnnnnnnnnnnnnnnnnnnnnnnnnnnnnnnnnnnnnnnnnnnnnnnnnnnnnnnnnnnnnnnnnnnnnnnnnnnnnnnnnn

SEQ ID NO: 132584 - DNA, 523 bp, Arabidopsis thaliana
  unsure (1)..(523): unsure at all n locations
ggnnnnnnnnnnnnnnnnnnnnnnnnnnnnnnnnnnnnnnnnnnnnnnnnnnnnnnnnnnnnnnnnnnnnggctcgagcaagggctatcatcaacttgaagacacgacctctgcttctggtggtatgatgcttgttataacgttggcgatctgcaccttcatcgagcttctgtcaatgtggaatttgacgagacgagaagttcagctatgcaatatgttatcccctgaggctccccgtctctctcttgcaacttacaactggggacttgtttttgtagcaatgcttgtagacaacttcctatatccgatatcagctttccggtctcatttttctcaatccataaactggtctggaatcagataccacttgaaagatggaaagatattcacgatggagagacgaaaggatatgggaccaacaaagactgatttaggaggcaaacatttgtttggtaagaaaggagctcctcagaaagcttcattcttaagctcattgggaagaaatttggctcactggcgacaa

SEQ ID NO: 132585 - DNA, 371 bp, Arabidopsis thaliana
agaagacagtgaagaattggtttaatcggcggaatgagcttcgctaaagacgccggaaaaatcaattggtttcccgggcatatggctgcagctactcgcgccattcgtaaccgcctcaagctctccgatctcgttatcgaagttcgcgatgctcgtattcctctgtcatccgcgaacgaagatctacaatcccaaatgtcagctaagagacgtatcattgctctgaataagaaagatttagcaaaccctaatgttctcaataaatggactcgtcatttcgaatccagcaagcaagattgtattgccattaatgctcatagcagaagctctgtcatgaagctgcttgatctcgtggagttgaagctcaaaga

SEQ ID NO: 132586 - DNA, 416 bp, Arabidopsis thaliana
caccaataatgtcgacggagagaaatccgaacactttagtgaaaccttatagagaggattactttaaggagccgagttctgcagcggaaccaagcgagagttctcagaaagcgagtcagtttcaggagcaagagttagctcagggtcgtgggacggctaatgtggtgcctcaacctatgtgggcggttgcgccagggactacgaatggaggtagtgcgttctggatgcttccgatgagcggttcgggtgggcgggagcagatgcagcagcagcctggtcaccaaatgtgggcgtttaatccagggaattatccagttgggacaggacgagtagtaactgcaccaatggggtcaatgatgttgggaggtcaacagctaggattaggagtggcagagggcaacatggcggctgcaatg

SEQ ID NO: 132587 - DNA, 564 bp, Arabidopsis thaliana
actgtgactaccgcatgcacgcgtacgtaagctcggaattctgctcgagctgggtgaccgaaccgtcgtagcgagccgttccttgcggctaggtgccaatgattctcctccccaccgtatgaggaggctgctgatccggcggcggagttaaactcgccggaagatgtatctcggagaataactaggaccggtgccgtgggccgtgcaaaccgttggtactattccattactacacagcctacaggagctactcatataaagcattaaactttggcaaaaaagaggctcaaaaacaaagcaagcaggagaccagtcgttggtccaaaaaacaaaaatacccatttgctgattttgagttcccctccctttgctttttcagcattctcgagatctttgatgtggtcggagggatccaaaagaagtttaaagcaaagtaaaacaaagcaaacttgaggttattattggattatagctgatggtgatattccctcggtggataaaggtccaatacacaatcattaaaacaactggctgatgagtgatgagcgatgacaatagcaaatg

SEQ ID NO: 132588 - DNA, 559 bp, Arabidopsis thaliana
ctgcacgcctacgtaagctcggaattcttctctagacaggtcaagcccaaattctttctatatattaaaaaaaaatcaacacaaaggaaaaaaaaatgggttacgttttgggtagttttgccacttgcattggttctcatagcttacaaattcttattctcatccaaaacgcagggcttctatctcccgccaggaccaactcccgtttcctatcggcgagccatctcccacctagtgaaaccaccgggcccaccgtctcttccggccgcttcgctggaaaaatacggcgacatcttctcccctccgttaccggctctcgcccagtcggagttgatctctttatttgcctctctgaaaaaaaatccttccccggcaaaaacgacttattttaaacaaacaaaccgatttttttaccccgaaatacgttgcttaccattaccccactttagggaacccgcccttacggggaccatttggcttatctccgccgtttttggctcttaaaaaaccctttcctttataccggctaaccgaattctttttcggaacttaaaaaaaa

SEQ ID NO: 132589 - DNA, 819 bp, Arabidopsis thaliana
  unsure (1)..(819): unsure at all n locations
aaacggtaccatcatccaattgtaactcctcctccgccgccgccgtcgccgccgtctcttccagctcttccgttattcgatcatgaatttagaaatcgtagtctctcagagattgataaacttgatctgtctatgaatcacttgatgtttggtattgctggatcttcacagctttgggaacgtcgtaaggaacttgtgagattatggtggaaaccttctcagatgcgtggacatgtctggcttgaagagcaagtttctcctgaggaaggtgatgattctcttcctcctataattgtctctgaagacagctctcgttttcgttacactaatcctactggtcatccttctggacttcgaatctctcgtattgctatggagtcttttcgtctctctctccctaatgttcggtggtttgtncttggtgatgatgatactatcttcaatgttcataatcttcttgctgtgttaagcaagtatgatccttcggagatggtttatattggaaacccctcggagagccactctgctaactcttactttagtcataacatggcttttggaggcggtggcattgccattagctacccctttaagcggaagtctntnccggattcacggcggttgtctcgatagntacccgaagctatacggtagtgatgatcggctcaaggctgaacactgaacncggngtcctttnncagaagcctnggtttaccagtggggtttaagggaatnncatggcttttgcccccaaccattgaccattgctaataaanggtgagntgaaccnttnncggttncatagagtaacttaagggt

SEQ ID NO: 132590 - DNA, 739 bp, Arabidopsis thaliana
  unsure (1)..(739): unsure at all n locations
ggttttatcgacaatctgggatatccgaaaccggggaactaggaaggcaaaggccctgaaccagtgtgcaacacatgttcatcaactccatgtctgtttaccttgttctaaccacaagacaagacttctatacggaatgtcactagactttgctcctatattaaagaatcttccattcatggaacatctgtggagacatttcgctgaacaggtcttaaacgaagatctccggctagttttaggacaacaagaacggatgttaaacggagcaaacatatggaatttaccagttgcttatgacaagctcggagttcggtatagactatggaggaacgcagtagatcgtggcgatgataaactacctttctccggctaactgttattaaagaaatctaatggaagtttttgcagctccttattcaccagcaacctcagacaagtgtaggttattaatctggtttattctcaccgaagaaagagctttgccgagtaaaagatctggagtttgtggattcatctaaaaaaccgatgaaacaaagaacttttgcgtagataaaaggacaacatccactgtaaatccaaaggagatatattgttattcatttttccctgtgtacagttcactctctatgagaaattgaatatcagttttccacactaaaaaaaaaaaaaaagnnnnnnnnnnnnnnnnnnnnnnnnnnnnnnnnnnnnnnnnnnnnnnnnnnnnnnnnnnnnnnnn

SEQ ID NO: 132591 - DNA, 419 bp, Arabidopsis thaliana
  unsure (1)..(419): unsure at all n locations
tntnatcgngaaatcatcacgtgaagaacacgtgggtgaaagancgttacgagagcnatgaagaagatggagaggtgaacaaactcatcctaaaggaagatgaagaaactaaagatatggtgacatcaccgantggtgagaggatgatgttaacaagtaaggtgaggtatctcacctatggagctctcaaacatgacacggcggcttcggcagcttccggtggtggaggaagagccttgcctcatccgtcgaacaagtacaaccgtggccaccccaagtactacagatgcagaggttgaagtgaaaactctctgctgataaaataatttcgaattaattaattgtaataaccctatattgtataataaagtttgttgagtatgtatactccatgcaacgtgtgttatctatgtgcttgc

SEQ ID NO: 132592 - DNA, 674 bp, Arabidopsis thaliana
catgtaaacctgggaatgggtaaatcttaaagagatatctccgggagatatcatatgggaaggtgaagatcctgggatttctcgtaaaggaggacatcctgggcaaggccgtggaacaaaaaccatggctcgtggtggtcctgcaagcaatgcgggtggtagaggtaggggaagcatgaggatgcagcaacctaagacacagaatggcatcggaaagaaagctttaggcgaaatcgaaattctccacactgagacattgttaaaagaggtgggaaaagtttttgggtcagttaaccccaacccagcagaggtagagaaggcaaagagagtgctgagagatcatgaactagctcttatggatgccatcgcaaagcttgaagaaatatcagatggagaaagcggtaatatttgataggggctttctaaatctcctcagatgatggagccggagcattagagttgcaaaaaggtgttgtacatggtggtggcaaaatgtgaattgatgagggagatttggaaacttgtatggatggcaaaatgtagtttgtttaggacggggatttgatgacatttgtgtaccacataactccaaaaactggatttggaaattagggttcttaagcattgtaaaatccataagacttgatataaatgtagaatgtttcagagacgac

SEQ ID NO: 132593 - DNA, 725 bp, Arabidopsis thaliana
  unsure (1)..(725): unsure at all n locations
tcgttnnnnnnnnnnnnnnnnnnnnnnnnnnnnnnnnnnnnnnnnnnnnnnnnnnnnnnnnnnnnnnnnnnncttttttttttttttttgatcaaactccgcgtttttctttttacctcaaaaatcactctttcaactacaaagtcaaaccaaaaataaaaatgacatttatatccaacaatttgttctctgtaaatcaaaagacaagatcctttgtatgtttcttacagcattctatcctgaagatcactgaatatactagaggcaaatgttcccagcttattctttgtttcctcagctaagttagcaatagatgacatatcttgctgcgcctggaaagaaattcggttgatgagatcgcttgcagtgatatcgatgttggaatcatctggtccgtggccaaaaagatcagaacttgaaatagctgctgaacccgagaacttctgaagggtagcttttgagtcaagatcggcatctctgttctgatttccgaaaaattgggcagaggaaatcgatttggcgtttgaaaacttctttcttgcttcatctgtttcttcaacctgagctttggatgagcttgagcttgacttcttggggaaagcactgtccattccaaattcattaaagaaatttgatgactttggtggagcaacatggctaagcacccgtgtgccactttgcccaccagattgctcatcatcaaagtactcaaatcgagaggcaaa

SEQ ID NO: 132594 - DNA, 481 bp, Arabidopsis thaliana
gcacgcgtacgtaagcttggatcctctagagcgtccgccctttgggtttttttttttttttttttttttttttttggagacaaaaaagaatttattaaaaatctaagtttaattgtaaaaaataacagcccaacacagatacaatataatctgggagaagataaaagtaccaaaaggtaaaatctatgaataactctaatttgtggcctaacaacatataacaatgaaccaagaagttccaagtctttggcctggagtctccctagacccaaataagacctcatttattggtaactatagcatgtcgaactagtggtagagttctaaacctcctcaggaacaaatagctcacataggagataattcataattggaatttttacaaaggttggccattaatccaccttcgaaacatgataaaactctcttgtggtttattctccggtgtgtgcccacttcctttgacagtaacaaatgtcat

SEQ ID NO: 132595 - DNA, 590 bp, Arabidopsis thaliana
gtgacactatagaagagctttgacgtcgcatcaacgcgtacgtaagcttggatcctctagagcggctgccctttgggttttaatctctttttttttttttttactttttttttttttccctaatcacgtacgtgacttcaacgaaattttatagcatagattcactaaatcactgaattacagatattttctttcatacagaattaaagaaaaaagggttcaatcacactatcacacgtcgcttacgttaactaacggcggtggtgagctccggcggcgatcggagctggaggtggtttgcattggtagcatttggcaaagaggccaaaagtatcaatttgcctgatgaagttggtcatactggcccatccgccaaacccgaacccgagaactaggacccaaaccactatgaaagcgtttatcacgtaaactccagcccagctagggataaaaaacgggggtttctccgccgcgttccggcgggccgaggccgggccgtacgttaacattggtggcttaagccggggttattttgacggggaagggaccaaggaagggtccactgcccagtttattgggccccaaaaggg

SEQ ID NO: 132596 - DNA, 376 bp, Arabidopsis thaliana
  unsure (1)..(376): unsure at all n locations
nnnnnnnnnnnnnnnnnnnnnnnnnnnngaacaaacataatttttcctattgggtattcaagattctggttatttttcttacacattaatagatacatccatttgaatatctccatctcctctgtatcaatctcaaatctctggccactttattggctaaactctgtagatatacaatatgatgctgataagacccgatttggcttttctgctttctcattccttagagggatcaatggttgtagtagaactcgaagaggtctcaatgacagattccgagattctagcttctgatttctcgttcgagtaagtcgaaagtatagtgacccaaataagctccacgcaatctatccagagaagtcgttgttctactggg

SEQ ID NO: 132597 - DNA, 977 bp, Arabidopsis thaliana
  unsure (1)..(977): unsure at all n locations
gtgcactatagaagactttgacgtggcataccacgcgtacgtaagctcggaattcggctcgagcatcctccttcggctccggccccggcatcgtcgtcgtcccaactcccgccacaacagttcccaccaccgacttccccggtaccaccatcacttccaactccaccttcattatcatcggacctccaccaccgttcccagctcctccccggagcatcgaccttactcctctcaaactaatcttcgtcgtcatcgccttcgtcgccgttcccgctttagtttacgctctcttcttcaacggcccatgttcttcctcccgccgcaactcctcttcttcccgcaccagctcttcctccgacgatacacctcacgccaccgtcgacaccccgccgatcaccgagaccaccgtaacttcggaatccggagggaaattccacaaagatacacattctaaagagattggaaacgagtgctccgtgtgtctcatggtgttcaccgacagcgatgaactccgccaactaagcgagggtaaacacgcgttccacgtgttatgtattgagacgtggcttaaggatcatcctaattgtcccatttgtcgaactgacgtctccgttaaacaccaaaccgaagctcccaacgttcccgttaccgttaacggaaacgtgaatcgcagcggcggaaaccgtcgcgtttcggccactagtagagatgacgattggcgtcaaggtttacctgatgcttctagtttagtttgaattttttatttaataaaatttatttctctgtttttttccacagatttttaaagatatttttgtaaacaaattacgtcaatttcgaaaaaattatgtccgttnnnnnnnnnnnnnnnnnnnnnnnnnnnnnnnnnnnnnnnnnnnnnnnnnnnnnnnnnnnnnnnnnnnnnnnnnnnnnnnnnnnnnnnnnnnnnnnnnnnnnnnnnnnnnnnnnnnnnnnnn

SEQ ID NO: 132598 - DNA, 381 bp, Arabidopsis thaliana
ctgggaaaaatcaaaatctgctattacggatctttaatcggaaaatgggtttgacgaatttcatattgacggtggccggagtaggcgccgtggtgatgctactgaggagcgacgtgaagcaatctgtgaccgtcctcaggcgtaacgtcaagcacatccgccactggctcgaagaagaatcctccgccgcctcttccaaggcagctgagtccataaaaccaaaggaaattgaggtaaaggttccgaagaaggacattccaaaagggaaggattagtgtgtttctatgtatacacgaagaagggtctttgtaagagtcggatttatgactttggtttcaacacttaacatttaagcattcttgcgagtgaaaacataataat

SEQ ID NO: 132599 - DNA, 544 bp, Arabidopsis thaliana
  unsure (1)..(544): unsure at all n locations
gttaccaaatctctttttgtaaaattggagaaaatttgcaaatattttacaaatacaaaggggaaaactctaataatgacaacgtaagaatgtctagtttttggtgtgcaaaggaaggaagaaagatactacttgtctccgccaccgaacattcccatcatgtccttgccggaacccatctgcttcattagactctgcagaccgcccatgccgccaatctgcttgagcatctgaggtgggaggaccttgctcatgtgctgtgcgttcatgtttctcgagagtgcactcatatctccattctttgggatcttgagtcctttcatcttgctccatatcttcgctagcctcttgtactcttccaacatctccatcacttctcttacttgcctccctgaccctcttgctatccgcatcatccgggactcgttaaacaccttggggtttgagcggcccggctcatctggcatagatccacatagcangaccggttanttcggcngggttnttcaangcctcggaaattaagncaatcaggggatggaac

SEQ ID NO: 132600 - DNA, 662 bp, Arabidopsis thaliana
  unsure (1)..(662): unsure at all n locations
atattgtattggtcaatttatcataaaggattatcttattcaagagagattcagagttgatatacaatggataacaaagttacagaagcttccttattatgaaaccttaatatgttcttagaaaagcaaagattgttttcagagattgaacataactttgatggcattgctcccacgagcactggtttcaaaggcatcttccacttccttttgagagaaaccgaatctgtgggttatgagtggctttacatcaatcttaccacttgtcaggaactcaagacacaatggccatgtgttcttgtacctgaacacacccaccacatctacctcccttgcagctgcaggagtgagagggacagtcattataccgtgacccattccgacaagacagactttaccgccacaacgagtggctgctaatgctgtcgacatgggttttgttaaaanccgnacagtcgnatgttaacatccgatggttgancccatagctttctgnaatctggttcaacctcagaancaacatccncnaaggttggtggcacttgganaattcatntggggcgggctggtttgcangggtaaagggtntcataacatcncaaaacaatntnggggcctgaagccgggagcacattgacaggganggncagcccntttccaaa

SEQ ID NO: 132601 - DNA, 525 bp, Arabidopsis thaliana
  unsure (1)..(525): unsure at all n locations
agagaactttttcttaacattaatctcggatgcatatgttttgaaatggtttgaaaataaaagtgattcagttcctgaaacatttaaaagcggtatagtgccatactaaaaaaattaaccgcagaaaccgatccagagaccgaaaagacacgtccttctaggcggtgttttctgcagatgggttttcatgaacaaacgtgccaactgatttgaaccatcgcagtaggttacggtgatcctttacatagagccatgcctgaagaaaggggaagagactctcgttcacacctcgttcctctaggaatccatggaatacatctctcatcttctcatcgagctcttcaaaagaagggcctgtgtattgagtaggntcatcagacatctccaaagcctcaagttttggcctcatgggaacagaatgaataccaatgcatcaggggaaggccccaaaggaatgcaagaatcaggtgatttngctttgtnnagcacatgaggncaactggtgatccccatcggcttttnntc

SEQ ID NO: 132602 - DNA, 727 bp, Arabidopsis thaliana
  unsure (1)..(727): unsure at all n locations
nnnnnnnnnnnnnnnnnnnnnnnnnnnnnnnnnnnnnnnnnnnnnnnnnnnnnnnnnnnnnnnnnnnnnnnnnnnnnnnnnnnnnnnnnnnnnnnnnnnnnnnnnnnnnnnnnnngaaaaaaaaaaaatctctatattatttacattatcgcctaaattcaaacctcacttttcacatacagaatatgtacatatctaacaaaagggtaaaaatagtaacaaaagtgaaaaggtagaaaatagtaaaaaagagttaaagaactttttcatcatcatcatcttcttccaccgtcgttattgccaccgccggctccagggaaatttacagaaacccgacccggattcaattcgggtttggacccgtttgaaatctgagtaaggacaagggatagtgattccaccttcttgagaaaacccaaattcttcttcagcctctctaagaagctcaccaaacagagggtggttaaagtaaacgataggccccaaaactctctgaaagtcgccgtcttttttaccgatgtaaaccgccgggtgacctttcggaaccgggtcgggcttttctcgaaggggttcttgaccaattggtatgtaccctgaattggagcatttagacccaataaacctggcgctgggggatgggagacttccaccccaacttatgagttttgggatggcttttggcttggaaaccgggcgggttgggcttaaccgggtgttttttggacga

SEQ ID NO: 132603 - DNA, 555 bp, Arabidopsis thaliana
  unsure (1)..(555): unsure at all n locations
aaagaaagaaaaggtgtctctatcggattaaaccatctcaaatgttcataaacttctcattggatcataattgtaccactacaacaacctcggtgtctgacactgtgagctccaacaacagtcttaaaacatagacatatccggaggagctccatacatactcttccatgaatacggtatctgccatttcccaccttcttccccatggaacttgtcaggagtcagacccataagcttagatgaagcctcagctagaagaaatgcttcaggaatgttgtctccttcagaacagtaacatagcaggcatgtcatcttcaagcctcttgccttaaaagctgagaaaagagctgcaaatgggcaagcttgggatagtagncangncttcaagttcatcttctgaaggaacgcagctcttctanaatggtcttttccaaagcagggtaagggacttccaanatnttccttcggancaacncgggatntccaacccagccttcaagggcanctccncagtcangagnaganacnggggncgaaccagagnccttgngcaat

SEQ ID NO: 132604 - DNA, 665 bp, Arabidopsis thaliana
tctgttggaccctcaggtcctataggagtcatcctaaaccgtccatctctgatgtctattaaggagaccaagtcaacgatattagacatggcaggaacgttttcagacaaaagactcttctttggtggacctttggaagaagggttgttcttggtgagtccaaggagtggtggagacaacgaggttggtaagagcggagtattcagacaagtgatgaaaggattgtactatggaacgagagagagtgtaggattggctgcagagatggtgaagaggaatttggttggaagaagtgagcttagattctttgatgggtattgtggttgggaaaaagagcagttaaaagcagagatcttgggagggtattggactgttgctgcttgtagctccactgttgttgagcttggttcagctgtccaaagtcatggtctttgggatgaggttcttgggcttattgggcctcaaacgggctctgttatctaaaccttgtttttgtactgcatttcactaatggtttatggtatgactatgtgtatggtttatcaatgtactgtatgtattaaacatccatcactaatttatatttgtttgtttctcgtttaaaaaaaaaaaaaaaagggcggccgctctagaggatccaagcttacgtacgcgtacatgcgacg

SEQ ID NO: 132605 - DNA, 835 bp, Arabidopsis thaliana
acgaccgactatggggttaagctggtacgcccgcaggtaccggtccggaattcccgggtcgacccacgcgtacgttcatcatggtgtgatgcaaatccgtgggaaccgccaatattcttgtacgctcaagtttaaggagcaatccattcttgagagaaatccccaccaggtaaacggttttgtagaagacgtagcagggcaaaaagcagcaacaatatttggtaaatgggatgatagcctttactatgttgctggtgatggaatcaacaagtcgaaagtcagtgatcctgcatcaaatgcctcgttactgtggaaaaggaccaagccaccgcctaatgtaactagatacaacttaacctcatttgccattactctgaacgagctaacacctgggttacaggagatacttcctcccacagactctaggctcagaccagatcaacggcatcttgagaatggtgaatatgagaaggcgaacttagagaaacaacggttagaaagaaggcaaagaatgtcgcggcaacttcaagaaagcggttggagaccgagatggtttgagagacaaggtgaaagcgacaccttcaagtacacgggtggttattggggagcacgagggcattggaactgggatgattgccccgacatcttcggggagttcacagaagagctagcggacgccgcttagagaagctccttgacttctttccagaaagatcttcatttcggaccctatttggaggttgttttacaccagcaggcaccccacatttttctgacccatgggggtttaagtttttttgcgtttgaaaaggaggggcattaagaaccaaaattt

SEQ ID NO: 132606 - DNA, 1094 bp, Arabidopsis thaliana
ccgtttgcagtaccggtccggaattcccgggtcgacccacgcgtccgatcatcatggtgtgatgcaaatccgtgggaaccgccttatattcttgtacgctcaagtttaaggagcaatccattcttgagagaaatccccaccaggtaaacggttttgtagaagacgtagcagggcaaaaagcagcaacaatatttggtaaatgggatgatagcctttactatgttgctggtgatggaatcaacaagtcgaaagtcagtgatcctgcatcaaatgcctcgttactgtggaaaaggaccaagccaccgcctaatgtaactagatacaacttaacctcatttgccattactctgaacgagctaacacctgggttacaggagatacttcctcccacagactctaggctcagaccagatcaacggcatcttgagaatggtgaatatgagaaggcgaacttagagaaacaccggttagaaagaaggcaaagaatgtcgcggcaacttcaagaaagcggttggagaccgagatggtttgagagacaaggtgaaagcgacaccttcaagtacacgggtggttattgcgaagcacgagggcataggaactgggatgattgccccgacatcttcggggagttcacagaagagctagcggacgccgcttagaaagcttcttgacttcattccagaagatcttcattcggaccatattggagttgtttacacggcagcacccatctttcgaccatggtttcagttttctgcttgaaagagggcatagaacaaatatcagaaggaggctttggttctatctcctaaaagacgtcctccttttgagtcttagagtgtcactgtaaagtcttatatccttctcttcaattctctatctccctcgtcaaatagttgagattaatgtagtaggttggtcttacattggacaagttccttgtaatccatttgtatttaattattaaaaaaatatatgtcagcaataaaaataaatcccgacaaagactctttcacaataaaaaaaaaaaaaaaaaaaaagggcggccgctctagaggatccaagcttacgtacgcgtgcatgcgaagtaatag

SEQ ID NO: 132607 - DNA, 520 bp, Arabidopsis thaliana
  unsure (1)..(520): unsure at all n locations
nnnnnnnnnnnnnnnnnnnnnnnnnnnnnnnnnnnnnnnnnnnnnnnnnnnnnnnnnnnnctcgtgcggctcgagagtttcactttgagattaggtcatttacccttttaagggtttctctcctactttcttgattctcttcattcccaagactcaaaacctagcaaacttggacatttggattgagtgtctctagtccgggtctcatttgggtggattctttctggtgaaatctttcttgtgagagttttgtattgggagaaagagataatcaaatgccggaggaagatttggtagaactgaaattccggttatatgacggttcagatgttggcccgtttcagtactctccaaccgccacagtgtcaatgcttaaggagagaattgtctctgaatggcctaaagacaagaagattgttccaaaatcagctagtgacatcaagttgataaatgctggtaagattttggagaatggtaaaactgttgcacagtgtaaagctccatttgatgatctccctaa

SEQ ID NO: 132608 - DNA, 596 bp, Arabidopsis thaliana
aattggtgattcaatacaaacgaaaacaagagtttcctatggtgaaagaaggaatggtcatgaccgagaagccaaagaggaatctcataagctctaatgagaagcgatacaaaggaataaggatgaggaagtggggcaagtgggtggctgagataagagagcctaataaacgatcacggatctggcttggttcatacaaaaccgccgttgccgcggcacgggcctacgataccgctgtgttttacttacgtggtccttcggcgagactcaatttccctgaagaggtctttaaggatggaaacggcggtgaaggcttaggaggagatatgtctccgacgttgatacggaagaaggcggctgaggtgggagctagagtcgacgcagagttgcggttagagaataggatggttgagaacttagacatgaataagttgccggaggcatatggattgtaatttatagtttggtagtttataggttggagattgcccggagacagagtcaaacagaggttctctgactcatatgaggcataatatagttaatatagtaatttttgttttgagcatagtaattatgtcataacatggatcctg

SEQ ID NO: 132609 - DNA, 498 bp, Arabidopsis thaliana
acagagtttgcttttaaacaaagagagaaagaaaaaaaagctcaaagaactcagaagaagaagaaagatgtatcatcaagaacaacatcctgtcggtgctcctcctccccaagggtatccacctaaggacggttatcctccggccggttatcctccagccggttatccaccgccaggatatgctcagggataccctgcacaaggttatcctccgccgcagtactctcaagctccgcagcagaagcaaaacgccggtatgcttgaaggatgtttggctgcgctctgttgttgctgtctcttggatgcatgtttctgatcggaggataattatatacgttgcctcagtcaacttttatttcctcatatatgttatgtaatgttcaacaatctttcttctgttgttatcttctttcaattcgaattttggtatcttatgttttattgactccgaccataattatctctctctttcataatccaatcacacgaattcgaaaa

SEQ ID NO: 132610 - DNA, 541 bp, Arabidopsis thaliana
ctctcttcggaatctgaaaagccataaatcagcagaaaaaaatcttaaggatcggaaattttataatcggatgaatagagtgattagtcagttttccggtaagttgatgaaggagaagagtgttaccggtgtaagcggcggagatacgactttaagatctgccgtcaaagaatcggtctcgtctccacagagtgcgtcgtcgtcgtcgtcggtgaggaggcttaaaggagatctggaatcgagtcgatttggtgcggcggcgagtgagaggctgaggcaagcggaggaatctttgaggacggtgatgtttctgagctgttggggatcttgttagatctggttgagaaaataatagatgagaaaacgaaaccaaaacggtttctgtttgtgtttttgagttttggatttttgttttctctgtgaatagttttttttttttttcgttttctttgtactttgtgttttatgtaaatcatgtataaaatgaaaagtaaatcaatgaagataatggtttccttcccccaaaaaaaaaccttttttt

SEQ ID NO: 132611 - DNA, 776 bp, Arabidopsis thaliana
  unsure (1)..(776): unsure at all n locations
tgggatatcgtttannnnnnnnnnnnnnnnnnnnnnnnnnnnnnnnnnnnnnnnnnnnnnnnnnnnnnnnnnnnnnnnnnnnnnnctttttttttttttttgattcatagaaaagtgttactgatgaaaacttacacattacaaggtttttttaaatagtctctaacagatctgaagaatccaatagagacttataagttgtttgttgtagaagtctgcaaaaatggtgaagtgctaggatcaaaaacgcagaactgtgataacaaatgtttaagaaaagaaaagagaaaatcttttgcaaacaaaaatataaaattcttgtgtaaacattcgccctatgatgttgaggcaaaatcttctgttgtcttttggcgtttgagctctggctcaccctcgatgatatcttcttcgggctcttcttcttcttcttcttcttcttcgtctcctgcttctttatgattgttattgagatgaccgtttactgcttcatgaccaagaagccgatacatgtttgcttgtgattgtacgacctgcccttatcttgggncccccaatgcttccctggggttgggagaaaccggggnacttccttccgcctgtgcttnacnaagcgaaccgnacgtggcgcggaaaaggccagncctgnatgagatggggcctttaangnagnannccaacttccaaggatggncaagggnattccgggttaatgggngggggttttccncccaganccnggtnangncccaagaaacccccantngggngccagggtt

SEQ ID NO: 132612 - DNA, 274 bp, Arabidopsis thaliana
ctgtaccacaaacttatttttaagcaatatattggatatacaaactatttttaatcgagcccaccacatgttcaagcaaatcacatggagtgattccagcataacacaaggaatattatatgaaacatataagcacgaaactctcaaaactagaagatgaaaacactctgggttctttttttgttgtactcaaattacaaataataccaacataaagattcttttattactaagaactaacaagcataaattgcgatgattatttggtaggact

SEQ ID NO: 132613 - DNA, 402 bp, Arabidopsis thaliana
  unsure (1)..(402): unsure at all n locations
agttcgcggtaacaaaactcttatctttataaaggatgctccaaacaagagtttttccatcacagctcaagagaaacaactctaatagactagctttataacgccatagatgaaggttcctttgaacttgtgaagaaaatgccgaatatgaagcggtagtttatgtttatatggtcttttagcaaataccacagagaatcaaaacttaactctttcagattttttgacttgggacttgttgttgttctcacattatggtacatgagcaaaagcttctctgtggggcttcttccttttcganttttttctctggtcttgcttttgttggananagttgcacnacnacatgcattgtaatgacggatttagggagatcattaaatggagctttacactgtgcaa

SEQ ID NO: 132614 - DNA, 762 bp, Arabidopsis thaliana
  unsure (1)..(762): unsure at all n locations
tgattgacgttnnnnnnnnnnnnnncttgacgtcgcatgcacgcgtacgtaagcttggatcctctagagcggccgcccttttttttttttttttttggttatttcttatccaactagtaatgtacaagaaattattttcatatgacaaatttcccactgtacgaaatcaaatatagcaaacaagaatcatcatttcttaaaagaaaaatctcttaagcttttgctagtccttataggaggaagttccacagatgcaagaacaggttctgagctttcatgcgcaagagaatgatgtgtggaagtttcagcttcttggtgttgagactcaggatcccaaaattggtgttcatgatgaccatgaccagagtatctaggagaaggagaacttgggtaattttcaacgctccggttattgaaattgtgaaggagatggattggagatgagccatgtgttggtgtggttggacggctagagaaaggtgtgttggatcccgagtgtcttccgtgtttcgtctcgttctttgcagtgtgatgccacttctttaatgccgtggctactctatcgttgaatactggtggcttcattttactacccatctgagtaacaagtgcatagagtggaagagtcacatagctgcaaagtatctgcacaacagctccaactacaaggtctaatgaccacatctgccgtgctttcatggaaaacaattattgagattgaattcatacgtactccaagcaaagaatgcaagttgaaatgca

SEQ ID NO: 132615 - DNA, 546 bp, Arabidopsis thaliana
  unsure (1)..(546): unsure at all n locations
nnnnnnnnnnnnnnnnacgaccttttttttttttttttgttatgtgtaattcgggaaactcttaagcattgcctgtgtagttcttttcatgtatccatatagatatggttatttcttatccaactagtaatgtacaagaaattattttcatatgacaaatttcccactgtacgaaatcaaatatagcaaacaagaatcatcatttcttaaaagaaaaatctcttaagcttttgctagtccttataggaggaagttccacagatgcaagaacaggttctgagctttcatgcgcaagagaatgatgtgtggaagtttcagcttcttggtgttgagactcaggatcccaaaattggtgttcatgatgaccatgaccagagtatctaggagaaggagaacttgggtaattttcaacgctccggttattgaaattgtgaaggagatggattggagatgagccatgtgttggtgtggttggacggctagagaaaggtgtgttggatcccgagtgtcttccgtgtttcgtctcgttctttgcagtgtgatgcc

SEQ ID NO: 132616 - DNA, 532 bp, Arabidopsis thaliana
  unsure (1)..(532): unsure at all n locations
ttggttttttttttttttacatacaaaagcagaatcttcatataaagatattaaaaggtaacaaaaggttgtggtctttaaatgtaggacaagttatatttgaatctgaacaactcaggggcaacacagagtgaatcaaaagttacattactacactcactaggaaaagcagcagtttcatgttaagacgagcagttatgaaacattggacacacagagttcacaagaaacttcatctgcgtggaacagagagatgaggaggcaaaagaatttttaacgttcgaggtttttcaagccagacaatttttgaatctcctcgatgatgagctccttttcctcttcgaattgatcatcttcggaacctttaccaggggacaaatcgtggaggagtccgagtaatttcncatgggttcctggccaatatgatcctcactcctgcggctaataaggtcgcacaaagtcttaatatnnggaggcgnnccngaatgtctgccgggcctcaaagggcatatgcttccanacgactncnntt

SEQ ID NO: 132617 - DNA, 357 bp, Arabidopsis thaliana
acgacctttttttttttttttaatcaatctccacaaagatgagaccaaactcaagaatcctgaatactgatgtataatactaatacaaccctcccagcaatttgttaaagtttaacacagaaatggattgaaccaagctaagcttataaatatatatccactggcttgtgatcttgtagctttttcttggactttcttatgaagaagaacccactatgggcaagtttggtgcagttgcccattcagtccaagacccatcatagattgccacattagtttttcccagacgataaagtcccaatgccaaaatacaagctgttacaccggttccacatgaggccgcaatcggactgtcca

SEQ ID NO: 132618 - DNA, 494 bp, Arabidopsis thaliana
atcaatgtttggtctatccagagagacccaaatgtgtgggagtatccgactgagtttcgtcccgagaggtttcttgataagaagtcttgtgatttcactggaactgattatagctatcttccgtttggatctggcaggagaatttgcgcaggtatagcactcgccgagaggatgattttgtacactctcgcgacgctattgcattcgtttgattggaagataccggaaggccacattttggatttgaaagagaagtttgggattgtcttgaagctcaagtcccctcttgttgccttgcccgttccgaggttgtccaattcgaatctttatttataaacgctatactcgttacttttccttaaaaaaaggaaaaagatttttatattgaacatttttatgatagacaaaaataacgcctggttttatttagttttttcttttctgaagtttttaatcatcatataagttagtaatgagaatcatacatcggtttc

SEQ ID NO: 132619 - DNA, 476 bp, Arabidopsis thaliana
gtaagctcggaattcggctcgattttctagatcgctaaccccgcctttttttttttttttcactgtctcctctctcttctttgacaaccactttgtcgtcatctaatttgcggtttgtagtgtcgactgatttagattcaccgatgtcttgatgatcttccatgttatctttctcggtcgaggttatttacattttccatcgagaaatttatgttctcttggcaatcaccgtctagtaaccgtgaatcttgtttcaattgcggtgttgatggcgctggatctttctcctcgagtggcatggcgggctcaagatgaagcatcgagacaacggattctttcactggcttaagtgatatcgaaacattacttccaccatcattgaatgccttatgaacaacatgctgccaaaagttctttaatttctccggggagagccggtttttgaggaacttaacttgaccaagcgctatgctttt

SEQ ID NO: 132620 - DNA, 797 bp, Arabidopsis thaliana
cctttagaagagctaccacgtggcatgcacgcgtacgtaagcttggatcctgtagagcggccgcccttcgttttttttttttgcactggtattttatcgatattagacagaaaactttcaacagcgaaatacaaaacaagagagagaaaactaaaagacactcatctacaactcaaaatgcgcaaaagaagcagttaaaaaaggcgttgtcaccccgcaagggttaagatttggtatttcatcctaggcctcgaacccttacatctccgactaacgccggtataagacggtttgctactactcccgagccccgtttagaaccagcttttctggttctggacgtaggaggcaacactttgtgtgggacatataagggaataggcaaatgaagtttactcccagaagccaaagcagggaacccaacagcagggattccaacaagagcacagcagactcctgcttcgacatcatggtagtattattgccattacccttttgcaaacagtaacgtagagactggttttcagcaacgaagcactcaagcatacgtcctagtctcaagcattctctttcgagatacttactcttcttctctaaatcttgtacatattccttcttcctctctctcgatctaaccgccgcatctctatttcttactctccttcttcgttgttgagccacagcatcatcggctccttcttcggcatcatcaatcatgaatctcgctaccagaatcattagactttttctcaacaaccaaatccgaattcttcttcccggaatcataagcgggggcg

SEQ ID NO: 132621 - DNA, 596 bp, Arabidopsis thaliana
  unsure (1)..(596): unsure at all n locations
acctgaagttatgcctcaaaatcaacattttaaaggcagaagcattattagatagatatcatccataaccataagacccacattcactgttaacttatcgatattagacagaaaactttcaacagcgaaatacaaaacaagagagagaaaactaaaagacactcatctacaactcaaaatgcgcaaaagaagcagttaaaaaaggcgttgtcacgccgcaagggttaagatttggtatttcatcctaggcctcgaacccttacatctccgactaacgccggtataagacggtttgctactactcccgagcccgtttagaaccagcttttctggttctggacgtaggaggcaacactttgtgtgggacatataagggaataggcaaatgangtttactcccagaagccaaagcaggggaacccaacagcagggattccaacaagagcacagcagactcctgcttcgacatcatggtagtattattgccattaccctttgcaaacagtaacgagagcctgggtttcagaacgagcnctcaaggatacgcctagcncaagattccttcgggactaccctctcccaancctggaantcct

SEQ ID NO: 132622 - DNA, 642 bp, Arabidopsis thaliana
  unsure (1)..(642): unsure at all n locations
aaagaaaatatccatttagagataactacaacataacatatgaccaaagcataggattgaaacaaataaaagaaaaggaaactagtctacgcctatttcttgcttcatttaagagaattgtaatagagatacaaggagactacaactgcagcttcattttattcataatactctgatttatatatcaatacttgttattttaataatgcttggtgactgtagatgattatggccgtctctacctttcaattcaaggcttctcttcatctgaattagaacgaggtccaggcaccgaatccacgaaaaactcctctatgtcctcttgttcaggagaatccaggaaaatctctgaatcagatgggaagaaatggagagcctgggatagtttcctaaggctcctaaaatctgcaacatacatatctcccagatttgacnaatctgcggngggatccagaaaggctaaagtcccaggggtctgatccaatgaccgnggggatccctgggatnccgggcccntcnccancnggccaacggcagntgngatgccgnaccaggacggaggggccattaccaacccgantgctgagggcaatggaagggcccttgcgcaanagngggnggacatcagggnncnctgtgggt

SEQ ID NO: 132623 - DNA, 381 bp, Arabidopsis thaliana
tttgtcataataattcttgtgattcagaccaataaataaaacaaaaaccagtagctaatcacctccacaaagacggagcatgtgggaagttatacataatcaatctctcaaggtcaagcttgagattagtacataatatatacaaacacattctttgaacaacatgcacaaaaagcttcaccaatggtcaaatctcaaagaaaaattataagaagaagactcccacagtccaaagctttacatttcatagtttagttgcaaagcaatgtgtcccgcgttgcattcccagtagtcgcgttaactccatccgcaactttgcaagggtatactcgctgatcatctcttagagggacatcagtgaagtctgcgcctgtaatgttt

SEQ ID NO: 132624 - DNA, 482 bp, Arabidopsis thaliana
  unsure (1)..(482): unsure at all n locations
cttgacaaacacatcttttataagggataacaagagtagaactattacatgaatatgtatgtaccataaattcatcaccatctttgtgttggatagccaaatttgttctaaactctcaacctcttcacactaaagtttctctcttcctcctcaaagagataactacaacatttctttgatgaaatcaaggctaagtgtgtccttaacgatgagaaacaatccaaggaatatcacaagcatgatccctgaagacattatcccttgttctacctctacaggaagcttcttccctcctctaacagcttccaacaatatcaatgccaatgttccaccgtcaagagccggtaacggaaagagattgatcaccgcaagnttgatattcagcacgcgcgaattggtaaagcccgccgtattgactggcactctgnnccactgnataattgcaaggctgnacttactgcggctgggagtaagatgtgttt

SEQ ID NO: 132625 - DNA, 532 bp, Arabidopsis thaliana
aggtgacttatagaagagctttgacgtcgcatgcacgcgtacgtaagcttggatcctctagagcggcctcccttttttttttttttttaacataaggagattatatatatatcatttgattggttaacatcacaatcaaacatattaaaacgtgatctaacccaaattgaaaagctacaaaaagaaaattaaaccgtgaaaatatcctcctttttcgtcttaacatttccaagctgagacagtaacaagttctttcctctgccaacacaagacaagtgaaggcgacgaagactgtctcttctccaagtgaaaccctctcattggattcctctgcaacaaatactccgcttgtgtctccgccgtctgactcagcgtcacaggagtaaacccacattgcccaaataagcttctccacggcggtgatctctccatccaacggtaacgattcgtcaacagtttctgtatcgacggttgcacacaaaacctctcaatactcgtagcagcttccgcattattcagattcccagagtcg

SEQ ID NO: 132626 - DNA, 343 bp, Arabidopsis thaliana
aagagaaaaaataataaattgctgcatattatacttacaacttaacaagtgtgtatgttcgagaaacagatacatagtttactatcaaaacactgtcaaatcaaacagcactcgatgatcttcgctttgaagatcagcctctattgaacaatacagcaataataatctatatactcactcttgtcactgagatgagacaatctgatatagcttatgagtctaaatcccttgtttggactggcttcttgtcagaagtcaccttagcataaaaatcagacagttacatgattgggacgcccaatcgctcaagttcttgttcggctgacctcacaaaaactgatgg

SEQ ID NO: 132627 - DNA, 346 bp, Arabidopsis thaliana
gaaaaagctcaaggtatatgtctacagggaaggcaaaagacctgtactgcataagccggtgctgaaaggaatatatgcttctgaaggatggtttatgaaacaactcaagtccagcagaacatttgtcacaaaagaccctcgtaaagctcacctattttatcttcctttcagctccaaaatgttggaagaaactctgtatgtcccaggttctcacagcgataagaatctcattcagtttttgaagaactacctgcacacgatttcttccaaatatagtttctggaacataactggaggatcagatcattttctggttgcttgccacgactgggctccttccgagacg

SEQ ID NO: 132628 - DNA, 516 bp, Arabidopsis thaliana
ggttagaatctgcaaaagcggcagtgatcgcagctgcggttgggaccattgcggaactcccatttgctctttctcaagtcgcaagcatggagcagcttgttctgcccctgggaatagcgtttgcaagctgtgcattgtttggagtcacattcaggtatgcagtcagaagagacttggatgataatcatctcaaatccggagccgttgcagcttttgggtttgttaaaggacttggtatgttgagcagaggaccgccattggagctgagctgggaaagcttgttttcacatgggatagacggcgccgttttggtgtctcagagcgtcttgatatttgcgtttgcgtccataggtttggacttctgtttcaagatgaagctcttaagaccatttcctagctctgactagattgaagagcaaattaaaaatgtagaaatgaacaaaatcttcttttgaagactttatttgtttttttttatattattaattttggtctaaaatgtaaatgtttcatcct

SEQ ID NO: 132629 - DNA, 414 bp, Arabidopsis thaliana
  unsure (1)..(414): unsure at all n locations
cccgaagccatgtggtaattctaattttgtgtatttattattttctgttaagacgaatcggacagagagaactccggcggcggattgcacttccggcaagatctcgtggggataaataagatggcggatgagaggtataatcggaagaatccggcggtgaagaggattttccaggaggttaaggagatgcaagctaatccgtctgatgattttatgtctctccctcttgaggagaatatctttgagtggcaattcgccatccgaggtcctggtgatactgaattcgagggcgggatttatcatgggagaattcagttgcctgcagattatccattcaaacctccttcattcatgtaattgncccctaacgggcgcttttgaaactaacaccaaggtttgcttgagcatttcaaa

SEQ ID NO: 132630 - DNA, 438 bp, Arabidopsis thaliana
ctcgctacgtatgatcacgtcaaagaaatcttggtagctggtggccgtggaacgccgggagggatacgaacgcatgtagcggcgagttttgcggcggggatcgtcgccgcggtggcgtcgaatcccatcgacgttgtgaagacgaggatgatgaatgcggataaggagatttacggtggaccgttggattgtgcggtgaagatggtggcagaggaaggaccaatggctttgtacaaagggcttgttccgacggcgacgaggcaaggaccgttcacgatgatcttgttccttaccttggaacaagttcgtggtctgttaaaagacgttaaattttgattaatttttttcaagtagttaggttaataaatgtttgagattcccatatttcttcatacatttcatatacgtttaaaatattttgaaaataattatatagcg

SEQ ID NO: 132631 - DNA, 621 bp, Arabidopsis thaliana
  unsure (1)..(621): unsure at all n locations
cacatgtgacaaatatttctcttgccctgagagcaacacttgttgttgtctctacaagtatggtaagtactgcttcggatggggatgttgcccgctcgaagctgctacttgctgcgatgataactcaagttgctgtcctcatgagtacccggtttgtgacgttaaccgcggaacctgtttgatgagcaagaacagtccgtttagcgtgaaggctttaaagcgtacacccgcaataccgttctgggcaaagagcagaaagcacattgcgtaagaagaggaagacaaaaacattgagaattcatcaaaagcattttatgttgttgttgttcagatttaaaaattgctgattctgctgctgaggttttctgtacatataaaacctctccctaagtttcattcagtttcatcattgttaaagtaactaactcagaacaaatgggtttggttattaatctctttcaacttatctatttatcgctctattattgataaattttcattttcctttctcnnnnnnnnnnnnnnnnnnnnnnnnnnnnnnnnnnnnnnnnnnnnnnnnnnnnnnnnnnnnnnnnnnnnnnnnnnnnnnnnnnnnnnnnnnnnnnnnnnnnnnnnnnnnnn

SEQ ID NO: 132632 - DNA, 664 bp, Arabidopsis thaliana
  unsure (1)..(664): unsure at all n locations
nnnnnnnnnnnnnnnnnnnnnnnnnnnnnnnnnnnnnnnnnnnnnnnnnnnnnnnnnnnnnnnnnnnnnnnnnnctttttttttttttttttgtaactcaaaaattctttagctttttatcggttggtaatcactacaatacgttggagatgtttcttattttgtttcagagcacatgagaagaaagtaaacaaactaaaatataacctcttcctacctttttactcaaaaaagaatcccaaaacaaaaaattgaagtgaagttacaagtctctgtaattatcttcgtgtagagagattttatacaggttcctctgggggttctcttctgatatctcaaagcatctatacattcggaagctcccattcattgcctttgcctaccttgagaccaaatgtggcttcatgttgcgtgttatgctgtgaacataccatcaacacttcaagagtcgtgaagagaaccttggatcatcagtgatatacgctttgcactctctgagtgatacaactctcctttgaaaccaatctcggttgagctgtcgggagagaaccaccgtaagagcactcctaaatgtaccaactgctggtatcaacttgaatagcaatgggtgttgttaccaggcttaaagcagttggtcccagaacaggaggtacaatttgctcta

SEQ ID NO: 132633 - DNA, 688 bp, Arabidopsis thaliana
  unsure (1)..(688): unsure at all n locations
nnnnnnnnnnnnnnnnnnnnnnnnnnnnnnnnnnnnnnnnnnnnnnnnnnnnnnnnnnnnnnnnnnnnnnnnnnnnnnnnnnnnnnnnnnnnnncctttttttttttttttagttttcaggaaattttttatttaattttttgctagatagcaacctgaccattttcaacacctaatccatacaaaacaccagaatatttgtgcaacggaccaacgaagaaattctccttgagctttctgaaagtacaagacgtgagtaaactatccgaaccagcttggtgacagatcccaactctctccacttccagcaactccgcaagcttgttgagaccaccgtgaaggctgttgcagaacttcatcaggtgtttaatgtcgtacacggtcggaaaataaacgttgatgagcttgaagaagtctgtttgcgaatccggcaggttttggcaagtcaagagcctttaccaaggatccgaaatcgtacccactggggaatgtaacccaatgcacgttttcgttcaagacgatnccggngacatnaagagcnctgcgaatctcttggaatcgatccggtcnagcgtgtttttggnaaggtcgagcctgattgcctganaacncgatgggatcgaagcgagannccggaccggatcgatcccggaatgatgcngnnaaacttccaggcaaggagggggtc

SEQ ID NO: 132634 - DNA, 487 bp, Arabidopsis thaliana
aaagtaataataaaagaatcttcttatttaactgggatcttgtatcaacaaattttatattccaacaggagttgtatgaaacaatacattggcacactctatgtatatatcaagagatacagagagagagcattctgctctcagatgaaattttcgtcttcctggttccagtggctaacacctatgcagaggaagctaaaggtggcgattctcatgatctccagtggctttggattccctcattcgtaatgggcagcaagcaaggaagaataaccagcagtgattctctgttttatcataggacgaccacgttcatgaatttcctcttggcgaatgcaagccaccatttatttggtgtcccgttggctctatatgctacactcagtaacctgccacttgtctcctctcgaacctgcttaagatagttcctgaaaagctctgcttcgtcctgggactgcggaagcgaaaagagacctgggaaaggaaa

SEQ ID NO: 132635 - DNA, 489 bp, Arabidopsis thaliana
  unsure (1)..(489): unsure at all n locations
nnnnnnnnnnnnnnnnnnnnnnnnnnnnnnnnnnnnnnnnnnnnnnnnnnnnnnnnnnnnnnnnnnnnnnnnnnnnnnnnnnnnnnnnnnnnnnccttttttttttttttttttttgctaagaacattaatttactttccaaaacatgagttcattggcaaagaatatcaatttggtacaacaatacttccaatcacacttttcatttctttgcttagttttatttctaatcgctaaaacaaagtttaccctagcaaataacctgtacacagcgtatccaaaaacactaaagacgatgatgccctgagaacatccacccaaaatagaaactaaacttgtggttgtgcagaaaccttcctcaagatctaccattacgaccagaagtagccatagcttatttctcggacctgaggctggaacttgcttctgaagtgttctcatcagagggtgcctcctcctcctccttgggggctcccatttccttcttgg

SEQ ID NO: 132636 - DNA, 562 bp, Arabidopsis thaliana
  unsure (1)..(562): unsure at all n locations
ttttctctcatctgcctacggttgcagattttattttattaacacagaaaaacaaaaaaaagtataaacagagtccacgaatttgggaaagtttaagatcaagacatgaagaaaactggaatcatcgcagcctccatctctgtcgcggcttctgccacggcgatctccgccggctctaccaacacctccgtgtcattctcttcgccggaatctaatctctctcgtcaggaggcaaaggaaaaacagaggaagaagaagggttcgtcggaagatgggggagatgagaagttttgctccaaggttttgatgggttacgattcatcgagacgctttgtttacttgctcacccgataacattttgcaattggttctgattttgtaagggggtcttattggtttacccccattttggattaaccctcaaaggggtttnccttggttttaaagggtccggttttttttccttccttcaaaatcaacttttgtaacttcggcttaaagtggccccccnggcaaaggnggnattgtttnttggggtcanggntctncantttgggttccc

SEQ ID NO: 132637 - DNA, 577 bp, Arabidopsis thaliana
  unsure (1)..(577): unsure at all n locations
gaaaaggacgtttttnccttccacttcctccaatccctctcaaatctcagaaaacaaaacccttttgatactccggaccaaaaaaactaccgcgtgaggaagatcaagaaggctgcgtacgtttccatggccagagcagccggagggagtagccggctatggagcagagccctcttgcgtagagcagacaaagatgacaacaagatcgtaagattttcaaggaggaagaggaaggtgacgtggaagatatcatcaaaacggaggaggagtaaccagagagctccggtggtggaggaggcggcggagaggcttaaggaatctttgttccgggaggcggaggaattgagacgtcaaaagcttnttggaagnagacggcttcattacatcaagtgccttagttattcaggtcaaaggtcatncagtgtcttcgttgattggcttnntccccaattgtcanccatttaatcancaccatcatcatcnattgcccntgtntttnggggttcggcntatncataggctntttgnnttggggaactatcccggttttttngggttnaanttnccgtgtntaccc

SEQ ID NO: 132638 - DNA, 666 bp, Arabidopsis thaliana
  unsure (1)..(666): unsure at all n locations
cttttgatactccggaccaaaagggttttgttttctgagatttgagagggattggaggaagtggaaggcaaaacccttttgatactccggaccaaaaaaactaccgcgtgaggaagatcaagaaggctgcgtacgtttccatggccagagcagccggagggagtagccggctatggagcagagccctcttgcgtagagcagacaaagatgacaacaagatcgtaagattttcaaggaggaagtggaagatatcatcaaaacggaggaggagtaaccagagagctccggtggtggaggaggcggcggagaggctgaggaatcttgttccgggaagcggaggaatggagacgtcaaagctgatggaagagacggctcattacatcaagtgccttagtatgcaggtcaaggtcatgcagtgtctcgttgatggcttatctcccaaatgatcatcaattaatcatcaacatcatcatcaatgatcgatgtatatagagatacgacacatacatagtctattggattggggtaatcataacgaatatatatgtgtatatatatatatatatatatatatncngntatatatacatacggtgtaagataggatacatatatgaaatgtgtggatatgtattaggctcgnagtaacgnaagatttttttcttt

SEQ ID NO: 132639 - DNA, 612 bp, Arabidopsis thaliana
  unsure (1)..(612): unsure at all n locations
tcncattganncctggggccagngatatttcancccntgnagncccattccgggttaaactaccgaattacggcccccctcaaccgcgggttaacccccaagccacaatccctcttgccagtaaatatggtggagcaactccccggtnttagaccgatgttagatccgctcaacccccgcttcaaaagtcccttgggggagaagctgagtgtttggggaggcccctaattgctgcttttgttctggcctgcctgaaagctccgaccgcaggagctgaatctaccattcatatgaaagcacaggccgggagatcaagctatgtatcagctgagatttttgcatcaattcctgatccaggagcaatggctgcagcggcatggtacagcgccgctgcaagagccgtgaaagagcagaggcagaggttttgaatctgatggactaggctctgtaagaggttataacgagctttactgatttgataactgcctctgggctttgttgtctatatgtatctagttctaatgtttctgagttctgactctgtttatatacaaatgacaatgggattcttgtgaaatgcttcccctgtttatatgcaaaaaaaaaaaaaag

SEQ ID NO: 132640 - DNA, 1185 bp, Arabidopsis thaliana
  unsure (1)..(1185): unsure at all n locations
acctctttcntccaatactgcttggggacagaatgcnaatttggcgttcttnacgaaacatatgggtgctacctttaanaaacggtctcaaccttggcggtcaatgattaacccagaagatgtgcattctggtgatttcttggcggtgtcgaagattcgaggtagatggggtggttttaagacgttagagaaatgggtgactggggcttttcctggtcatactgctgtttgtttgaaggatgatttggggaatctttgggttggtgaatcaggacatgagaacggaaagggtgaagaaatcattgttgtgatcccttgggatgaatggtgggagctgactttgaaggataattcaaatcctcaagtagctttgcttcctctacatcctgatatccgggcaaagttcaacaatactgctgcgtgggaatatgcacggagtatgttgggcaaaccgtatggatatcacaacatgatattcagctggatcgacactctaggcgataactacccccctccccttgatgctcacttggttatttctgtcatgtctatgtggactcgtgtacaacctgcatatgctgctaatatgtggaacgaggcacttaataaacgactcggtactgaggatctggatttgtatgggatacttgaagaaacagcgaggcgtggaatgtcatttgatgagttactcaccatccctgaacaggatgagtgggtttatagcgacggtaaatcgacaacatgtgttgctttcatccttgcaatgtacaaagctgctggtatattcgaccctctcgctgatcacattcaagtcactgaattcactatccgagatgcgtacactctgaagttatttgagtctaaccagactcggttaccgagttggtgcaacaccgaggaagggaagcttgacttctgtcaaattctaggtgaatacagaatggagttacctggttataacaccatttacccatatccaaacatgaaccagaattgtccttctttacctcctaattatgagagaccttctaagtgttagcaaagttaattaacatgtatgtctatctctctccctctgtctgtttgtgtttgtatacttttggtttatatatttaagcttacccttttagttagagggaaagtaaaccacgtttttagtacnnnnnnnnnnnnnnnnnnnnnnnn

SEQ ID NO: 132641 - DNA, 1090 bp, Arabidopsis thaliana
  unsure (1)..(1090): unsure at all n locations
nnnnnnnnnnnnnnnnnnnnnnnnnnnnnnnnnnnnnnnnnnnnnnnnnnnnnnnnnnnnnnnnnnnnnnnnnnccacgcgtccgatttgagtttggttaaatactatggatttgttgttcataacgacgagaagattctcgttgtggagtatgtagccaatggaactcttagagatcacttggattgtaaggaaggaaagactctcgacatggcgactcggttagatatcgcaaccgatgtagctcatgccataacctatcttcgcttgtggcctcagccacctatcatccacagagatatcaaatcttcaaacattctcctcactgagaattacagagccaaggttgctgatttcgggtttgcaaggttagctccagattctgattcaggacccacgcatgtgtcaacacaagtcaaaggacccgctgggtacttagacccagagtacttaccaccgtatcaactcacagagaaaagggacgtctactcttttggggtactgctcggcgagcttctcacaggtcggcgtcccatcgagcttagcagaggacaaaaagaacgcatcaccattagatgggcgatcaagaagttcacgagtggagatacgatatcggtattggacccgaagctagaacagaattcagcgaacaacttagcattagagaaggtattggagatggcgtttcaatgtctagctcctcatagacgttcgagaccaagcatgaaaaaatgcagtgagattttgtggggaattcgtaaagattacagagagttgctcaacacaagtctttgatgatattattctctacgcttatataatatggttttgaatacacaattatatattatttgtttgaatattaatttgtcatacacgatgcattcttgtacgagaattgttgatttgtaattgattttgaaatttgtagtattatattaacgtgtatttggtgttaataaattgagttattatccttccaaaaaaaaaaacaaaaaaagnnnnnnnnnnnnnnnnnnnnnnnnnnnnnnnnnnnnnnnnnnnnnnnngnnnnnnnnnnnnnnnnnnnnnnnnnnnnnnnnnnnnnnnn

SEQ ID NO: 132642 - DNA, 740 bp, Arabidopsis thaliana
  unsure (1)..(740): unsure at all n locations
tacccagcttnttcgntcactatggganagcttgtacnctgcagtacgttccgnattccngttcgaccccgcgtccgattcttgatagatacaaaaaacatttttccagacacaaattcataaaatctttgccttgagtagatcaaagttctttacattaatcgttagaagatgagccagtacgatcacaaccagtctgcaggagctaacccaccgccaccgatgtctacctgtacatcaccaccaccgccgattggttacccgactaaccaaccgagtcatggttcggtagctcagggtaaagtggaaaccaagtctaagggtgacggattcttcaaaggctgtcttgcggccatgtgttgctgttgtgccctggacatttgcttctaagccatttgggaattgggatggtctatttatgacgagtttatgtgaatgtgatgtgaattattattattctctccagccttattgtataaattctctattttttgtttattattttcttgtaatactttgtgagacgaacatattatggtttgtatttggatctctactctctagtacttaaattaatttgtcttgctcttggattggtatagttaatagctttaatctcaaaaaaaaaaaaaaaaaaaaaaaggnnnnnnnnnnnnnnnnnnnnnnnnnnnnnnnnnnnnnnnnnnnnnnnnnnnnnnnnnnnnnnnnnnnnnnnnnnnnnnnnnnnnnnnnnnnnnnnn

SEQ ID NO: 132643 - DNA, 511 bp, Arabidopsis thaliana
cgtcgcatagcacgcgtacgtaagcttggatcctctagagcggccgcttttttttggttttttctttttttttttttccgacacaaactaattttgccatccagtcatcaccaaatctagaacacaaactagaaaatacgtatcgtaaatgacctaaacgccattcagattcaggggtatttaccacgaaagtacaaattggaaagcgtgggtaaagacgaggcgcgacaaagggtaaaagcgtaatcttcacttaatcgttcttgagcatctctctgtaccttagaaacgaatctagcctctgtagcttaagctgttgcttaaacttgttgatgaaatttgaagctttatcgtcgacaccttcttctcctccgtctcctatcggacgggggtctctaaactttaatgggctccggcctttttttttccacgggctaaactggttccttctattcccggccgatgggtctttcgctagcagaatttataatcttcttttggagctttgttc

SEQ ID NO: 132644 - DNA, 501 bp, Arabidopsis thaliana
  unsure (1)..(501): unsure at all n locations
nnnnnnnnnnnnnnnnnnnnnnnnnnnnnnnnnnnnnnnnnnnnnnnnnnnnnnnnnnnnnnnnnnnnnnnnnnnnnnnnnnnnnnnnnnnnnngggnccaatttaaagaaaataatattattagaaatacttttttccacgtaaaaacagcataaagactacttttaccatcgagtaaaaacaaaaaagtgcagtggaactcatacgtccagatccagcatttacgcacacgacacagacgagttttgtcatccagtcatcaccaaatctagaacacaaactagaaaatacgtatcgtaaatgacctaaacgccattcagattcaggggtatttaccacgagagtacagattggaaagcgagggaaagacgattccgacaaagggtaaaagcgtaatcttcacttaatcgttcttgagcatctctctgtaccttagaaacgaatctagcctctgtagcttaagctgttgcttaaacttgttgatgaaatttgaagcttta

SEQ ID NO: 132645 - DNA, 476 bp, Arabidopsis thaliana
  unsure (1)..(476): unsure at all n locations
atgaagcaatcatccaaatatttcacatatccaaaagtaaaaaaattcacgtatacaaatcaaaattccaaacaaaaatataatagccagaaaatgtcaacacatatagcaacgtaagctagaccagaaactgttgaccttacattcaaaacaaaacttggacaacaaaagattaaaggtctactgagagaaacacaagagaagcaaataaaagatttgggatcaaactgaaaccttgttgagtatcggagaaacgaagttattcagcagccatgtcgtcctcgtcatcatcgtcttcgtcctcaaagcttaggtcaaggtcagcaagcaactcctcaattggnncagatggtgcaccttcnccatcctgtcattggaaggcaggtctcnagaagntttgataaatcctttgtcccctgtacaaaggagtgtggttggaanccttnagnnnnaggggttttccttncaagnttccc

SEQ ID NO: 132646 - DNA, 675 bp, Arabidopsis thaliana
  unsure (1)..(675): unsure at all n locations
nnnnnnnnnnnnnnnnnnnnnnnnnngtgcatggcccccttccttagcctggattcttttaaagcggccgccttttttttgtttttttgtgcaaaaagatactcgcaccttatttatatatagtaaaagaagctgaaacatcatagagcaatcaaataacgtaaacacaaaatgaagaaacgttacaacgacaataaagatttatttgtgatgactgacgacgatgatgaattgctcatgcctcatcaacaaccattatgtaaacaacaatgggacttctcacgttatgggtaccgtcagaccaaattagatttgcagacgaagggacttccgagtcaacgtcgctgcctgtaacagtgacactaaaagattgcttctcgttcactgtcttaaaatacagaacactaggcgtgaccttgatgctaagcttagatccgtgacctgcgactacctttgatttgtatgtagagtttggcgtgccgacgttggtcaacgttctgttgaaagtcacagagaaggtactatcggttcctgacaatttggccggcattggaggntagtaagggttctaggcaagatttttgttttcctngggcncttgacgggatcnccgagatgattttaggggctccgagngagtcatncgcanagaagggntgtggcacntgccatggc

SEQ ID NO: 132647 - DNA, 540 bp, Arabidopsis thaliana
  unsure (1)..(540): unsure at all n locations
nnnnnnnnnnnnnnnnnnnnnnaatacaacattaaagatataataattaataagaaaatccctgagtatttctttgttttttttgttttgagtagggttgatccttaaaaatactaaaaccatccgtacacaacaacaacatcaaagggaaagagaactaaggagaggagttaaaaaagagctgccacaagttaacaccaaaggggagtcacagtcacagtcacattttaccattcacctttttttatcactagtgaaagtaaggaggaggaggaggagcctggtactgatagcagttcgcgtagaagttcccatgtgcaggagcaggattgaacgtgtaagtctgaggaggaggaggtggtctangtnattgcttctcgttcactgccttaaaatacagaacactaggcgtgaccttgatgctaagcttagatccgtgacctgcgactacctttgatttgtatgtagagtttggcgcgccgacgttggtcaacgttctgtggaaagtcacagagaaggtactatcgggtcctgacaatt

SEQ ID NO: 132648 - DNA, 782 bp, Arabidopsis thaliana
tgaacgcgcaccacgcctaggatcctctagagcggccgccccggcccaacccccccatttttattaattttttagaaaaagaaacaccgagcatttttttgtgttttgttttgagtagggttgatccttaaaaatactaaaaccatccgtacacaacaacaacatcaaagggaaagagaactaaggagaggagttaaaaaagagctgccacaagttaacaccaaaggggagtcacagtcacagtcacattttaccattcacctttttttatcactagtgaaagtaaggaggaggaggaggagcctggtactgatagcagttcgcgtagaagttcccatgtgcaggagcaggattgaacgtgtaagtctgaggaggaggaggtggtggaggttgtgctgccatgattggaccgctaaggaacggtctgttgtcatagacatactgcggatacctttcagggatgactctaccgtatcctgtcttgttgttgttgatgttgttgttgttgccactgactcggggttgagacaccaagtgggcgttatgcctggggcccaatgggttttggggctctctttttgccccctttggttttcccgaactggagaaacccttcggggaaggggcctaaatggggtactggttcttccaagcctatgctctttcgaatcacacttttattaccgggttttggagggcccaaataatcctctcccggttaatttgaaacttaaatcccctgtaccacggaaggaaaaaaccctccatgcgcccggggccct

SEQ ID NO: 132649 - DNA, 467 bp, Arabidopsis thaliana
  unsure (1)..(467): unsure at all n locations
tgcncnttggncaatggtgggatggctatggcggcccatttccatgggccgtcgcatccctcaggtttggccttacaactagatcaaaagaggaagcgtcgagggtttgaatccacttggatgttcatcttcgcgctagtagccaatgcaacatatgttggtagtattcttgtccgaacaactgaatgggacaacatcaaaccaaaccttccttggttgcttgatgctattgtctgcgtcgtactagatctatttataatactgcagtatatctactacaagtattgcaggataaagagcttggaaagcagagaagaagacgcctatggagactatgtggaagcaagcaaaacttttgtttcgtgaatcactatttatgttacaaggataatttgattttcttttgatcttaagtattattgatttcatagtgtatgcatataaaacttaattattatatgttcact

SEQ ID NO: 132650 - DNA, 437 bp, Arabidopsis thaliana
atgaatcagaaatgttattaaacaaagatgaaaactgaagtaattttaacaacaaaaataacgaatatgtgatgtacattgcaaatgcaaaaattataaagacacagcggataaagttttggaaatacagagaacaaactcactcacgtgactaaatctaaaagacaaggcaagagttcaatgaacctctgtatcattttgattttgacatttacaagagttacataagcaagggggaccatgacatgtaacttcaaactcacagtcattttcatgacaaaaccaaggcttcaaatcgaaatgatgcgactgagttgatttacaaaaacagtggtccgtttcagtagaccttagataaggccgccagattttaagatctgcatgatggttaaagtgattcctcccgcagaaaagatgccgattattatgtaccagca

SEQ ID NO: 132651 - DNA, 746 bp, Arabidopsis thaliana
  unsure (1)..(746): unsure at all n locations
nnnnnnnnnnnnngggcaacactatagactagctatgacgtcgcatgcacgcgtacgtaagcttggatcctctatagcggccgcccttttttttttttttttatggaaaaacatcagattgaagtccaaagttcattaagaagagattagaaatagagagagtgataacaattgaactcagtaaagaatcataaaagcaaagagatccaagattgcaatttatgtcccagctggctaatagaaacgaacatctaggaagtgtttgagctatggattgactatagcttggatctgctccaatgtcttcccttttgtctcaggcacgatggcaatgacgaagacaatggccagcgcgttgatggcagcgtaaatgaggaaagttccgtaagagctccaggacatgaggaagttgaaagtgtaagaaacagcccaccctccaaaccagttcaccagcggcgccaggcctccggctactccttttatggttatgggaaaatttctcagacatgaccacccacggcttggctcccattcctgctgaaaacgatcctatgtccacctttttcccaacaacagccaggactgggactgcttcgtgcgccatgtcgtgaaccttgagatagaaagataccgctgctatcatacagcctatcactaaccctgttgcagataccagtagcaatggttttcttccggctctgtcaactatcggtgcattaagcgcagtgattaccacctgaagaaca

SEQ ID NO: 132652 - DNA, 699 bp, Arabidopsis thaliana
aagtcaaaattttaatatagactaaagtattaattgcttctgtcccacttaattctcccacatcttcacacgtactaatatattatacatatatatcaactaaataaaaatatcacaaataaagaactaaaacaaataaaaacgaactttaataaaatcccatatcttgtttctctctctctctcaaagttagtatctcagtacctttacgctttgtttgtctctatcttcttcctgatattcagagaatggtttcatcagatgattggacgaagtgtgcgatgagagatggagaagtggtggcagagcttttggtgaagcttaaagaagccaaagtaatcaagaatccgattgtaacagcgctccggtggggaatccaacagccaaggtctcggtgtccaagaaaagaatctgaatctagatgtagtccaagtacaccactatcttggagtggtggttgtggtggttcttcttcttctccatctggttatgtcgatggttacgaagctactagtcgtcaaatcagtgccgttggatctagatccaaggtttgttcgtgtctctcttctctgttttggattcatcataatcttacctagacatgtgtctttactcgttgatctctgacctaattcttgatttgaatcttggaaaacaagacggacgcgtgggtcgacccgggaatttccggttccggta

SEQ ID NO: 132653 - DNA, 485 bp, Arabidopsis thaliana
  unsure (1)..(485): unsure at all n locations
nnnnnnnnnnnnnnnnnnnnnnnnnnnnnnnnnnnnnnnnnnnnnnnnnnnnnnnnnnnnnnnnnnnnnnnnnnnnnnnnnnnnnnnnnnnnnnnnnnnncctgtcttttttatatttttttgctttggatatctaagaaactttattaatcataccaaccaaacttacactcttattaacacaatgacacaacaacgaatgcataagcattacaagaagcaagacaagagtttaccagaaacacaaagagcttcttttagttctgatggattccacttggccatgtcagattctttacaggctcgagaatagcttcaacctcagacagagtttcttgatccatccccagactttcaagctctgtaactgctgcaacattttcttctacctgtgagacagagctcatcccaaccaaccccgacgaaatctcctggtttgctaaactgaatggcagagctaactttgtgatcttcttgccctttga

SEQ ID NO: 132654 - DNA, 565 bp, Arabidopsis thaliana
ggttgatgtggtggggggtactattaggtacaacttagaagagtcttgacgtcgcctgcacgcgtacgtaagcttggatcctctagagcggccgccctttggttttttttttaattaacgcactttttttattcatgaatgctaaagttacaaaacaataaaactggtcaagagtccagtttggaacccaactaactttgtgttcaccatgggaggtctctcgggaacattaagtatactttaataaagacagttttaagtttttttttttaaaggatgaggctgatgaatgcaagacttttataggggcaagctttccgatttggtggaaccacaaaaacatggggtattcctttccattctttgccggggtgaacggggatcggtttcgcgacagccgccctttccaccggttacaaaacgcttattggttttaaactgcgcaggggggttttttttttatgggaggggatcgcccacgacgggaaaagcttgtgccttggtggggaaaaagttgggggtttttttttgaggggggaggatagtttgtgaggcggggagtgct

SEQ ID NO: 132655 - DNA, 469 bp, Arabidopsis thaliana
tttaggcgcactatagaattacttgacgtcccatgcacgcgtacgtaagcttggatcctctagagcggccgccctttttttttttttttaattaacgcactttttttattcatgaatgctaaagttacaaaacaataaaactggtcaagagtccagtttggaacccaactaactttgtgttcaccatgtgatgtctctcgggaacattaagtatactttaataaagacaggggtaagtttttttttttaaaggatgaggatgatgaatgcaagacttttatagggtcaagctttccgatttgatggaaccacagaaacatggagtattcctttccattctttgccggggttcactgtgatcggtttcgcgacagccgcgcgctttccaccgttacaaaacgcttatagtcttcaactcccaaatcggataccttcttatcccatggattccacaccacggcatcaactt

SEQ ID NO: 132656 - DNA, 500 bp, Arabidopsis thaliana
gcttgttccttactttcaatgatgtcaagaaacttagaaacatatcattgcaagacaaaactttgtttatgtttgatagtgagcgaaaacaagacagaactaagataacagtaagacaaagtgaagtgatacaattttcctgaactctgatcattcatcatctttccacatatctgcaaactcatcaggctccaacgggtttgagagctcatgcatctttttcctcgtcttcgccttgatcttcttagcaaatttcccagctttatttctcttctccaatgctcgaatctggtttggagatacgtataacgggttctcataaagagtaggacctccaaagctgcccgcgaatatcttgattggattcagacaaaaccttggaccaacctcgataagggtcattttatccaggccaccttttgcaattttatctgactcattgtgaggaaccgaaatctggtaatttcggaaccatattatgctcatcaacaattgaaaag

SEQ ID NO: 132657 - DNA, 544 bp, Arabidopsis thaliana
  unsure (1)..(544): unsure at all n locations
nnnnnnnnnnnnnnnnnnnnnnnnnnnnnnnnnnnnnnnnnnnnnnnnnnnnnnnnnnnnnnnnnnnccgccctttttttttttttttttacctgaaagttcaattttatatttcttttttttgggtgtaaaactgggactatactatacatacattgggctaatttactgagacagagagatatctaaaccttatgttcaagtgatctctttctcaattgcacatcaaatgaggtaacaattacaacaaaaaactataaacctccccccaattgtaatctaagaaaaaatgaataactttaaacaagtcaaacttgatctcattgtagaaaatctgtaagagaagcttgtatatcttccaatgttcttcctttagtttcgggtaccatcgcataaataaagactatacccgcaccacatatagtaaagaagatcaagaacgttcctgatgcgttccactctagcatgaagttgtaggcgaaagcaacaatccaaccaaaggaccagttggctaaggtaaccagagtcccagcagaaactttaa

SEQ ID NO: 132658 - DNA, 827 bp, Arabidopsis thaliana
  unsure (1)..(827): unsure at all n locations
nnnnnnnnnnnnnnnnnnnnnnnnnnnnnnnnnnnnnnnnnnnnnnnnnnnnnnnnnnnnnnnnnnnnnnnnnnnnnnnnnnnnnnnnnnnnnnnnnnnnnnnnnnnnnnnnnnnnnnnnngttgtgaaatgagaagtaacattaactaattacaagataggatattaaacctcgtgtgatatggaagaaaataaacttttgactaatttacatatgcaaaagttgttgtaacgctgggaaaaaaaaagaattctaaaaacaaaggtatacccttggaggaaatttcgtattatatagttagaataaagaatgtactaaatggaagaaaaaaatatatatatgaatctagccgagactatcaatggccaacaccgggactaggaacggatcggagataccgatcaacggtggagagatgtcgtgatcggagctttccggcgaagacggccgcgtgaccctttttgctcggtgtcgagttgggaattttcccctttggtagagcacttaacgtactagttttggtcacatgaggcatgtgactcttctcttcctctctcaccgtcaagttttcttgtttctctcacctccaacagttttcttgaagataccagcgaaggcaaggctgacacgatgacggcaaagactatgaagagccagatggtcggaattagacgaacggccatgaagagctttgatctttgggttgagaaataaagagagagagagcgagagagataaaccccatgaaatactctcgagccgaattccgagcttacgtacgcgtgtatgcgacgtcatngtcttgtagagtacacaaaattcattc

SEQ ID NO: 132659 - DNA, 487 bp, Arabidopsis thaliana
  unsure (1)..(487): unsure at all n locations
nnnnnnnnnnnnnnnnnnnnnnnnnnnnnnnnnnnnnnnnnnnnnnnnnnnnnnnnnnncagaatcagtaaaacctttttttttttatatgaagaaagagatttcattagcagtgaagaaaaaatagacaagcaagaaccgacgaaactctctcttgctctcaagttttgactccaattaataaaatggcgacacagtgaaaagaaaataatagtgtttttttttgccattgctctacgcctaaactctctaaaaccaatagagctttttgtttcaaaagcacatttacgcagcaacagacacacggggagcatcatccacgggtttcgtagctctgttagcatcatttccgccaccacgtcttactcgtccattgttaccattggccctcgggaacccaccaccatcaccatttgctcggtttgcgtatccgcctctattgtttcccctgttattaccatatccgttgaaatcggtccggccatat

SEQ ID NO: 132660 - DNA, 619 bp, Arabidopsis thaliana
  unsure (1)..(619): unsure at all n locations
aaagaagtgagaaactggatttctacaattgaacaaatatgtttcatacaattgtggaaatgacagtttcagactcatccgttacattttaacaagaatattgccttgtctttttcattagtactacaataaaagcgataaggatagtagtattgtgttttctctgtgtgatgagtaaacaagaagaaagaagagagaaagagaggagtgaaaaccggtaagaaccaaaccgcaacaaactttaaaccttgagaaaacgcagccagacgagtgcaagggcttttgtgtagtggaaacacttcatttctggctttgatcgacttcttcatcaaatactctgtgattgagaaagagtttcaatcttgtcgtgaagcgtcacgacaagatgatgggcatcatcaagaagcttccagacattaagctgaccagccatgctattacactcttccacaatctcatccatactactgnattccnggatgatcagtttccnacgangactnacgccgngattgcatagggcacaaatcacccgtngnggggcttnttccggntctgnccaggggnttccanccagccnatggggttgtcagcccatnntnccaggaaagggtgtaaa

SEQ ID NO: 132661 - DNA, 293 bp, Arabidopsis thaliana
gagatactgggggtttttttttataaaagaaagcccagttcaattttcatattgggggtctcaaaatttcaatacaatctcaagttaaaaaaaacacttaatgtgaatccagaaactaaaataattccaaaaaaaacagctcttacaaatttcgatttaagctcctcatttttctatatgtaacccccaatttaaacatagatttaaaagaagtacccaaaagataattaatcttcgatacctctaattttaaaaatagtatttcgcaccctactcagatctcttcctttcaa

SEQ ID NO: 132662 - DNA, 531 bp, Arabidopsis thaliana
ttaggacgcacactatagaaaagtctatgacgtcgcacgcacgcgtacgtaagcttggatcctctagagcggctcgccctttttttttttttttttttattcaaaaatcaaaattaagttgaattatgatcttctttttttcttgtatggtgtgtgtaactaagaaaagtacaaaaccacacatgacacaacagtactacactctcaattatgtgtacatgagctataaaactgcctctttgtttactaactagatatataacgagtactgtttaatttaatggtttgatataactaaaaattaggagaaagagaagaaggagcgtttggcaggaggacgtccaagggctctcatgagattagcaacttcaactacttttgcaacctctgtccctctctttgcctctgccgtcgctcttctctcctccgctttcctctgcgctttcgccacattgttatgcgttttctccatcgcttttgcttttctctcctctagcttcctctcaattttcttcatccaagagttggcct

SEQ ID NO: 132663 - DNA, 606 bp, Arabidopsis thaliana
  unsure (1)..(606): unsure at all n locations
gttgaaagcttgattctttcttttttatggctgaatatttcacaatccaagcttgtcatatacaaaatagacaaagttgcagacaacaaagtgtttgtttagatttgatagtcgacctcataggggtttgtccctgccctatggtaacaagcttcacaattcaaacgaaggcccagatccagcatcagtgattgcaacctcatgtcgacgactactggtgattagtgccaatatggttttattgcagaatctgcacttgggaagcacaagccaacattcaagacacagaacatcatcattaccacacgctgcttcttgactctcagtatctgaaccaacaaggcacactgcgcactctgcacatctagggatacaaagccagcatccacgggacttgcgttgcttctggttacatgattctcttgagcaagacggaatcatccttacttcatcgcatttgggacagacctcgaggtcaatcgttccctcggaanaaaggtaagtatacagtgctgagagatgttgtttggtaaagccattgacgccattgatgtgaagtgtctctagtttatgattgttcttanacaagctttcaanacattccat

SEQ ID NO: 132664 - DNA, 423 bp, Arabidopsis thaliana
  unsure (1)..(423): unsure at all n locations
gttcctcaaaacggaggaggtggaagaggaggccgcggagaaggaggtcgtggtggagctcgaggtggtggttcatcttgactttgcttttaacgctcctctacaagagagtagttttaatttttgttttgcgtctttctttttgcctactacttgagttgatgtggtattggcttttttgtcggtctagtttttcaatattcttgctttttttcctctcttttttgtttttcatctttcaatctttctttggggtaatgtactcttcataaacaaacattcaatttcataaggaatccattaaaaaaaaagcttgatgcatattctatagtgtcacctaaatctgcggccgcagctttaggttcggtancccataacttcgtatagcatacattatacggagctatggggatccnctagaac

SEQ ID NO: 132665 - DNA, 447 bp, Arabidopsis thaliana
cggctcgagctcacgagcatcaattcttcatcgaactcatagttaccggcgttgttttgaggccactaccatcgtctctctccgtaatcctctccatcatcgtcatcttctcagtttcgaagcattttctcctttaatagtttcagagaattctgattgtttgttggacgatgtaatcgaaagtggaaacgctacaagatttggtcccttaaaagatggtttcatgttcgaaacctcaattggtttatcaagaatggttctgtttggccgcttgggtttctgatgagatcatgtgcgatgcttcgaaatagaatgcttgcagatccttcatttctcttcaaagttggaaccgaggtagccatagactcttgctgtgcaacttttgcagaagtacagaagagaggggaagatttctggtcagagtttgagttatatgctgctgatctt

SEQ ID NO: 132666 - DNA, 192 bp, Arabidopsis thaliana
gttccagatcgcgagttctactaaacagagggtaacatgtatatagtccggtccgttgaatgttatgtatatgtttatgtagtcacttatagtgggtatggtcttgttataattatggtagtagtttgtgtcgcgttctagacttgtaattgaagaaacctcaactaaaagaccttggatgctgtttgaatg

SEQ ID NO: 132667 - DNA, 560 bp, Arabidopsis thaliana
ttttgagcatcattattataggaagttaggaactatggcttatgaagagagaagatcatcgatcctggattcattctcgctatcgccactaccatacccagtttcttttgatcctagccgttgcttcagtgttcttgttgagttcatggtacttcagcttggaagaagcagccgaatcagcggaagagcagataaattttgcgcttctcttgattcctctgtttcttatagtcttggtccggtggttatcttccatggagaaccctgatgcgcttctcgggatgttttcaagcagtcgtcggacaacttacgtgagtcccggagccggaggtgacggtggaagctcgccgtggggagtggcggcgttgatagttttgttgcttgtattgcttcagtatcaatcaagtttcttggagatgtggtctggttaatgatattgataggtttttttgattttcacgtgttttgttttgtcgtctagtagcacgatgatgtaaaaatttggtcattacttacgaattacgaggtttaaaatctcgtgacggtactacatgttatcc

SEQ ID NO: 132668 - DNA, 415 bp, Arabidopsis thaliana
ctgcatgtatatctcctttttcttcgttatataaactcaattataaagggattagtacagtagtagatgaatatattgatgacaactaaaacaaatttcagtatatgattaaaaagaattcaaaaacacagagatctttgatggcaacactctaaatatatttcgatacaatttgtctaattaccatattatcccccaaaggccactacatggctaaatgtaacatgtttgcgattctggctcgggtcaactctgtcgctctcttgtagtgaccacctagtcaacggaaatgttacctttgcaaagtgagtttacaagcattcattgcaattgcggttatataatccttttacaatttccaaagctttacaacgctattagctccacacaacagcaatcacaacccccttgcatc

SEQ ID NO: 132669 - DNA, 470 bp, Arabidopsis thaliana
  unsure (1)..(470): unsure at all n locations
atataaaatctataataatagtaggctttatgataaagggggactacaaccactccgaagcaactattgcccgcaaacgcacctgtttccaactgaaatcagaaaaagtgccaacaagatatccataacaacacaaacaaaatcacatagaagactctgtttcaagttccaacaacacattattcaaaacccactctttacttactcacttactctcttctgctaagattagccaagctcatcaagaattaatcccctgacgataataatgatcctacagcctcctccatgctcttcccatttggattcttgttccattccaacatttttctaaaagtctccacgaatttctccgcgtgaaccactctccattcctcgaaatcccattctccatacattctaggatcatctttattaacccaaacataaggttcaactttcaccttcncgaattatccattctaaaattc

SEQ ID NO: 132670 - DNA, 512 bp, Arabidopsis thaliana
gcggccgccctttttttttttttttttttttttggagaaatttaacttccaaaaccaaattgaaaatgttgtatcgagtagtattccggttagaagaatccggtccgtatcatgaaccagattctctttctgtagctctcggtaaataacctaatcacactaatgaaactcagataactaaacttccccatcagattagagatactctcatactcctgaggattgacatctaggctagtttactatccggtttgtaacaaaaccgaaccggttgattactgaacgccggacaatttagcccaatctacaaattgcataccgccatacacattgttagcaaaccggactcccaccgtgaatgccatagcgaccacagggatacgtttggccgctgtagaaccttccacgacgcgttcgaggccgttgatgatttggtaacgcgcattggaagataagccgaggaacacaccccagagagcagcgctttcgaaaagaggtggaatagggacgtc

SEQ ID NO: 132671 - DNA, 736 bp, Arabidopsis thaliana
  unsure (1)..(736): unsure at all n locations
ggtgcaactactagaagagttatgacgtcgcctgcacgcgtacgtaagcttggatcctctagagcgttcgccctttgggtttggccttttttttttttttttgccactttcaatacacccccttattcatttacctttgggtaaacaaaaaggtaggacacgagtagcaaaatattttattctatacttatttaaaaacatgtatacacacatgtcattattggatttttgaagcaaagttagaaataacaagattcaagtttcttagctctctctcgggcactactctcagcctttgcattgccttccctggagtaacttttctccagcaaacgccacatgaaaggaatcccatctctggccttaatcctctctctgattacttctttggccgtggaggattggcctgtctttagcagcagctggcaccacatttcgttgaaaacatctatttgttcgtctgatgccccaacgatcttgtaaccaatggcgttgaactctgaacccagtagttctagagccttttcgtagttaccccttgcgtattcatacacagcttcccaagctgaatccctttctgcatcacctggtgcttctcctggttcttctttgataatcggaacttaaggcccccaaggaattcatgggcccttgaagctcccaccttgggncggngggnnccgggatccggncggaccgnngggacagttccaaagggcgatangtgggaaaggnt

SEQ ID NO: 132672 - DNA, 486 bp, Arabidopsis thaliana
tttcggatacccttgctgttttttttataggtaaatttcactttctaaccaaaaacacaaatattttttagttacatatgcaagaaaagactcccgaagactagaacattgtgatataacaaataagagactgaacattggccacatcatacatataacgcagatgatgaattgttggtatttgggggaaagaaaaccatcatatatagaagaagacattttacattctgaggaatgctttctcgaattgtgtccacttctgctccaatgtacccacataccccaccgacattcgtacaagaccaggagagatgcctgcagcttccttctgtgaggggtcaagctcgctgctagtgctgctcccggagcaagacatgagtgtctcgtagtaacccaaactgacggccatgaagccaaactgagtggcgttctggagatatgccatgagcttgttggctttctcctctgtctccatgtctatcgaca

SEQ ID NO: 132673 - DNA, 537 bp, Arabidopsis thaliana
  unsure (1)..(537): unsure at all n locations
catatgaaattgattcatcttagaaacatatattgaagatacaccaatcctgtttctaggcattcacaagcctacacatatgggtttgtttctgttcaaataaccctacaattgcagcattactagtaaccttttttaacatgttttccagactttacctcagttctgtgccggtgaatggttcactgattccccatttgatcagcggtaagatctccaacctgttaatcatgggatttcggaagacagttctgacattcaaatgagttgtgcctttttaaggtcagacacaactcctctgtcttgggctgcccctttcattgtaaaccaccttatcaatgatcccatattcaacagcctccagtgggactaaaatattcgggngttcatgtcagcttcnatctgctccnggggattaccanatgcttgganacagctgaccattcnggccttangggctgaattccttcctgnaattcaaacngtggttggcctgaacggnaggggggtacaaaagtgtggggacggacgntcctt

SEQ ID NO: 132674 - DNA, 525 bp, Arabidopsis thaliana
cggagacttcactattgttgcaataatgaagagtaacacattgaaaagagactactgaccacctccgccagttacagttcatatatagagaccaaacaccaacacataagaagaaccaagccacaagaaaaagcaaagacaatgacaaaattacaagaatagataagaaaaagaaagaagaagattagagggagatttcacatggtgcgtgaaaggttcttccccgacaaatcgcttctagattttctccagcgtacgagcacaatggtgacacttccacaccagtcgcatataaaggaacggaatgtgttagaaatccaccagctgctatgacccaacgtgtatgcagtcgtagaaccaacagtcttgcgctttccggtgtgtcgtaattcgacccgtttgcgttcttcaccggtgcaaactcttcctccctcaacacctcaaaaagtgcagtcgaaggagcataaggaaagcaatcgaatatgaactgttctagttttagtcccactatgtcgccatttatag

SEQ ID NO: 132675 - DNA, 852 bp, Arabidopsis thaliana
  unsure (1)..(852): unsure at all n locations
gatataaaacccaaacttgggagcctgtgttaaccctatcgcagatggatgtgacanacgtatacgcaagagcgcagtgattgaaaaggctatctgcttgtttgggtataagggtgtgggtgttgcttacaacccaagaatagataaatgggaagcgataggagaagtgaattatttggatttaggatgggtatggcttcttgttgcgtgatagataatgtgctgtattgttacagtaatatagacggaatcaaattgtatgactctaagataggatgctggatgaagctcaagggtttggaaggattgcctgagtttgctagttattcttatgttagattagcggattatggtgggaagatggcggttttgtgggacaagttacctactactggcaataataacatggtgatttggtgtgcggtaatcacacttgaaaagcgccacaatgaaaacatttgggggagggttgagtggtttgatgctgtgcttacagtccctgagccttatgaattcgtgtgtgctcgttccgctaatgtttgatgaattgttgactcggttggggtgttcacattcgtagcaaggacggtaaaaagatgtgtactctggaagagagtttggtcgtgtagttacgagaaattttttgttttatttcgcttcgtttgcaaaggctttgctttgcttgcttgcttattacaatcttataaaccaaatgattatggctaaaaaaaaaaaaaaaagggaatattatcaccccaaaagaagataaaaaaaaaaaaaaaagnnnnnnnnnnnnnnnnnnnnnnnntgctcaatnnnnnnnnnnnnnnnngagannnnnnnnnnnnnnna

SEQ ID NO: 132676 - DNA, 642 bp, Arabidopsis thaliana
  unsure (1)..(642): unsure at all n locations
aatnttagggtcgtcaaaaagcgagggaccgttaccagaaacagtcctctcttctctcaaagctcactaggcagcttagcattcacgataacccgagcagctgctgcttcaagctggtctgacaatagtggcactgaaaccagcccgagaaccaatggagggtcatcaggagaggactggatgaatgcgtttaacgcagctgctagtggacctgactcattgaagagatatggatctggcggccatagccgtcgttacagtgatccagcacagaatggtgaggattcttctggatctggtggcagctcccgtcgcaccacaccaaaccggctcccaccagctccgccacagtctggatcatcttacaggtattagaaacctgtttggtttccaggattgttattgaacgaaccataaaacacattcttttctttctttttctgccctttcggattggtccctgtttctgggactatttttcttatgtctcactagtttaaaaaaaaaaaaaaaaccagaatgataatatgatgatgatgtacttgcgtgtggttgtagatagatatttgttagagagacacatatatatgagtttggtcttcatattggtcatatgctttagattaaagaaaatgttacttt

SEQ ID NO: 132677 - DNA, 691 bp, Arabidopsis thaliana
cactatagaagatctatgacgtcgcatgcacgcgtacgtaaccttggatcctctagagtcggcgccctttttttttttttttaagaaaaaaatccaataaacatgtaaaaaaaccttgcttttttgtaggcacaatgaaaatacaaccattgaagcaataattcgtaaataagagaaaaaaaaaggctaagctaattaagcgggtgcttacgagccacctcagcaatatgcagccacgtcagcacccaaaacagagagatgtggatgatggtttggatcagaactgaccaccttggtaggtttgtccgaactgccaattagaaggagccacgtcgttgctaacgagtgtgcgaccatcgctggtcgttacctggaaggaaaggctttggtcgttcttgtatgaattgctctgccagttttgtccccagtttctagacatcgcttgccacgactgtgtttttgagcctttgattgagacggcgtgtacgtctcctgctcctcctacgttggagatcagaacgaggttgaggtatgagtgtccgttgatcgtaaaccttattcctcctttcttcatacatgggactcttcggaaagagacaggaacattgcccgcacgatactgagcaatctgaaaaaagctggctcggcgaggtccaatgctgaagaggaggattgcccaacctcctttatc

SEQ ID NO: 132678 - DNA, 473 bp, Arabidopsis thaliana
tcgcttttttttttttttttttcgctcacagaaatgtattttcgttggtaatatgctcacaatatatatatatcttgtgtttgagtttgagtttgatgtatcacacaagattagcataaattatttgtctccttctctggctctctgcacccattgtctcgtcggttttcttggatcttgcgaattcggcttcctttcattgacagtaggtccccggcctctgcttctgcctctgcctctccatctccctcgacctctcctgttggtggagctgctagagtttgtctctgattcagcttctttgggttcctcttctccttgttcttggctttcaccagcttcttcttcttcgtttcgtgacgttgatgcatgagctggtggaggaagatacataccgggcaccaccgatatgtttttcttcggttgaaccaaaccacccttttcttcctgcgtctttagaatagactcaaacc

SEQ ID NO: 132679 - DNA, 476 bp, Arabidopsis thaliana
  unsure (1)..(476): unsure at all n locations
nnnnnnnnnnnnnnnnnnnnnnnnnnnnnnnnnnnnnnnnnnnnnnnnnnnnnnnnnnnnnnnnnnnnnnnnnnnnnnnnnnnnnnnnnnnnnnnnncctttntttaatcctatttttgtttttactttgattggagggaaaaaaaatatgaattgactatgcgatattacacattttcttattatttatacatcgaattttttcattccttatgggaaaaagggaatcaggttactttgaccgaatcaataacccaatgttgaccatcggttttgacctttaaccggttaatctctgcgaacagattcacggctctcctcactcctctattatccgccgccgtgaaataatcgtgaccaaatataacaccgacgggtcggagtatccgaaccgcccggttatatccgcccatgccgaattaagatcgagacccgcgtgtatcttcaccaggttcgccgtcactccccctcacaca

SEQ ID NO: 132680 - DNA, 818 bp, Arabidopsis thaliana
  unsure (1)..(818): unsure at all n locations
nnncnnnnnnnnnnnnnnnnnnnnnnnnnnnnnnnnnnnnnnnnnnnnnnnnnnnnnnnnnnnnnnnnnnnnnnnnnnnnnnnnnnnnnnnnnnnnnnnnncctttttttttttttttttattgaggacaatctaactgactcagaatcctgtagctcttacacatttcacaacaaatcatccgagaaacatgagtagccgcagtattattattccatccgtacagttttattattcgttctcgctagtagctacccaaaaaattcaacaaattggaaaataggaaataataaattcaataataaaatagtgtaagtaaatctctgagaggccgctttagttgtgcttgccatcgttaaactgtgcgtttttggacgacttgaaagtttcaagaaactctttagccttttgcaactcttgcttctgcctcgacttgtcccatttgtgttcacttgctagaatctccaccacacgctgcaacgcccgagccgctgcatcagtgtccaagaacgcgattctacatctccttgctatgaaatcaaccgctgattcgcagtactcgtgccttgcacagtaagcaacctcagcttccaaaaacggatgcccatgcgccaaccgtttccccaaaccctcctcctgagctatggtggcaactcggtcagccattgaaccataggcatgagacaaatgctttgcagcagctgtgtccattgctccaggaaccactttaccaccgcacgttccccggcccgaattccgagcttacgtacgcgtgcatgcgacgtcatagttatctatgagtgtcgcctatacaatcg

SEQ ID NO: 132681 - DNA, 523 bp, Arabidopsis thaliana
  unsure (1)..(523): unsure at all n locations
taggtgcactatagaagagcttgacgtcgcatgcacgcgtacgtaagctcggaattcggctcgagaatatatctcttcttttataagcaatggctccaagacaggcgaacggtagaagcattgccgtgagtgaaggcggcggagggaagacgatgacgatgacgacgatgcggaaggaagtgcactttagaggtgtgaggaagcgtccatggggtacatacgcggcggagatccgtgacccgggaaagaaaacccgggtttggctcgggacattcgacacggcggaggaagctgcaagagcttacgacaccgccgctagagagtttcgtggctccaaagcaaagactaatttccctcttcccggagagtctactacggttaacgacggtggcgagaacgattcttacgtcaaccgtacgacggtgacgacggcgcgtgagatgacgcgtcanaaatttccgttgcatgtcaccgggagcgtaaagtccncggtgggtatgcttctgctggtttttttttgatc

SEQ ID NO: 132682 - DNA, 579 bp, Arabidopsis thaliana
  unsure (1)..(579): unsure at all n locations
ttaggtgcaactatagaagagctatgacgtcgcatgcacgcgtacgtaagctcggaattcggctcgaggttaatatgtctaaagagaaatcatatgtaattgctcttcttctatctttgcttctctgtctttcttttcaagttggtgtctctgaggccaactacaacgcagttactacaaggtactcggattctcctcgatgcgccaatggatcttctgcaagtccaccaacaagacactgtccaagggggcgtccccgtcctcctacaccgagagtagcggtgcactctaactcaaccaaaggaaaaggcccataagtgatgaaattattttatgtctcaacactatgatttttgtatttagtttgatgtaaaatttacaggccaaagagatccaatctttgtaaatcagatgattacattaaagaaacaaatcaaaaacagattaaaacaaacaaaaaaaaaaaaaaaagggcggccgccgactagtgagctccgcgacccgggaattaattccggaccggtacctgcaggcgtnnnnnnnnnnnnnnnnnnnnnnnnnnnnnnnnnnggaaatcat

SEQ ID NO: 132683 - DNA, 561 bp, Arabidopsis thaliana
taggtgcactatagaagagcttgacgtcgcatgcacgcgtacgtaagctcggaattcggctcgagagcaaaatcacaagagcgagagagatggtgaccaaaacagaggagaagcaattgaaccagctagagattcaagtcgataatggcggaggcggaacatgggagtatctttgcctcgttcgtaatctcaaagttcgccggtccggagaaagcctgttaaaacacccggttcctctgatttgtgggtgatcagaagaaacgatctgctcttggtccagatgaatggacactaaatgagcaggtggcaattgcagctatggactgtcaatgtctcggtgtcgcacagagttgcattaaggctttgcagacaaaatttcctgggagcaaaagagttgggaggcttgaggcattgcttcttgaagcgaagggattatggggagaggctgaggaagcatatgcgagtcttttggaggataatccactcgaccaagcgatacacaaacgaagagtggctatatccaaggcactaggcaaaccttccatagccattgagcttctt

SEQ ID NO: 132684 - DNA, 581 bp, Arabidopsis thaliana
  unsure (1)..(581): unsure at all n locations
ggtacagtcataaaccgaaccggctccatgttctcttcgtcgtcgttcaatcaaacagatccacaatgctcgtaagttcaagcaaaatcacaagagcgagagagatggtgacgaaaacagaggagaagcaattgaaccagctagagattcaagtcgataatggcggaggcggaacatgggagtatctttgcctcgttcgtaatctcaaagttcgccggtcggagaaagtgttaaaacacggttcctcgattttgaatgatcagaagaaacgatctgctcttggtccagatgaatggacactaaatgagcaggtggcaaattgcagctatggactgtcaatgtctcggtgtcgcacagagttgcattaaggctttgcagacaaaatttcctgggagcaaaagagttgggaggcttgagggcattgcttcttgaagcgaagggattattgggnagaggctttaggaagcatattcnngtcttttttggnggggtaatccacttcnacccaaggggttccacaaaccgnngagttggcttnttttcnaagggnnctttnggaaanccttccnntagnccntttt

SEQ ID NO: 132685 - DNA, 503 bp, Arabidopsis thaliana
ttaggtcacactatagaagagtctatgacgtcgcatgcacgcgtacgtaagctcggaattcggctcgagctttttttctttctttcacacgaaatctcacgagacgccttatttcttcttctctgtctctttccgacggcgtaactctccggtggaatctcagctctcttatcagtagaagaagttttggtctttaaatgtaatttttttggttttgctttaaatttcaatcgttgttatcagaaaaagtaggtagcaaaaaaagagattttttacgaaaagcagattgactggcagctgaaacaacggaggagaattatagaaacgagtaaaaaacaaaaccctaaaggttgaaacttggttgacgaaaaaaatgagctgatttttttttcttcatttatttcattcttaactctttttcacatatttaagaatcagtaagaaacaaaaaaaaacagagtgagactaaaaaaaaagatgccggtagatttagataactcctc

SEQ ID NO: 132686 - DNA, 796 bp, Arabidopsis thaliana
  unsure (1)..(796): unsure at all n locations
ttaggtgcactatangaagactatgacgtcgcatgcacgcgtacgtaagctcggaattcggctcgagggccggccttttttttttttttttcgtaatctctatattatgaattgacaatcacacattttgttgttaacatacaagggtcaaacatgcatatactactaatatttcgatggcatttcaatccatactcggccgtgtttagctactcttgttcaactgtttctccctgtccggtgttattcccgcttccgttgttaccgtgaacttttatctccaaaagcctttcaacaggttgcctgcaaatggggcatcgatttgtctgaaacctcaataccttagcacatccgctacacatacacatatgtcgacatggaagaacagtggtgtctcgtggttcagaccaaacatataacacattctttaccaggatcattagcatcatcagctgaatcatcatccccctcaactgtattcccaatcccataaatctcctgcaactcatatctcgttccattaacccatagtatctgcttcaccactctaatcttaatctctcctttatccttctcataaaccgcttgagtaatctgcgcattcttcgaccccgacctttcttcttcttcattctcaccacctgagggagctgcttctgccttaaccgctaatggatagatctctgtgtctgcggccaaaannnnnnnnnnnnnnnnnnnnnnnnnnnnnnnnnnnnnnnnnnnnnnnnnnnnnnnnnnnnnnnnnnnnnnnnnnnnnnnnnntgccggcgattca

SEQ ID NO: 132687 - DNA, 709 bp, Arabidopsis thaliana
  unsure (1)..(709): unsure at all n locations
tgtttaggtcaactatagaagagctatgacgtcgcctgcacgcgtacgtaagctcggaattcggctcgagatggatacgaacaataccagaactgtgaaatttgcagctcttgcaatagttttagccgccttggtgttgatggaagaacctacgagcattaccgcatgtaacatcaacgcaaaccatctggaaaaatgtcgtccagccgtaattggagacaacccgccatctccaatcaaagagtgttgtgaactcctccaagccgctaatctgaaatgcatctgcagattcaagtctgttctccccgttttagcggtttacccatctaaagtccaggctcttctgagcaaatgtggcctgacaacaatccctcctgcttgccaagctttgaggaactgagatggagacagaccgttctagcagacttcactcgaacttgtcctgcaactgatctgaagtcttacaatatgtcttatgttccgatccaaataaattacaaactcgcagtaataatcgcagcttgtgtatatagaagaaccttgttgtatacatttaacaaaaactttaagaaactgttttagctaaaaaaaaaaaaaaaaggnnnnnnnnnnnnnnnnnnnnnnnnnnnnnnnnnnnnnnnnnnnnnnnnnnnnnnnnnnnnnnnnnnnnnnnnnnnnnnnnnnnnnnnnnnnnnnnnnnnnatatcat

SEQ ID NO: 132688 - DNA, 502 bp, Arabidopsis thaliana
ttaggtcaactatagaagagttatgacgtcgcatgcacgcgtacgtaagctcggaattcggctcgaggggagagagagagatagacaagttccgcgatgaacgaaggctcgagcgaagaagtaacgaggacggtaatggaagagaaaccagaacagaaacaaaaaggatctctggagaaaggaagatcgtgcaaaggctatttatattactcttccactctcaaatccaagtctaagaaccctcgctgcgtcggaatccctcgtactctccgtcaagttcctgattatgttgttggacaatctgaagctgaagcttctaaagaaggaaggaccttagctgatttttactatggatgtttgggttattccgtctacatgactgataaagactcatctgccattaagcaacatacaaagactcaacttcccgtttgtgtcggtcttgagatattagcagatagaagagcagcttctggcaatacttcatctgttccagcccgtg

SEQ ID NO: 132689 - DNA, 516 bp, Arabidopsis thaliana
  unsure (1)..(516): unsure at all n locations
atgannnnnnnnnnnnnnnnnnnnnnnnnnnnnnnnnnnnnnnnnnnnnnnnnnnnnnnnnnnnnnnnnnnnnnnnnnnnnnnnnnnnnnnnnnnnnnnnnnnnnnnnnccttcctttttttttttttttttgtttttttttgactttttttctttttcaactaattcgcatattttttaaatagtgaaccctttctttcaaagggaaggtttcaaattctcacactaacctattgaacaagaacatctaaaaccctctcaaacacattcatttactctacttatgattttcttctactaatggctttccctgaaaactctcctgatccaaatgttggtgccatatcgatgccggttcctcctccgactagagtagatagtccgttacttggaccatttccgttaccaaccgctctacctaaaccgaggaagtctaatgtcgtttgtttcggaccaaacaccgatgaattccccatcataagctcttttaaacccgagctgctttctccaccacag

SEQ ID NO: 132690 - DNA, 504 bp, Arabidopsis thaliana
  unsure (1)..(504): unsure at all n locations
aggtacnnnnnnnnnnnnnnnnnnnnnnnnnnnnnnnnnnnnnnnnnnnnnnnnnnnnnnnnnnnnnnnnnnctttttttttttttttggtaaatatgttgagattttgataataatgtaaaagtatatcagacttgagatctcgcggttgcaacaagatacagagaacgattgaacaaagtgaggtcaccaagagaacattgatgaaaaatatccaacacacatgagccgatgagtgttccctgccacaaatgttcctccgctgctagaggataagggcttgaaatgccagacacaagcaagtcacaactagctgtcttcttccaagccttctaatctggtacctggatcataacttataaacagtcggaactcgtttccgagtttgctagagtgatgaggcttaaacacacaagggcgaacacccaatagctcagctgcatgttctctttgcacctctcctgtgagaagaagcaacaatgaatctactgggcttgcgaggaa

SEQ ID NO: 132691 - DNA, 752 bp, Arabidopsis thaliana
  unsure (1)..(752): unsure at all n locations
nnnnnnnnnnnnnnccccttggaggttnnnnnnnnnnnnnnnnnnnnnnnnnnnnnnnnnnnnnnnnnnnnnnnnnnnnnnnnctttttttttttttttttaaaccaaacagttctgaattaacatattgatcaaacagtaacgtttaatggtttgtaacaacaagatacaaacggcgtagtccatatgttaaagccgtttagtttttttcttcttctacaaaggagccaaattattttctactaagaaacaaaaacaattaacaacacagaggaggtgcaataacaaaacctgtcgaggaagaacaccactcggggaggctgtcttataacttagtctgtctctacaaatatctccatatctggaacaagttcgtaggtttttttctctcttgtgtccaaggccgggatcccagcgattttctggactcccagcttggaggcaataagattcaattggaaatcattggagccaaatgcttcaatcctgggtaacatcagagtctggagaccattaataccaaccgggttttccaattgtgtttcatcttgtgacagggagacctctaagggtgccacatgcctatcaaattggtttgtgagattaaaagatgccccaaagggtgtttttagtgtttacaactgggacctcttccactcgcatattaatatctttaccgcttactggagcgccccgaattttttttgtttgttagtgaccacgtttacccaaatttgtgcgccgtgtttttt

SEQ ID NO: 132692 - DNA, 649 bp, Arabidopsis thaliana
  unsure (1)..(649): unsure at all n locations
gattgttttaggtgcactatagaagagctatgacgtcgcatgcacgcgtacgtaagctcggaattcggctcgagacaagttgcgatagagatgaggttttgcattctaaggagtggtggagtgcgtgtgtgatagatgatgtcttgtattactatgatgttcgtgagaattgtttgagagcttatgatccaaagcagagagcttggggagtcgttaaaggttttgaaggattgttgcctgtggcttgtaagtggtccaaaactgtgagttacaccggtgggaaattggttctgttcttgcagaaaacagagaaaacagagatttggtgtgcggaaatcgcagtggaaagacgcgagggtggagagatttggggtaaagtggagtggtgtaatgttgtgcttagtgggaattttcacataatggattgtgtagctgttgtgctctgatcttgtgttgtaatagacttgtgtcccctgcttgttcttgtgtgttttactagcttatgaatgttcttccctggaaaaaaaaaaaaaaaaaaggnnnnnnnnnnnnnnnnnnnnnnnnnnnnnnnnnnnnnnnnnnnnnnnnnnnnnnnnnnnnnnnnnnnnnnnnnnnnnnnnnnnnnnnnnnnnnnnnnnnnnagtatcat

SEQ ID NO: 132693 - DNA, 707 bp, Arabidopsis thaliana
  unsure (1)..(707): unsure at all n locations
caaccccggaacaccccnggaantcaggcacnnttggcnaccncntttggngaccaaatgnanntaaccccgngagntttcccaacgtttatgcncccnaccccaactgaccnntgtcnncngaangcccctagttggggctttgggcccttggcntctttgtgggccacttccttacctgacggattcaggacacagctcatgttggttgaagagatatgtggtaacaagaatgaatggttctgtggaattgataggagtaaagtgcctttctcgtgctacttgaggtggagatgttaaaccttatgaataagaaaggaacatacgtagcatgtggctcactctcgatatctgaagcagttgtttgctgttttcttttcttcttgcgtatgactgtgtagctgtccgtcctcttgcagctatctctctctctcttgggttgctttacttttatttcctctatattctatgcttgtctcaaacttgtctctgttttgctgtgtcgttttaagttgaaccatcataaggtgtgtgaaactttgcaatgaataaaaaagggactcatgtgataaaacatgatttggtgttgaaaaaaaaaaaaaaaaaggnnnnnnnnnnnnnnnnnnnnnnnnnnnnnnnnnnnnnnnnnnnnnnnnnnnnnnnnnnnnnnnnnnnnnnnnnnnnnnnnnnnnnnnnnnnnnnnnnnn

SEQ ID NO: 132694 - DNA, 505 bp, Arabidopsis thaliana
ttaggtccactatagaagagtctatgacgtcgcatgcacgcgtacgtaagctcggaattcggctcgagcatcagtcaactcaactccccgagcaatatcaaggacagtcgacttggtcgagtcgtcactttgtgtgagatcagaatggaagagtaacacggtgagtgttacgcaacgtttattgctacctaactccaactgatccttgttctgctgaagtctctagttggagtctttgtggccttggcttcttgtggggcacttcctacctgacggattcaggacacagctcatgttggtgaagagatatgtggtaacaagaatgaatggttctgtggaattgataggagtaaagtgcctttctcgtgctacttgaggtggagatgttaaaccttatgaataagaaaggaacatacgtagcatgtggctcactctcgatatctgaagcagttgtttgctgttttcttttcttcttgcgtatgactgtgtagctgtccgtcctctt

SEQ ID NO: 132695 - DNA, 370 bp, Arabidopsis thaliana
gtcgtcagcacagcaacgtttgaactctgtcgccaaccagctcgcggctccgggctcggcccgccagaggagcctcgctaagaatgccgacgacattgtcatcacttaccttgcccgcacacccctgaccaaggcccgcaagggtgggctgaaggacacacccgtggatgagcttctgggctcccttctgaccagcgtgcgtgagaactccaagctcgaccccagcctcgtcgaggatgtctgcgtcggcaacgtcctctgcccgggcaatgcctacagtcgtccgctccgccgtgctggccgccggataccccgtcactgctgctgcttcggttgccaaccgcttctgctcctccggcctcctggccgt

SEQ ID NO: 132696 - DNA, 1082 bp, Arabidopsis thaliana
  unsure (1)..(1082): unsure at all n locations
taggagcactatagaagagttatgacgtcgcctgcacgcgtacgtaagctcggaattcggctcgagtgcttggcaggtctaactcttagtactcctggagatctggcgatcagtcttggaaccagtgacacggtatttgggattaccaaagaacttcaacccagtcttgagggtcatgtgttacctaatcctgtggaccctgagagttatatggtgatgttggtttaccagaatgcttctctcacccgggaagaaattcgtgaccgttgtgctgagggatcttgggatgtttttaataagtatttgcagcaaacacagccactaaacaatgggaaactcggcttctactacactgaaaatgaaattctgcccccacttcccgttggctctcatcgttacattcttgagaacttctctggtgagtctcttgagggtgtgaaggaacaagaggtcggtgagttcgaccctccctcagaggttagggcattgattgaaggtcagtttctttcaaagcgggctcatactgagagatttggtatgccctcccctcccctccgaataatagcaaccggaggtggcatctgctaacgagaatatcttgagtctgatctcagcaatcttcggatgtgatgtatatactgtccaaaggcctgattcagcatcacttggggcttgcactaagagctgctcatggctggctctgcaacaaaaaaagggagctttgtttccaatctcaaatctctacgaagggaaattggaaacaacatctctgaactgcaagctcaaggtaaaagcaggagacgcgaacattgcttccacctatggtttgttgatgaagaagaggatggaaatagagaacaagcttgtggagaagttaggccacttctgagaagaaaaaaactcactactcaataattcaaataacttaaagagttgaaagaataacaacttctatctactaaaactaaaagacaagtttgcctgttgctcaaaataaaagccgactacgagcttacgatctctgagtaacaaatgattcgtaagacattgctcttnnnnnnnnnnnnnnnnnnnnnnnnnnn

SEQ ID NO: 132697 - DNA, 232 bp, Arabidopsis thaliana
aaggtagggtatgaagttgtgacgcactttgagagagtttcaaaaagaaactcaaaactgttgatatggagggttgttgtcagattcaggtttaaaaacgagttgatttttatgtctgtaagttatagataaaacgaattttgtttggtcagataatgtatgtgaaccgtgggcttacctcgtgttgttgtatacctataccatgttgtcttgcaatagaaacttttggagt

SEQ ID NO: 132698 - DNA, 842 bp, Arabidopsis thaliana
  unsure (1)..(842): unsure at all n locations
ttaggtgaacttatcagaanagctttgacgtcgcatgcacgcgtacgtaagacaatggcgactacgattccactcttcgcctctttcaaatacgccgatagcttaacggtcgtaggaatctccttctgcaccgcgttggtctgcgaagccatctcatggatcttaatctaccgtaccagctcatacaaatccttgaaatactccattgacaaggccacgaagaaactcgagacaatgaagacagagaatccatcgtcaaagctatccataaagaaatcaaagacgaagaagatcgatcgcgttgaaaccagcttaaaggaatcgagccgagatctgtcactcttcaagttcaaatccggcgccgttgtggcactggttctcttcgtcgtcttcggattgctcaattcactattcgaaggtaaagtcgtcgcgaagcttcctttccatccgatcacgatagtgaagaagatgagtcacaggggactgaaaggtgatgatccgacggattgttccatggcttttctctatctgctgtgttcaattagtatcagaaccaatctacagaaatttctagggttttctccgccgcgaggagctgctggtgctggtggtttgttccccatgcctgatcctaagaccaactgatcactcctttgaggttttttttttttgtttttgttgagatttttggaacaattttcatataaacacacagttacaagtttttgcaatcatctgatgattttggtaaaaaaaaaaaaaaaaaaaagggcggccgctnnnnnnnnnnnnnnnnnnnnnnnnnnnnnnnnnnnnnnnnnnnnnnnnnnnnnnnnnnnnnn

SEQ ID NO: 132699 - DNA, 525 bp, Arabidopsis thaliana
  unsure (1)..(525): unsure at all n locations
nnnnnnnnnnnnnnnnnnnnnnnnnnnnnnnnnnnnnnnnnnnnnnnnnnnnnnnnnnnnnnnnnnnnnnnnnctttgggttttttttttttttttttttcttggaactcctgtatatattagtttgcagacaaggtttacattctaggaatctgtctgaaatttttgaaagttaatctttttatacatgaagctcattttaaaccctttgggctactacattggatatgtcaaaatacataatacaaaaaaattacagagcaaaacaccaaaaaaaaatctaatcttgatcccaaatatgactaaagaaatcagcaaaagttggtgaagctaccaaactagtaaagccaggacttcgaaacgggctcataaatcccgccggcgagaataatcccagtggtatagccggcgaaaacatcccaccttgatgatacatcggagagaatatcccggtagaagctgttggcaacaaggccggagatggcgagagtattcccggagcataaccaccaaattcagctgctt

SEQ ID NO: 132700 - DNA, 538 bp, Arabidopsis thaliana
  unsure (1)..(538): unsure at all n locations
nnnnnnnnnnnnnnnnnnnnnnnnnnnnnnnnnnnnnnnnnnnnnnnnnnnnnnnnnnnnnnnnnnnnnnnnnnnnnnnnnnnnnnnnnnnnnnnnnnnnnnnnnnnnnnnnnnnnnnnnnnagcaaaggacatataattacatattcagcgtagtcctccacttgaaaatataggtattgcgagcatttagtgctcagaaacgaagataccggccatacccatgccagttccaacacacatagaggtcacggcgacccgcttgtcctggcggcgcagctcagagagagcagtgacgacctggcgcgcaccggtggcacccagagggtgaccgaaggcaatggcaccaccacgggggttgaccttggactcatccagagcaagcttgttgacacagtagacacccattgaggagaaggcctcgttaatctcgaaaatatcaatttgttgcttggtgaaggtaacctgggcagggtgtaggggtatgcctagtgtgtgtttactatttttttttctctgcgcccccccctccccccccc

SEQ ID NO: 132701 - DNA, 506 bp, Arabidopsis thaliana
  unsure (1)..(506): unsure at all n locations
atgatttgcnnnnnnnnnnnnnnnnnnnnnnnnnnnnnnnnnnnnnnnnnnnnnnnnnnnnnnnnnnnnnnnnnnnnnnnnnnnnnnnnnnnnnnnnnnnnnnnnnnnncctttttttttttttttttttttttttcggacaattcataattttaattaatcataacagaacgttaatctctctacattagcctgcctgcgacggctcatctcccttactttaacgtttacactttaatatgtgtcactctaatcaagattagagctcacaaatcacagttttcaaatattaaatcctataggtaaaatcatagccattattactatttaatcaaagtgagagaaaacgcttatttaaccaaacattaatatacggttaaaaagactattcttttcttttctttttgacagcggctaaaaagactattcaagagacttaacattacgtataatccatacttagattttacgaaagtcggactaatgatgtttgaatctcttcgagt

SEQ ID NO: 132702 - DNA, 489 bp, Arabidopsis thaliana
  unsure (1)..(489): unsure at all n locations
nnnnnnnnnnnnnnnnnnnnnnnnnnnnnnnnnnnnnnnnnnnnnnnnnnnnnnnnnnnnnnnnnnnnnnnnnnnnnnnnnnnnnnnnnnnnnnnnnnnnnnnnnatgataaaaaattgtttggaaacacgatcacgggagctaaaaaagaatcattggggtccatttcgtccaaagcgataagtttgatccatcgaccaatcacctgcttatgcttcgacgtcggtccaaacattacatattacaatatctaataagtgacatgtgaatgtgatcgttgacaaaaggttacaaagaagaagaatgttaatttcgtaaggccaagactcgaagagccaaagaatgaaaatattatgtaagtgagacaataatataccggaaaaaaaaatgaaatataatggtcgtgtggaaatcacttaacccaagtgactctcttttttcatctttgcttttgctgatgatgccgagaaccgctctcaccactttcac

SEQ ID NO: 132703 - DNA, 514 bp, Arabidopsis thaliana
  unsure (1)..(514): unsure at all n locations
atgannnnnnnnnnnnnnnnnnnnnnnnnnnnnnnnnnnnnnnnnnnnnnnnnnnnnnnnnnnnnnnnnnnnnnnnnnnnnnnnnnnnnnnnnnnnnnnnnnaggacgcccttttttttttttttttaagattcaaggttttagagcttcacatacgaatgttctacacttgaaacaatgaatccaaaccaaactacataagctgcaaatatgttcaccctacccttgaaacaacactattctgcaggtcataaatcagttggggaatcttgtagctcttctcacccacgggaccatcgaacgctgctgctgatgagatccagctccattgttgcctacattgcttctattgtctgcaaaccttctcattctcattctctcttccttcatgtttgcaaaccgagaatccagtgtctgaggccattgcctttgccctcctcctcctccatttgcctgctgctgcactatcttctgcctctgctgctgctgctgctttccgacaaaccctgtttgt

SEQ ID NO: 132704 - DNA, 510 bp, Arabidopsis thaliana
  unsure (1)..(510): unsure at all n locations
nnnnnnnnnnnnnnnnnnnnnnnnnnnnnnnnnnnnnnnnnnnnnnnnnnnnnnnnnnnnnnnnnnnnnnnnnnnnnnnnnnnnnnnnnnnnnnncctttttttttttttttttttggcacattaaaccagattctcattgatgcataatgaaatctcaacttacaatgcttttctgatctatgcatctaagataaaatagtgtttacaagtagcatcgtattgaaccaattgatccagccatgtggtgtatgtcagccattacttgtttgcgttccctattatcggttagtgtccctctttaggctcggtttgcctcccctagtatctgattggtccatcgaggctgcctgtagcaaactgttgaactattggattagttgaggttgtgaattcatgtgtcattccttgccaaacgatctttccttcatacagaaacaataacctgtctacagctctttgaatggtgctatgttgatgggtaacaacaagataagacgcaatttttcca

SEQ ID NO: 132705 - DNA, 669 bp, Arabidopsis thaliana
  unsure (1)..(669): unsure at all n locations
nnnnnnnnnnnnnnnnnnnnnnnnnnnnnnnnnnnnnnnnnnnnnnnnnnnnnnnnnnnnnnnnnnnnnnnnnnnnnnnnnnnnnnnnnnnnnnnnnnnnnnnnnnnncctttttttttttttttaccaacgaaacttcttttgaatggttgtatcatctttgctacaagtttcatatccatatatcagtcttaccttttggttaacgttactttcttttttgggatatataggaattacaattacggacaggcgggtcgagcattgggtttcgacggtttacagaacccagaacttgtagccaacaactccgttttagctttcaagacagctctttggttttggatgaccgaacagactcctaaaccgtcctgccataacgttatggtcaaccgatacagaccgacgaaagcagatagagcagcaaaccggactgtcggttatggtttagtcaccaacatcataaacggcggtttagaatgtgggattccaggagatggacgggtcactgaccgggtcgggtatttccaaagatacgctcagttgtttaaagtcaccacaggacctaatttagactgcgagaaccaaagacccttctcctaaatataactataactcaaatctatgtatccaaatgaaattgaagtttgatatctccaaatatttaat

SEQ ID NO: 132706 - DNA, 679 bp, Arabidopsis thaliana
  unsure (1)..(679): unsure at all n locations
nnnnnnnnnnnatagcagtgctatgcacgtcgcatgcacgcgtacgtaagcttggatcctctagagcggccgccctttatttttttttttcattttttttttttttttcacttcgaaaaaatcatcacaacttataatagaatttagaattcaactataataaaaaaaaagtatacatattgaaattcttaaaattcgttacaacatcacgaatctggaatatttgctattcgtataagcaaaatgtacaattcacatcactaagacagattacttaacgaagacgtttagttaccttatttttcttcgtcgccgtttcacacactaacactacaactaggggtaaacgtatacttaacggggttgtctccgacgataactccgttagctttgttaccgaagtttatatatgctggacacttcacatgaagatgatacttcccggggataaaagtcccaaccttccacctcactttaccatcagcacgaatgatcaacaaaacgacaccgttatctttatcggggtcaagactaacgccgttaaaaggagcgatgggaacggaggttccgtaaacaaacggcgaccagatgccgccatctttgggcccctgatacgtgggagggattgatgttgggaaagctgatttgttggctccggtaagcagcgcacacccccagc

SEQ ID NO: 132707 - DNA, 542 bp, Arabidopsis thaliana
  unsure (1)..(542): unsure at all n locations
nnnnnnnnnnnnnnnnnnnnnnnnnnnnnnnnnnnnnnnnnnnnnnnnnnnnnnnnnnnnnnnnnnnnnnnntttttgggtttgttttttttttttttttttgaacaacaatccagtccatgtaatatttaacagtttcggacttaaagttatacatgcacatgagtatatatgatacaagagttcaaacatcatgatgatgttactaagacaagtttttacttattcatacaatatggttcacagacatttggaaaccataccaaacagactgatcaaatctcttttaagcaaaaagaatctgagaattcgatggagttatatctgcataacgctccggcgactcaacaacctcccacctcacagcaaacttattctccgactgccaaatattcccaaccgcgagatgaagattcctaccaaccacatatactctgttcccataacagttaaccgcaaacggtctacaaatctgctcaggcaattccggtccgttaatcgtctctaacgaatctgtaaccggatcataaaccttcatcttg

SEQ ID NO: 132708 - DNA, 505 bp, Arabidopsis thaliana
gatcaccaaactacttgcttttatttccaagaagcagctacaatatagtttgttaggagtgccatgaactcatgaaagcagagacactacaatcgagctcttttgtttttcttttcacttcaattgagcaaattgaagatatgattttattactcaaactatcttttatgttttttagttgcaaaatcttagaacatgacagttagaccaagagcagttgataaatcaaacaaaaaggcaggcagatccgtggctgatgctgccgtcacaaccttcccatcagttacacatcccttttccatcacagcctcacctccagccaccttcaccatcaccttcatccctttcccactcgcgcatcgcttccccttaagaacaccagtggctgcaagaagcaatttcccctgtccaatagctgcaaacaccttatctttctctgcaaaactcttaaccaaagcaacagccttttcattcatcaccaatagctcaggtgatctccctccct

SEQ ID NO: 132709 - DNA, 574 bp, Arabidopsis thaliana
  unsure (1)..(574): unsure at all n locations
ttaggtaccactatagaagagttatgacgtcgcctgcacgcgtacgtaagctcggaattcggctcgaggaaacataaaatttggttgataaataaattaattaaactgggaaaataataaaattaattcaaagttgattatataaacagaatgattaaataagaaaacgcgacagactccaaaaacgatgtaaaccaaaccagtcaaccattttgacagccttttccccgccgccagaaacgcaaacgcgtttctcacacgcgcccactaactttcaatgatctcattacgcggcgtcaacgcagacaacgacgtcggcgaaatcgccggagctttacctgagtaaaccgggacagaagcgaatcgggtcgagaagcttcgtaatccacctagtccgacgtattcatcctcctcgtcgtcgtcatcgaagttcaaagagtaactcaaaggatcgtattgaaacttctcgcttgcgtcccaatcgcggccgccgactagtgagcnnnnnnnnnnnnnnnnnnnnnnnnnnnnnnnnnnnnnnnnnnnnnnnnnnnnnnnnnnnnnnnnnnnnnnn

SEQ ID NO: 132710 - DNA, 445 bp, Arabidopsis thaliana
ctcgtgccgaaaaatctgaattccaattcgaagaagaagaagaagaagaaaggagatgactatggggaatttcttaaagagatttggaagtggaaaaagcagaagcagtagaaatatgactctgggaacgacgtcgtctcaatctcatgaaccatcaccgtcggatccttcactctcccttgccgataataccaacgccaccaagaagaagtacgctctcatccctgaccgcttctcttccctcgaccaggtatcaaaagctctaagagaagctggtcttgaatcatccaatctcattctcggagttgatttcacaaagagcaacgagtggactgggaaaacttctttcgatggaaaatgtctgcacgcgctcggcgaaacttcgaatccatatgaaaaggcgatttttgtaatcggccaaacgttggctccttttgatgaagac

SEQ ID NO: 132711 - DNA, 167 bp, Arabidopsis thaliana
ctcgagccgaatcggctcgagaagaaaacaattgaggcagacatgttttcacattttctgcctgttttgaatgtgatgcttaagagaaaattcaaaatatttaaaattcccaagtagtagttactaaaagatttatatatatggtattgagaaaagttgttataacc

SEQ ID NO: 132712 - DNA, 767 bp, Arabidopsis thaliana
  unsure (1)..(767): unsure at all n locations
nnnnnnnnnnnnnnnnnnnnnnnnnnnnnnnnnnnnnnnnnnnnnnnnnnnnnnnnnnnnnnnnnnnnnnnnactttttttttttttttatacagtccattataggcccataacaaacctatatgtggcccattaacataggctaccatcatttttaagagaaaatcgacaatgcaaatttagagtttgacatatacatgtcacacttgtagaaaattggaactcagggatgacattaagaaccacaacaaagcaaaaaaaaaaacttcacttattcacaaacgcagttcaaacttaaagtaacgaaatttagtacactgtatagaattgaaaactgtatttcccttctctactttggtgtgtttaccacctcttgttcactctcttctgcttctactttggttagggactcttaaaccactttaaagccgtgttgaaggatcaaagccattagatttaccattactcttctcaccattcacgaactcgtgatcattatgatcatccatgaacctagcccagaaccaatgcttcttccaaactctctcagtcatctcctcgataggaatattcttagtctccggaagtagggaccatcacaaagacagacataatcaaaacccatggcagaaaagaagaggaatatccccaacttgaaatggcaaagctagagaggaagcttgagnggtaatggacgngagngcaagttacggnnccgtaacttgnccggganggnnccaggggntgnnncaggggtacncccgngg

SEQ ID NO: 132713 - DNA, 516 bp, Arabidopsis thaliana
  unsure (1)..(516): unsure at all n locations
nnnnnnnnnnnnagctactnnnnnnnnnnnnnnnnnnnnnnnnnnnnnnnnnnnnnnnnnnnnnnnnnnnnnnnnnnnnnnnnnnnnnnnnnnnnnnnnnnnnnnnnnncctttttttttttttttcaaaccataaaccaatgaccaatatttgatattctgtgttaaaggtgattaacaatggaaatctttgtaagacgtcgcccatgtatatacatgttttttggccttgaagctgatcaatgctagtcttgttcgtcggtatatataaatcttaacattgatttcaacattacatgagacagctcaattctcaaaccgtctaaaccagtcaacgatcgtcctggaaagaactcgagtttcgctaagaggaatggtctttagcgcctgagccacagcgtctgctggcgtgtacacagtcccaatttgccactttggatcctgtatgcaaggtgtaagatggtttccgttcagccgaaccttttcaagtgtaccaccaatagattctatccgagg

SEQ ID NO: 132714 - DNA, 359 bp, Arabidopsis thaliana
aaaccaatcttctacttgaccaatattcgttattctgcattaaaggtgattaacaatggaaatctttgtaaggcgtcgaccatgtatatacatgtagacatatttttaccagttgtttttttggtcttgaagctgatcaacgctagtcttgttcgtcggtagatatcttaacattgttttcaacaatacatgagacagctcaattctcaaatcgtctaaaccagtcaacgatcgtcctggaaagaactcgagtttcgctaagaggaatggtctttagcgcctgagccacagcgtctgctggccgagtacacagacccaatttgccactttgggtcctgtatgcaaggtgtgagatggtt

SEQ ID NO: 132715 - DNA, 771 bp, Arabidopsis thaliana
ctatgatgtcgcatgcccgcgcccgggaggttggataatgtagagccgcccacccaaaaaatttttttatttttttttcgaaaaggaaattcctcttttttttttgggggttgtttgcaaagttaatgttttacagtacatacagaattacatggtacacgctgattgtggaacattgtcagaaacacttggcaaaccaaattgtagattctacaaaggagatggctatgtgcaagcgatttgttatgtgcagagataaagtttgttggcattgatcacgtgtaaagccgtggtcagaaaaaaagttcgtggccattgatcatgtgtaaagctttagccggttcgtgatccttactcgacagatcgggcaatttgatattttggatccgcaatctccacaagtcatgtggccacagctgaaagccacgtcttttcggttagtcagacaaatcgggcaactctgggtttgttcaggggatgcaggtgatgcagttgatggtagttctagcattaattggaggggggtaccgaatcggaaccgtgggtttacaccgggaaaattgggaccgggatcactgggaggggtacccaagcgttattccttatagagaggggacggaatttaaggaagccttgggcggactaaactaaatgagggcaaaaagacctggaggttcacctgtggggcgagaaacaaacaggggtaatatatcggctgtttcaacaaatattttgtctcgctgaggagaataaaattactctaagagcgcg

SEQ ID NO: 132716 - DNA, 514 bp, Arabidopsis thaliana
caatgtaacagatatcatcatataaacgctaaagatttcaagataatgaacatattaaagacttgtgatggttctaattcctcagatctcctgcggaaaccatattttctagaaagttccatccgtatttcccaacctcaaaggaaaacagggacgggaccttctgtgtctgagttctcactccaaaaccttgtagtggatccgagtctacgagcatttgagtttgagaatctacataaggcttcattcatctgttctgcctacgtttgcgaaaatgtctgaggatgaaactgtctgcatacagaggatacttcttttttataagaccttttatgcatttccaatacgaaaagtcgactacttctccatcttttcgaactataaacatacatcgagagctctcaaaatccgggtgatgccctaccataatatagtctataccacatccgatcttcttctcacattcaggatgataagcaagtagcatctcaataattgttctctcatgctcggg

SEQ ID NO: 132717 - DNA, 570 bp, Arabidopsis thaliana
cgattgaattaggtgccttatagaagagctttgacgtcgcatgcacgcgtacgtaagctcggaattcggctcgagtttggatttgctgctaggaatgctatctctgctactgcttttacagtcactggtgttgttaacaagttcttgactgttgtcatcaatgttttgatttgggataagcatgccactcctgttggtttggtttgtcttctttttactatctgtggaggtgttggttatcagcagagtgtcaaattggataaacccattgagaaggtcagcgagaaagatagcgagaagggagaggaagatgaggagttgacgcagttggttccggggaaactagcttctgttgtatgagagaagtgtcattgttttgcagcctgccttttcaggtgtgtaaccttttgaatatcttagccttttttacattttaacgaggtttctagtaaaagggaatacctttttctggttcctggcctctatagtattaaattttgtaaaacccttgtttcacaattattcctcatatccatttcatacaaaatcaatttctggtaaaaaaaaaaa

SEQ ID NO: 132718 - DNA, 486 bp, Arabidopsis thaliana
  unsure (1)..(486): unsure at all n locations
ccttcttcttctcactttcccatttctctttcccaaattacatctcaaatacacaatccagcaacacctttctctctctaacagcttcgagcttctacactcatggctgcttcatcctttgtagacggagaaagagatatggagaaaggaggaatgatattactacagtcaagtgagaatcaaaatcctatgatagatccttcaccaacaccttcaccatctgcaactgctactgccccagctttggttttgtctaattcaggcaagagaatggttcaagctggcaagaaaaagtatgttaagcaagtcacgggtcgccacaacgncaccgagctttcacttagcggcccaacgaggtgattttggctcctgtgcanagnattctcaagggtatttaactntncagatggaagggnttctnaggtgggggaaggagtttgantntgaagnttcggnggattcgggcattcgatttttnattgngga

SEQ ID NO: 132719 - DNA, 537 bp, Arabidopsis thaliana
taggtaccactatagaagagttatgacgtcgcacgcacgcgtacgtaagctcggaattcggctcgagataaaaaaaagatgagagaaggatctcatgttattgttttgcctttcccagcacaaggccacataactccaatgtcccaattctgtaaacgcttagcctcaaaaagtcttaagatcactcttgtcctcgtctccgacaagccctctccgccgtacaaaacagagcacgacacaatcactgtcgtccccatctccaatggtttccaagaaggccaggaacgatcagaagacctagatgagtacatggaaagagtagaatccagcatcaaaaaccgcttaccgaagttgatagaagacatgaaactatcgggaaatcctcctagggctcttgtgtacgactccaccatgccgtggcttctggatgtagctcatagttatggtttgagcggtgccgtgtttttcacgcagccttggcttgtctcagctatttactatcatgtattcaagggctcgttctctgtaccgtctaca

SEQ ID NO: 132720 - DNA, 405 bp, Arabidopsis thaliana
gcacgcgtacgtgagcttggatcctctatagcggccgcgctttatctttttttttttttttgggaggaaataagatctgataataatatgcatagaaatagaaatcgatccctgcccttaacgaacgaaatcacatagtacagtacaaccttgtaaaaagctagcagataaaaagagaacattcagtagaagccaaagagatgcagaagaacaaagctcaatgacttgaagcggctggagaagtaagctctctagaagacaacagtgtcgagcatagtgcctagtgtctgaacaatgttggatgacatgaggttcgagacatgttcttccagatgcttctttgcatcttgtcttcccacattcacaattgccagcttctctggtgacaactcgtcctcctcttga

SEQ ID NO: 132721 - DNA, 521 bp, Arabidopsis thaliana
  unsure (1)..(521): unsure at all n locations
aagttaatccttcttcatcttcctctaccattacaacaaactaactaaaatgttacattcaaaccaaaagggcatcagaagagagaattaagtttcagacattgccaatggctggtcacaaaaaacaaaactcttccaccatttttcacgagaactccctcccaagcttctgaattgcacaatacatcttcctcctagacccaacagcattaatccccatatctttaagatcctccaatgtcaacaatggtaacacttgttcatcaacttcatgcatctcaaacattggccaatatctccctaaccctaactcttgtaaccatatcttcactccttcttttcctcttcctccactttgccaatctcctaacnattcnacctctctattctcgtaccgncttcgtctttcatcgggtctcggatcttctctggtggaancctaaaccttctntccnccaattctcanccctcccctctctccccncatgattccancctggcaaaacgttngggcattgnaa

SEQ ID NO: 132722 - DNA, 537 bp, Arabidopsis thaliana
  unsure (1)..(537): unsure at all n locations
nnnnnnnnnnnnnnnnnnnnnnnnnnnnnnnnnnnnnnnnnnnnnnnnnnnnnnnnnnnnnnnnnnnnnnnnnnnnnnnnnnnnnnnnnnnnnnnnnnnnnnnnnnnnnnnnnnnnnnnnnnnnnnnnnngagctaaaaccacttaaaagcccattaagaatatcacttaggcccatattaaacaacacaatttcaatcattcaacaaaacatagaaacaaactcattgttgttctgagcggaactacctccttcagaaacagcctcttgagccaacactttccatttctcagcattctttctaatctctttaccttgctctgcctccataacttcttccacacgtctcacaaactcttctcttctcacgaacccatcactggctgctttaaccctaactccaactttccacacatcctccatgaacttagcatttggagggctgatctgcccaatgaggcataccaatcattggaactcccaaattcaatccctttaagggggagttccatccacagtgggggaagaaacaaccga

SEQ ID NO: 132723 - DNA, 521 bp, Arabidopsis thaliana
tgacgtcgcacgcacgcgtacgtaagctcggaattcggctcgagcttacatcctgcgagttcatccataaaaacatcccttgtctcagaaaaaccatccaagatttagtctcatcatcatcatcttccggaggtggtagtagtcatgtcgccggcttgattcttgatttcttctgcgttggtttgatcgacatcggccgtgaggtaaaccttccttcctatatcttcatgacttccaactttggtttcttaggggttctacagtatctcccggaacgacaacgtttgactccgtcggagttcgatgagagctccggcgaggaagagttacatattcccgcgtttgtgaaccgtgttcccgccaaggttctgccgccaggtgtgttcgataaactctcttacgggtctctggtcaaaatcggcgagcgattacatgaagccaagggtattttggttaattcatttacccaagtggagccttatgctgctgaacatttttctcaaggacgagattaccctcac

SEQ ID NO: 132724 - DNA, 726 bp, Arabidopsis thaliana
  unsure (1)..(726): unsure at all n locations
gatcctaggccgtcgctggcccccgtccgtaagctcggattccggttcgagcgagaaaaaaaaatggggttcgaagacatcaacaaatatggttgctcttctcttatctcttcttattctgattttcactctttcctctcaagttaaagtcgtcgaggctacaagtcgcaaacttggtaagtacttatccttagacgcttataatttaatcacctcgcaatcatcggatcgcataagctaatatgttaattaaaccaaaaatgattaagaaattcacttgaattttatttgttcacctatgcgatttgtgcacttgatgtcgtagcaaacggaaggcccatcgtgtggactccggcatctagatcatgtggagcttcccatgcatcgtggaagaagaataatggaccttgtaaacgtcctccgagaacagctcctgcttcttacaactctccttaaaaccataaaacacatttttcggggttttttttttttttttttttttttggaatctttggctgatttgaaacaaacaaattgtatggtttttgtatgaattagcgtgtactcaaattatgaactatgcaactccatataacctttttccgattgtgtagatcgtcaaaatatgtaccaattttgtattttngttatgagatatatgtagcaaatttcagnnnnnnnnnnnnnnnnnnnnnnnnnnnnnnnnnnnnnnnnnnnnnnnnnnnn

SEQ ID NO: 132725 - DNA, 497 bp, Arabidopsis thaliana
aggtgcactatagaaggactatgacgtcgcctgccccccttccttagcttggaattccgcttgagggagactggagctgacccttatggttggcagtttgggtggaagaaaatggataagaaagctaagaaaatggaacgtttcatatcatctaatgctagtctctaccaggagactgagattcttgctgatcttgaacagactttcaagagaatgaagagcaatgaatctgctactgacaatcttttggagtatcagaaaaaagttacatggaaaagacacgaagtgaagaatctgcgggatgtgtctctttggaaccgtacttatgactataccgtcattctcttggttagatcagttttcacaatccttagcaggactaaacatgtttttggcattagttacagagtggaagcaagtgatgttagctctgcagattctgatttttttggccgcagccactccgtttctactattttaactcctgtatctcataa

SEQ ID NO: 132726 - DNA, 625 bp, Arabidopsis thaliana
  unsure (1)..(625): unsure at all n locations
aaacaccacatcacaaaagggcaaaacctagatgatgttgttgttgttgatcgtgaggcaggtgatgttagctcctccaaattcagaaaacatagaagatcaataaaccttggcgaagaaagcagcagcttcatgggactatcaactattggatcattcggtaggataaccggccgtggctcgggaaggatcgcagccgaaaacgagctgatggacaaaccaatattgtgagggatcgattccgttttaagggacattttggggcatgggggagcaataaaaaagatgaggggatgaaattgtgagaatgtataaaatatagatgaatttatgttagatcttttgttgaagggaggaagattgaaataaggaaaaagatgtggggaggtgtgtaatgcaaggatttgttgtttctttgattaagtttggccaaaattgtttgttgttgttattatttggttacttgatatgaaagggaaacccataaaaattttgtctcnnnnnnnnnnnnnnnnnnnnnnnnnnnnnnnnnnnnnnnnnnnnnnnnnnnnnnnnnnnnnnnnnnnnnnnnnnnnnnnnnnnnnnnnnnnnnnnnnnnnnnnnnnnnnnnnnnnnnnnnnnnnnn

SEQ ID NO: 132727 - DNA, 471 bp, Arabidopsis thaliana
gaattcagtgcggatcttcatgggagccgatttattcagcaaaagctggggaattgtaaaccagaagagggagcagctgtctttagggaaattcttcctcatgcttgcaaactcatgacagatgtgtttggaaattatgtcattcagaagttttttgaatatggaaactcaacacagagaaaggaactcgctgatcaactcatgggacaaatagtaccacttagtctgcagatgtatggttgtcgcgtgatacaaaaggctcttgatgtcatagaacctgatcagagagttcgtttagcacgtgaactagacgggcaggtcatgagatgtgttcgggaccaaaatggaaaccatgtgatccagaaatgcatcgagaacatcccggcagacaaagttggtttcatgttatatgcattccgtggtcaagtttcctcgctctctatgcatccttatggctgccgtgtcatacag

SEQ ID NO: 132728 - DNA, 524 bp, Arabidopsis thaliana
  unsure (1)..(524): unsure at all n locations
tacccagcagtctccaggtgctcctgggagctaatggtagtcagtctgggtatgcccaaccagcagcttcagggtatggacaacctccagcgtatgggtatggtcaagcgccacagggatatgggtcttatggaggatacacacaacctgctgctggtggaggttactcttcagacgggtctgctggagccactgctggtggtggtggtggtacaccagcttcacagagtgctgctccacctgctggaccgcccaaagcatccccgaaaagttgatatgtgtatggataaatttctactgttatacaaaacatgcttccatgctcttatctttttcttgaggatttatcaatgtttgtgtttcacattttagctcttgtctgtcaactctctttatattaaagataatgttacgttttagcctgttaaaaaaaaaaaaaaaagnnnnnnnnnnnnnnnnnnnnnnnnnnnnnnnnnnnnnnnnnnnnnnnnnnnnnnnnnnnnnnnnnnnnnnnnnnnnnnnnc

SEQ ID NO: 132729 - DNA, 255 bp, Arabidopsis thaliana
cacagggctaattttattttcagcccaaaccatttcagatccataaacccgggggaattacgggacgacaaaggccggcaggatataatcctccggtacacaagccggcgaggaatgaaaccccgacactaagccccgacatggggaaacgccgtagaaagacaaaataaaacatgatgggtgattttacacataaacatagttctctctttaaccagataaaccaagatcgaaatttaactggcttcggaaatt

SEQ ID NO: 132730 - DNA, 560 bp, Arabidopsis thaliana
atcaataatcaactaagaaatctattgactttaatttcaaactttgacaaacccacatacgaatacagttgaccaaaagggaggagaagaccaaggacgagtaataataatacaggacacctttttttttttttttaatttaaggaatcttctgtatcaccaacgagtattacagaatctaaaacaaccttggcacatacgtatatatgcagtatgtaactcaccacaataaaaatcatagaacaatatacaacgcatcatcatcctactacaagtcagaattttgcaatccacgaagcagaatagtaaacggggaagaagataaagaggtgctcagatcataatacctctcatgtaattaatcgagcacctttccgtactctggtttggtccaagctgcataggatacagggcgcgcccacggtatggtttacccagtgggtgagatccagtgccggtttaggtcaacgaggtagtaaaaatccagacttgtgtgtgtcgtcttggagagctttactagttatctgtgtccaagcatttctcaagggttttactactgg

SEQ ID NO: 132731 - DNA, 529 bp, Arabidopsis thaliana
  unsure (1)..(529): unsure at all n locations
nnnnnnnnnnnnnnnnnnnnnnnnnnnnnnnnnnnnnnnnnnnnnnnnnnnnnnnnnnnnnnnnnnnnnnnnnnnnnnnnnnnnnnnnnnnnnnnnnatgcacgcgtacgtaagcttggatcctttagagcggccggcctaaagaagtcaactttatgagttgctttacatatttatcggacaaacaatttgggtacacttacaatcatgatctcataatctgacgattttttgttcacttggttacaaattagtttgagagacaaaagagaacaaagacagggatttgatttgagatctggattctcatatttggagatcgtctaaagataaatcatcatttgcagtcaaaagcttcaatttcgttatgaactgtggaggatcgtccaggctcgtggaaccgaggattacttctcttttgagttttgtggatagtttgtggcatacttttaactctgatctagtcgctccaccgacgatgaacacaaatattcgctgtcccatcttcctgaaatcgcttgacgcatgt

SEQ ID NO: 132732 - DNA, 343 bp, Arabidopsis thaliana
ggtgaattagtgatatttaggttaagctacacgtggaggcttattattcgttgatatcaactattgtccatgtctgtaagcctctccctacgacagaggttttcagagcagtaacaaacaacttacacatgagagttaacattgcacagtctgagattatactcgctagattcttttcaagtcttgaagaacaacatgtgcagcgtttcttccaggtgcacccataactccgcctccaggatgagctccgctgccacacaagtagagacctttcaaagggcttctgtaatttgaccatcctttcacagggcgcatcaggaagagagagtctaatcccatggca

SEQ ID NO: 132733 - DNA, 517 bp, Arabidopsis thaliana
  unsure (1)..(517): unsure at all n locations
ttctatatacgattcattttagggaaggttggtccgcttgcaggtcccggtccggaattaattccggggtcgacgagctcattagtcggcggccgcccttnnttttttttttttttttttttttttttttttttttnnaaaacctaaagtaagaaccttaaagatcaagtgacagatacaaacattgaatcaaattttttaaacacctttttaaatttatccaaaaaagcctttacacaccgtgctattcccacccaattcaacctcacatcaaagaacttatattgcagcctttttttgctacttgctaacacagcatcggaagtgattcacgatctatcaatttggaatcaaaatataccaggaggagagaggagggttttgatcaagaaacaagcgtacgcgatcaagccacggtgctcttctccaccatcagcaagagataccaccaatgtagagcaggttctagtggaccacaacacaaacaaagccgnaggcacaaaccgaaccggccttg

SEQ ID NO: 132734 - DNA, 386 bp, Arabidopsis thaliana
  unsure (1)..(386): unsure at all n locations
nnnnnnnnnnnnnnnnnnnnnnnnatctacaatcttattgtatataataagggggaagcatcataggtcaggggtgatcaaaagccaagtttcggaattacataaacaaatgttgcacaacacgatacagcagaagcagattctcttacttccgccacaacatttaccatcagagatcaacccgtatggtaatacaggtgtgagcaggtttggattaagtcgccttctcatcttctggtttagcttccatggccgacatacgggccacatcagcaactagtctctcaacaggcaccttgctcacatcccatcgcatgcctatatctgaaactaagcgactggtgcagtacatgccatagccagccacagccaaaccaccaaaacct

SEQ ID NO: 132735 - DNA, 508 bp, Arabidopsis thaliana
  unsure (1)..(508): unsure at all n locations
gttacgataacacgggcatccttacgactataagatttcatgaagtgattgcattgttttgaagcttcttaaatctcagaagctacataaagcagaagaacgtaagctagaatttcttctgctgtaagaatacactccaatacgcaaattaagttgaaagaatgattacaataacggaactcagacttcaaagttgaaagaatggtccaattgtcaacatggaagctcccaatagccgagatttgaatcaaggtgatgccgtctactcgagttagtagaaggagaaaaaccaacgaacagtagtgaagctttctaatcttctattgcacacagacgctttaagtatccgtaagtcaatatcatcgggggtccccaagccggcatggctaaagactctgggggcccaaccccctatagacccctttccggccattttngggnggggnttttncccnctttttccggggggggntntttncttggggcccaanncnnggngggtttntgg

SEQ ID NO: 132736 - DNA, 318 bp, Arabidopsis thaliana
ggtgaaccaacttagaatagatattccttatgaacctaaaagatcactgttgctgaaccaaatcatatagtttctaaatcagctcgacaaaaggtaaacaagcatttcattcaggtttcttcatgttcaggcaattgtcagcagcttgtccaaacagctcttgtacttgctttagctccttctctgcagcctctagttgcttttggagttcttgaccaacaagatcattttccacctggagttcagcgattcttttgagctgagcaccttcaccaccttctgacaaaggaagtgcagcaaccaaagcatcaaactgtt

SEQ ID NO: 132737 - DNA, 772 bp, Arabidopsis thaliana
  unsure (1)..(772): unsure at all n locations
nnnnnnnnnnnnnnnnnnnnnnnnnnnnnnnnnnnnnnnnnnnnnnnnnnnnnnnnnnnnnnnngggtggaactattttcttttttttgtctttttatacaaagtaatgtttacatgttgaaaaacgaagagtgccagtattactagagaaaatcgtcattctcttggtactaggaattgaggaatttagaaacaaataactaatgatcgaatctaaatctgtatgtgcaaaaatctctctaattaaaacgctttttttatatcttctccaaagatctgcattttctaatccttaacaacatttctttctcttttctttttcctacttttccttccatcacctcacaacactgtctcctcggtgccttgttccaatactcaggatccgtcttcattgaagtcaccaatatcctcttcactttagttaatcgagtatgctcaatctttccgcaatgaccatagttcttatcccctatgctataccaagttttcgtcccactatcccgtacatcctcggcaccatccatgaaataagtgaccggacgctcacaggggtcaggtttcaagggccgagtgttaaacacgaaaggtccatcgctggaagaccgccaagttttgaaggtctgcaacggcgtagtcagctccgtagcagtcaagaagtaagtgtatatctgaatggtgtatccccaagcggacgcgtggnnnnnnnnnnnnnnnnnnnnnnnnnnnnnnnnnnnnnnnnnnnnnnnnnnnnnnnnnnnnnnnnnnnnaa

SEQ ID NO: 132738 - DNA, 549 bp, Arabidopsis thaliana
  unsure (1)..(549): unsure at all n locations
cnnnnnnnnnnnnnnnnnnnnnnnnnnnnnnnnnnnnnnnnnnnnnnnnncgcgtacgtaagcttggatcctctagagcgttcgcccttttttttttttttttttagtcaataacaaataatttcattacatactgattaaagaagattacaaaaacgaatatataaagtataaataaaagaatatcgtatctaacgtatactaataggtattcaaaacagagtcgagcaagaatctgttttagggtcaaacaaagccggtaacaaatattttctcccattcagtcccttaacgttataactcccaccggtcgttgcatccacaagtaactctccagcataaccaggatacgaacctttcccatagactccagtacaagccgatccagcctcaagcggtgccgttttaggcccttggtaatatccatctccgaacgggttcgttgccgtcgcagccatgagactcgccaagttaatcaccatcccgtctaaaccaacgtcgttgttgggcgccactagtggtgggctttggcggccgtaaaccggcgcg

SEQ ID NO: 132739 - DNA, 460 bp, Arabidopsis thaliana
  unsure (1)..(460): unsure at all n locations
tttttttttttacgagaacggcccaatacaaaggctcattatttaggcccattattaaaatgtaaacacaatgaacaacagcccaataagatccatgacaaagacacccacaaagatttagatttcaattagtaaagttagcgatcgtagcgccgggctgagtcgcctgagcttcagccgccggtttcacttccttcgacggctcaacatgttttccggtaagctccacaggtaaatcagcagcaacacctttcaagtagaaagtgtaaaacagcttcgtaggatacacaagctgacgaagcttgacctgtccataagctccttcaaacacgccggagccaccggtggatagcaagcggacgcgtngggtcgaancgggggattccggaccgggaactgcagggngtacaagtttnccnatagtgagtcggattaanagcttgggggaataatgggcaaa

SEQ ID NO: 132740 - DNA, 380 bp, Arabidopsis thaliana
  unsure (1)..(380): unsure at all n locations
gtcggttattccatcgagtagaccgctcgtgttcttgaagcagagattgttgtttcttactgagtctggtgctggttccttggacttaagaagcatgaagataagagaaactgagtgtgaaggactgaaccattcgcttgnagnaacttatgtttttaatgctgcggaacggtctaaagcttatggattcacatccgagggcgagatcattcacgtattgcttcatggagatataatgaacttcaaatgtagggttagatccaagaagaagtttcaaatggaggagccagtagctttacaatcaatcaaaggctttcctccggttatcaacgaggaaaaggttttcgctttcaatgtatcgacttcagcattatgtcgta

SEQ ID NO: 132741 - DNA, 662 bp, Arabidopsis thaliana
  unsure (1)..(662): unsure at all n locations
nnnnnnnnnnnnnnnnnnnnnnnnnnnnnnnnnnnnnnnnnnnnnnnnnnnnnnnnnnnnnnnnnnnnnnnnnnnnnnnnnnnnnnnnnnnnccttttttttttttttttcatgcaaagatatatatttcatctatagctattgcccatgaacaagaaccaaaattaggccagatccacaacattttcacgtttattgttttcagattaaaaaaacaaaatctaagtatcaaattcaacaaatgaatcatatagaaagatttacccaggcgagggaatggtagatcggaatcgcatttacacgcgagcggcgataacagcaggcgcggctgaagaggcggcaccaccgaggaaagagaggaatccggtagcagcaggctcttgctcatcaaggaaaagatcttccggagctctaaaagcaccatgagcacagatcaacgcaacaccaatcatcatagccgaaaccagaacagatccaacatcggtgaggaagatcacaaagatactgaacaaaatcaaacaccctaacgtctcacgatcggagaatgtacgaccgaatagaacgatcggctgatccgtgggacggaacaagtagaggaagagccacgacgcgaggagacagaggaggaagacgagagagaaaggatgagtgacgagagagaa

SEQ ID NO: 132742 - DNA, 472 bp, Arabidopsis thaliana
  unsure (1)..(472): unsure at all n locations
nnnnnnnnnnnnnnnnnnnnnnnnnnnnnnnnccataagatagtgtgtttgtagattgtaaatataaaataatgtgattaataaatgataagaaaataacaaaactcttctatcattcattccaaatttccaaaatataaatgtattattgcgtctattatacagagatggggtcatcctaaaaaacaaaagggatacatcatacatctatccaaatgttcaactaaagtccgtgataacttaaaagctctatatggattattatttcttttccgtttgtgatcatttacaccagagattaaactgatcacaaaatcactaccaccaaattgggattttgaggttaattattacataactacaccaataaacccaactaaaactaatacggtttgattattattataaaataaaaaaaccacaaacaaatgaaagatttcttatatactcacaaacgtaaataattcgcgag

SEQ ID NO: 132743 - DNA, 492 bp, Arabidopsis thaliana
agaaaaaactatagtaactaaatttttaaaaatcttacaaaaaaaaatacaatccaaaccatatagtaatctttcgatttcatacacacaatatactaaaagtacaaagacagaatgaaatcttcaaagcaaataacaaaaccagaggttttttttcttcttcgaaatctggtttcaaggaatgtccttaagctcaaattcagagctctctttcttcgtcacttccttctccactgaatcatcatcagtcacaacaacagtaatcacatcagctttatactgatgtttcatggcaaacacaataaaaatcaagaagttcaatgctcccaagacaacaagtaaccagtagaagtagttcaatctcgctttgttaaggttacttctaagccagcttttgtctgtaaccctatcaacaagcgaaacaagcaagctactcacgaagaatcccatcgatatcgtgcttagaaacaatccggtgctcatcgatttcat

SEQ ID NO: 132744 - DNA, 543 bp, Arabidopsis thaliana
tgatgatgcagaggtttcacagaggccagcttatccatcttctaagaaagttaaggactgggacaagctggaagctgaagtgaagaagcaggaaaaagatgagaagctggaaggagacgcagctttgaacaaattcttccgggagatataccagaatgcggatgaggatatgaggcgagcgatgagcaaatcatttgtggaatcgaatgggacagtgctgtcaacaaactggcaagaggttgggactaagacaatcgagagtactcctccggatggcatggagctcaagaaatgggagatctgatctgatatgatatgatgatcctttcctttttatgcagttgtgaattttgcctaaatgtagacaaatcttgaaacctggtccctttcttcctgtaatgaggatcctaaggtttttgcttttttgttaaatatggctttctacccaaaaaaaaaaaaaagggcggccgctttaaaagattccaggttaaggaagggggcaagggacgtcatagcttttctatagttcacctaatagtattc

SEQ ID NO: 132745 - DNA, 940 bp, Arabidopsis thaliana
  unsure (1)..(940): unsure at all n locations
atatctcccaggccacccaactattctccccttttataaaaacccctccctaccctttttcgggtttgagggaggtgtctacaacaaaatggataagttccccgcttctcgggggcctaaacccttcaaagcccgtgggcgaaacccaccccctttttttcttcccccccccccccaacgaatctggcgggtcccccccgggaattttgttcccccggggcctgtcccccccccccaaaagaaaaccgcccccgctccggtgttccttttaacaaaggcctacctttggcccccccagctccctgtttctcaagggaatcattggggcagcaaaaaaaacccaaaacccttaaggtccctcgttttnncgcctgtttggttttgataacaaatcattccccactgggcctttcgggacaaggggcccttttttgttccaatgtcaaaccatttttaatgcaaattcttgttcaaatggaagattttttcctgcaaaattctctttcaatcgccagcttgatccggggccccggtaaaaccaatcgggttttcccccgcaaagtggggaaaaccaaagaaatggccttggtcgaagatgataccaagcctacccccagtaggcccaataaagtgccccttaattctccatcgggtttccagaaggtccctctcttggaaagttccaagaccttttatacatgtatgagtatcatcaactagcccccatcccgcctatatatatatgtgtgaaaaaattcatatgtgaattgtctttgtaatttatttgatgagacacaatgtgatctttaattttaggatccaagtgttttctaatcacaatctagcaagtcctttttataaaaaaaaaaaacaagcgcggccgctatagaggatccaagcttacgtacgcgtgcatgcgacgtcatagtaaatctaaggt

SEQ ID NO: 132746 - DNA, 407 bp, Arabidopsis thaliana
gcgactaaccctaattggatacttggtgcgggtttccttgcgggcgagtatttctgtgttccattgtgggacattgctcagactcaaatcatgagagagtatccggccgagtttaccgttatttgcttttatagcattggtgttagcttttggaccgcgctagtcacattgttcactgaagggaatgacttgggtgcatggaagataaaacccgatatagctttagtgtcgatcgtttgctcgggattgtttgggaccttgcataaacaatacttttccacacggtgggcaacttccgggccaaggggcctttatttgttgcaatgttcaagccattgtctattgcaattgctgttgcaatgggagttatcttcctgcgagattctctctacatcggcagcttgatc

SEQ ID NO: 132747 - DNA, 512 bp, Arabidopsis thaliana
aatttttttaggtaccactatagaagagtctatgacgtcgcatgcacgcgtacgtaagctcggaattcggctcgagaggtgggacagcttcacttttaacgtatattcttcgggagcaaaaagagtttgcctcggctacctgtttcacttttgcaccagctgcttgtatgacttgggatttagcagaatcaggcaagcacttcattactactattatcaatggatctgatctagtcccaacattctctgcttcttcagtcgatgaccttcgttctgaggtaacctcgtcctcatggtcaaatgacctacgtgatcaggttgaacacaccagggtccttagtgttgtttatcggtctgcaactgctataggatctcgtttgccttctatagccagcgcgaaagcaaaagtggctggtgctggggcgattctgcggcctgtctcaagcggcacacaggtcatgctaaagcgtgctcaggatgtagcgcaagccgttgtgcagacccgttcaact

SEQ ID NO: 132748 - DNA, 1037 bp, Arabidopsis thaliana
atgacgtcgcatgcacgcgtacgtaagcttggatcctctagagcggccgccctttgttttttttttttttttttttttttttttttttttttggaagaccaatgtacatttactcacttgtaggatgaaatatacactttggaaacttacatgagaaaggcctaaaatgttcatttcttggagagcattttatctatttggccgtttttgtttttcatttccactatctttttggcatatgatggcatgtgggtgtttgctctttgctttccccatttgcggtttacgtacaaatagtttctgatggtatggtagtccaacgagtaccgagcaaattctagacccttaggaccaaccaaatttaggatgaacgcaataatgtttccaacaaatagtggcgctggctgagcaggaccttgaccaaacttagcagcatcgtctgccttaacagtttctgtcacaaaaggtcgccgatcaccgctgctgattgttggagtgatctccaaaaggttttctaccaagctgagcatttctttcccacgttcatttctcactgtaatatactgtggatggtcagtcatgttcagacctgaatacttcggaacacccatgtaaccgataaccaaatccgctaatgcatttgtgtaatcaaagcagctgtaacacgatggagctatgacatctactaaatcgtttgcaggtagagagaaatagggaacctcttcaatgtgtccatccaagtgtttgagttggaccttgtaatcttgcataaattcataatggagaacagtctctggctctttactagctgctttcagaaacgtgtctagtccatctcgtgttccgttgtccacacaactggtgcctagtacatacaacttttccagattcagatgctgctccactgatctcaatgcttgcacttggcaacccacaccgcaaaacagaagacgcttcactccggaagcctcgattaattcaagagtattcagattaggagacagagttggcttgacacctcttgcagccaaagcttc

SEQ ID NO: 132749 - DNA, 537 bp, Arabidopsis thaliana
  unsure (1)..(537): unsure at all n locations
nnnnnnnnnnnnnnnnnnnnnnnnnnnnnnnnnnnnnnnnnnnnnnnnnnnnnnnnnnnnnnnnnnnnnnnnnnnnnnnnnnnnnnnnnnnnnnnnnnnnnnnncctttttttttttttttcacgagggaaatagttttggatattactaacatactacaagttgagaaacagtaggaccaatgtacatttactcacttgtaggatgaaatatacatttggaaacttacatgagaaaggcctaaaatgttcatttcttggagagcattttatctatttggccgtttttgttgtacatttccactatctttttggcatatgatggcatgtgggtgtttgctctttgctttccccatttgcggtttacgtacaaatagtttctgatggtatggtagtccaacgagtaccgagcaaattctagacccttaggaccaaccaaatttaggatgaacgcaataatgtttccaacaaatagtggcgctggctgagcaggaccttgaccaaacttagcagcattggctgccttaacagtttctgt

SEQ ID NO: 132750 - DNA, 403 bp, Arabidopsis thaliana
gtaggagaacacaaacatgttttttttttctggtcatagcttcctaggcacaatcactcttattgccatattgtgtgagaaacaaaatcatgagaaagattctataatctcaagaaggcgttgaagccatgaactctaaaggaaccaaagaaggaaagagttctgtaaatctaaaaccatgtcgttgattctttgtcttcaagcagtttgagcaactggttcatcagatgcttcaagcctttcgattccttccccaacctcgactctaagaaaatcggtaaccttcactggagaacctacctccttggacaaattatccaccagtgtcttaatgtttatagcatcgttcacaataaacttttgctccattagagcaacttcttcaaaatacttacggagacgc

SEQ ID NO: 132751 - DNA, 502 bp, Arabidopsis thaliana
  unsure (1)..(502): unsure at all n locations
nnnnnnnnnnnnnnnnnnnnnnnnnnnnnnnnnnnnnnnnnnnnnnnnnnnnnnnnnnnnnnnnnnnnnnnnnnnnnnnnnctcactagttttttttcgccctttttttttttttttttttggattaaactcaatgcataacaagtggtgtagaagtattgatacattcctgtaatgtcactagcaatctcaaacaatcatgatacatcatatttctctcatggagccaaaatccccggctggtggaaaaataatagtttgcgcaagtgtgtatgattatttctattgaggtgaaaaacaatctaaggttttctttttacttttatttccaacacaaaattgattacgcatatgtattccacatgcaaagaattttaaataccgggatttgatagtgaacttatgctgcgacagactgtttctcctcgtaatcgtcaagccttaaagcttccaatagccttggccatgactctgggatgcctccaggtaagtcaaactccat

SEQ ID NO: 132752 - DNA, 650 bp, Arabidopsis thaliana
  unsure (1)..(650): unsure at all n locations
atgatttnnnnnnnnnnnnnnnnnnnnnnnnnnnnnnnnnnnnnnnnnnnnnnnnnnnnnnnnnnnnnnnnnnnnnnnnnnnnnnnnnnnnnnnnnnnnnnnnnnnncctttttttttttttttttttttttaaaacaagtaaactctgtgtataataaatatttataatgtacagttgatgaggatgatgaagctgagggagctcatgacgagtgtgaatcacactcgagctcagtaattaagagttccatcatctttttatacattggcatataatgatcgtttatcattgttctcgatagcctaatctttctgtacagttctcttggcgtctcatatatccttacacgctccaccgtcgtcgttcccactaccaccacttcgtcacgctctgtttcagactctgtctcagttactgacactatgtgcattatcttacccggcgggtaaaaccgctggttctctatcaaatccattgaagatgctggataccggactctgggtctggcctgtggaggaatcgcccccgccagtaatgacagtctcttccccggtaaccccttgcggtgcnggtcttccnccaagggtcacggcccttcgnccccngcgngcaatcnnggcagtcgnccaaggcacctttggaaggtta

SEQ ID NO: 132753 - DNA, 728 bp, Arabidopsis thaliana
  unsure (1)..(728): unsure at all n locations
nnnnnnnnnnnggcaaatatttgatttaccattaacttctcatagagaaaaaganttctgaaaatcatgcattatcaacaaacataacaattaacacaagttgaattacaattcaatttaaaacaaatgggttattacaattttgttcaccacgatacaacaaattaataatattatatttaaaagaattacaaatatatggtttaacaaccaacgtggtcacgccagtccaagaacaagagagcagctgcatagtgagacaaagcacccaacaaaacgaacacttggaagatctgatgactatgtcccacacgatcaaaccatcccggtttaagcctttctggcactctccctacgtagaatcctgttccaacaagatagaacactgccataagcaactcgtacacgagcgtcacgttcctttgcgggtttcccccaatttgaccacttagcgcgtggggagctgggacaatcccaaacangccccatgggaggcaaagagcnaagcncgggaagctcggtactttggggaccgggaagtgatgggggtggaaagtgtgatgattgtgaanttcccctgggatgtgatccctccgggggtnntgaggtnccccgggggggtgncttggaaaatnttaaatttggtngggnaaaaggaanttttgcnttggngggngtccggggntgctnttttggggagggngantnagcctttttggngggaaatt

SEQ ID NO: 132754 - DNA, 607 bp, Arabidopsis thaliana
ttaggtaccactatagaagagtctatgacgtcgcatgcacgcgtacgtaagctcggaattcggctcgagcaaagagcatcatcggcgctgaagaagaagaagaagaaaatggactcatctttgtcgcagaagttcactcttgcttatgcttctctcctcggagttggtgggttgatgggttacctgaaacgcggaagcaaaatatcacttgtcgcaggaggaggttcagctgcgttgttctattatgtatacacggagctcccaggaaatccagtcttagcatcctccattggcattgtggggtcggcggcactgacagggatgatgggatcacgttacctaaggacgaggaaagtggtaccggctggacttgtgtcggtggtgtcactcgtcatgactggagcttacttgcacggcctcattcgctcaagttgaagtgtctctgctatcttccttggacctattttccaatattgttaaggttttttgggtgcgcatttcaaatttctgaaaattgttgtataaatgctttgtggtgttgtttcttttaccaagttcttatgtccttgtgtacttttaagagattatatgatgcttcgagttcttc

SEQ ID NO: 132755 - DNA, 262 bp, Arabidopsis thaliana
gagaaacaagacatagaagctaaagctgcagaaggtggatggactgtggtcgtgcatcacaaaggaaggaaaaagacaacagaatctgtgaccggaacagccgttggatctttttctcaggctgctttggaggataagatcgctaaaaagaaacagagtgagcctgtcgctcatggtttctaccgtttccaaaggcgagatgcacaacgcaatgaactcttggcgcttcagagtaagttcgaggaagacaagaagaggatac

SEQ ID NO: 132756 - DNA, 262 bp, Arabidopsis thaliana
cagaagtctctccttcgctgtcagctctgttctcagcattagtagaattgcagtggagaccagacaccagatcccatctctcttcaagccttacagggaccggaattggggaaaaaggtgggaaatttttcaagaaaacatgaatacttaacacttcgcaactctttcttcaatgttgttttttgaaagtttcttaggttctctttctttgtttcttctcgttgaacaatgtagcaattactgtaaattctactttttatcc

SEQ ID NO: 132757 - DNA, 766 bp, Arabidopsis thaliana
tctttctcaacccaagcatcgagttttccaggtaactcagtctaaatgatgaaggcaaccgctgcagattaatctgtggccaatatcaaggagcgtagttaggttttaccaggaaaattccagtggttttggaagtttggacgcaatgtcactgctgaggagacgagatgtaatggagtcgaaagtagtaagagcgatttagtttgctcttctgagtcacattctcttccacaggcttcatcgtcgggcagcaaaggagacacagaccagaatgtgatgaatactctgaaaaacccttggccattcggtcctcgaacaccattccggtgatagagcccgttttccagcaagaacggggtccgggttcaggccggcctaattgagcatttatctaagaacaatttggtcgaaaagggacaagtcacagccatgactgctctgaaggagcttcgaaaaattcgtaatcttttgttggaaatgtgatggaccctttgattcttcttgttctgctctctgtatatatatatatatctaattttttgtaaagtattgttctttagagcacagaataaaattaaggaaacgttttccttgatctctgtcgattttgctgcagaaataccaaaactttttggtttagcggtcatgtgtaagatgttatcaataaagatacctaagtcctgaaaaaaaaaaaaaaaaaaagggcggccgctctagaggatccaagcttacgtacgcgtgcatgcgaagtcatagctcgtttata

SEQ ID NO: 132758 - DNA, 545 bp, Arabidopsis thaliana
  unsure (1)..(545): unsure at all n locations
aggtgacactatagnagagctatgacgtcgcatgcacgcgtacgtaagctcggaattcggctcgagcttgagcgaaggaggtcgcgatattggagagatcttttctaatggcagcgttgggagaatcatcatcctcagagatggacaacgcgaaatcgccggagattcaacaatcttcgccagtgcatccgccggagtatcagaagatcgcaacgacgacggtggaaaatgcggcttcctggatcgatgatgcgttgcgtcaggcgcttgtttaccagaagacgatcacggagacggtggattctaccattgacgcctccaaagctcgattgtctcagattcgagatacttctgtagctcacacgagccaaaccatcgattctcttcgagacattgcttctgagtataacgtttacgagcaaatggtgtttgggaagatcaaagatgggtgtgaatgttgctgcatctcatccgctaatatcaggcaccttagcttttggagttgggattcttgctctgaaaaagaccagaagatttgtatatta

SEQ ID NO: 132759 - DNA, 499 bp, Arabidopsis thaliana
taggtacaactatagaagagttatgacgtcgcacgcacgcgtacgtaagctcggaattcggctcgagacaaacacaacagaaacttaaccaaagacatatctctctctcctcaaacccacctcttgtctctatgggatcgcaactctcaaacgcaatcgacggtaaagataacaccaaaaccatcggatcagcggatccggaccagcttatggagatcgaatccttggagaagatcttaaattacaagttcaaagacaagagtttgttgctgaaagcgttcacagacgctagttacgttgatgacaagagtgaatcgtacgaactcctagaacttttaggagattcgatcctaaatatgggtataatctatgattttattaagctctaccctaaagaagcacctggtccgttgaccaagctccgagccgtcaacgtagataccgagaaattggcacgggtcgctgtaaatcaccaactctatagctatctccgtcataa

SEQ ID NO: 132760 - DNA, 508 bp, Arabidopsis thaliana
taggtgcacactatagaagagtctatgacgtcgcatgcacgcgtacgtaagctcggaattcggctcgagcgcgatatcctcccttttctgagactagctgttccttctgcacttatggtctgcttagagatgtggtcctttgaacttttagttctcttatcaggacttcttccaaacccggttctagaaacttctgttctctcaatctgccttaatacatcaggaacaatgtggatcttcccatttggtctaagtggcgctgcaagcacgaggatctcaaatgaattaggagcgggtaacccgaaagtggctaagcttgcggtgcgtgtggtcatttgcattgcagtagcagaaagtatagtgatcggatcagtcttgatattgataaggaatatatggggattagcttatagtagtgaactagaagtagtcagctacgtagcctcgatgatgccaattctcgccttaggaaattttctagacagtcttcaatgcgttctctcagggg

SEQ ID NO: 132761 - DNA, 334 bp, Arabidopsis thaliana
  unsure (1)..(334): unsure at all n locations
cgcgcacgtaagctnggatcctctagagcggcctgcctttgttttttaagtctggagatgaataatgataatctggaggatgtatcgttaaacacaaacactagaggataacagagaaagaaaaccattccaaaccgacaaatataaataagcacgcaaacttaaaaactacaacttgataggaaatactattccggttgtgccggaaaacaactnnagngagaaacnaacaaaagagaaaanccagcgnagggccaccgccgggncnaaccgccaaagacgngacanggnnaaggcggaaagcaggagggggcaagggcagcganaaaaccac

SEQ ID NO: 132762 - DNA, 469 bp, Arabidopsis thaliana
aagattatgacgtcgaacgcacgcgtacgtaagcttggatcctctagagcggtcgcccttttttttttttcttaaacttagatgagaaactgcttctaatcaacgacgtggtgttcaacattgatctgtaagctaacctccaagattggtttatgaatgatgtgtttaacaacacagaattgcgtttacagacaagacagccttacaaataataaaagacgaaccaaaaagaattgcatactgacctaaaaactgacttctccctaggtcattgcaaaaaaccttcagtaatatttgactcaatgctctcatctccatgtgtttgatggcctcaaaaaaaaagcagcagtagaaacctcttggttagaggaaaggccatttcttgactatctctacatcatgtatatagccatttttctattacttgaacaatattatacaacataatgggtgcttcacccttaaaaca

SEQ ID NO: 132763 - DNA, 553 bp, Arabidopsis thaliana
  unsure (1)..(553): unsure at all n locations
cnnnnnnnnnnnnnnnnnnnnnnnnnnnnnnnnnnnnnnnnnnnnnnnnnnnnnnnnnnnnnnnnnnnnnnnnnnnnnnnnnnnnnnnnnnnnnnnnnccttttttttttttttttatctgaaatattttatccattcctgtctaaaaagatgagaaacaaaaagctgggagataaggtcccttcagtgccaataatacattcatagttatgatgaacaatgagcatcatactaaaaagtgtaaaaactatggtttctgagttttgaaaatgctacaagaatatcataagatgagggaggttcatatcacttaagtaactgttgcagttatctcacaaaagtgttgtcgttgtcgcgcggttttagcggattattttaaaatacaagagacgctgattcatcagtggaaaacaaatcctccgcccgagtgttcaacttcctgaggagggggtagagatgaaacccaatctgatgcatgtgttggaagaagccccaaagtgttaagcttccagacacccaaagctagccctccaaggtttagggcaaggaacac

SEQ ID NO: 132764 - DNA, 567 bp, Arabidopsis thaliana
  unsure (1)..(567): unsure at all n locations
atgatactcttnnnnnnnnnnnnnnnnnnnnnnnnnnnnnnnnnnnnnnnnnnnnnnnnnnnnnnnnnnnnnnnnnnnnnnnnnnnnnnnnnnnnnnnnnnnagtgaaaccttttttttttttttttttttgacccaataatatggtcatgtaaaaatgtgccaatgggctttacaaaagagttttatcaattcatattttctctatatatatccttacaccttaatttcaaatcctctttgaataataatcatttagtagcttttagagatgcgaggcattgctctattgctttgtctctcatcgtaaagccttaaaaccactgccgcagtttcctcaattgcactctctgtcacttcaatcactggccaagtcggattctctgcaaagattttcttggcaagctcaagctcttctttaacagaacctaactcagagtacttagtcttaaaactcgaaccaagtccaagactcttggctctagcctctcttatccctgcacaccatggnttatcacaaccaaacttnccgggggttcaacaagctggngtancgncaancggagtt

SEQ ID NO: 132765 - DNA, 520 bp, Arabidopsis thaliana
  unsure (1)..(520): unsure at all n locations
nnnnnnnnnnnnnnnnnnnnnnnnnnnnnnnnnnnnnnnnnnnnnnnnnnnnnnnnnnnnnnnnnnnnnnnnnnnnnaaaagggaaaattggatttaaaaatacaccttcatggatgggagacttaaacatgacaacatcatcatgaacttgtattactaagtactaactatcgccaatgaacgaaacccttgaaaaccgaagacaacaagagattacatctttagcatttgacacgaaaccaaaagaaaaaaaagaaaaggagtttgaatcatgttgtagacattattattgggtaattttgctccatcatctaaagaagaacctcaagagtaaagaaattcgtaactcgaaaatggggtttggtttgcctcatacggagataccataattgctgatcttgttcacttcctttgtcaaagcgtttctctcttgcttcacttcagaagcacgcttcgatatttgagtgcggaatcgagaagcttctctcgttggcagttctttaagaacatctttcaaac

SEQ ID NO: 132766 - DNA, 847 bp, Arabidopsis thaliana
cgccaagggtttttcccaatcccctaaggttgtaaaaacgatggggcaattgaatttaattttagggtggcaccaatacaaaaaattaatcagggtcggaacgcacggcgtacgtaaagcttggatacctctataagcggcccgccctatttcttttttttttagttaagaaaaataaaattattggatttgcattcaagctgggttcaaatacatagacagtgcatatttctagatgttttcgttttgccttttttttttttatcaaaaagaagacacaaagatattgcaatttatactgtaaaaatctataaaaatataatttttcttcttcttgtagatatatcaaaaggtctccgaaaattttagcacaattgtcaatagcattttttgcagtgaaattacgaacagtttctttcttgacaggatggtgcccacatccaacaaatttatcctctatatgcaaacaataggtttgattttcttcccaagtgtctctggccgtcaattacaagttcctcttgtaacacatctcattgagttctgtcattggatggctcttcattttgtgtaaacgtattattggctccaacaatggttttatcaccttccagtcggtctcggtggagttgcagtccatgaagatagctccaatggtagactctactatgtctgctagaactttaggaacttttaaaagtccgtttgaatgtaatggatatttttccatggcttccacatattctagtatttgctcctcaagcaagggtttcttatggcggagatatctatagagttggtgcggacgcgtgggtcgcacccggaaattcaggtccggtaccgcaga

SEQ ID NO: 132767 - DNA, 846 bp, Arabidopsis thaliana
  unsure (1)..(846): unsure at all n locations
gttacnnnnnnnnnnnnnnnnnnnnnnnnnnnnnnnnnnnnnnnnnnnnnnnnnnnnnnnnnnnnnnnnctttttttttttttttgttaagaaaaatgaaatgatgaatttgaatacaagctggttaaaatacaaagacagtacatatttctttatgttttctttttgccttttttttttttaacaaaaagaaaacagaaagatattacaatttatactgtaaaaatttataaaaatataatttttctttttcttttcgatatatctaaaggtctccgaaaaatttagcaaaattgtcaatagcattttttgcagcgaaattacgagcagtttctttcttgacaggatggtgaccacatccaacaaacttatcctcaatatggaaacaataggtttgattttcttcccaagtgtctttggacgtcaatttcaagttcctcttctgacacatctcattgagttctgtcattggatggctcttcattttgtctaaatgtattattggctccaacaatggttttatcaccttccagacggtctcggtggagttgcagtccatgaagaaagctccaatggtagactctactatgtctgctagaaactttaggaaacttttaaaaaaccattttgaatggtaatgggaaaattttttccatggccttttccacaaaaattctaagtaattttggcttcctccaaagcaaaggggttttctttatttaaccggagataaaggcctttttaagagatttgggtgggcgggacccccctttggggtataaaccaccggggaaatttttcggggacccggttaaccttggcaggggcgttaccccagactttttt

SEQ ID NO: 132768 - DNA, 516 bp, Arabidopsis thaliana
  unsure (1)..(516): unsure at all n locations
atgatatnnnnnnnnnnnnnnnnnnnnnnnnnnnnnnnnnnnnnnnnnnnnnnnnnnnnnnnnnnnnnnnnnnnnnnnnnnnnnnnnnnnnnnnnnnnnnnnnnnnnccttttttttttttttttttggttaaaaatgatgaagtaaaatacattttttaaactatcaatgacaatgattgagtgtctttgttgttaagaacaaaacacacacaatggttctcaaaatacaacaactgatctgtcatcgactgcaaaatctttcacacttgaagaagactcaattctgtttgtagctttcttggcctcttcatcccaatttgtaaaaatagtgacgaggccaagaccaaaaacttgaacaacgagggcacatatgattccaagccaaagcccccgaccaccaacgtgaaagtgaaaagcaagtaacaatcctgaaggaactccaacaagataatatgaaccaagattaatgattgctcctatcttctgccatccacatcctctagcaacccctgag

SEQ ID NO: 132769 - DNA, 537 bp, Arabidopsis thaliana
ttaggtgcaactatagaagagctatgacgtcgcatgcacgcgtacgtaagctcggaattcggctcgaggttgacatgacgatttcttttactactagccaaatcatttaataatcagtcacaaagaggaagagaaatgtgttcattagagaaacgtgatcgtcttttcatactaaaactcaccggcgacggcgaacaccgtctaaacccaaccttactcgactctctccgctccaccatcaaccaaatccgatcagatccatcattttcacaatcagtactcatcacaacatcagatggtaaattcttctccaacggctacgatctcgctttagccgagtcaaatccttctctctctgttgtaatggacgcaaaacttagatccttagtcgccgatctaatctctcttcctatgccaacaatcgccgccgtcacaggtcacgcttccgccgcgggatgtattttagcgatgagtcatgattatgtattgatgcgtcgtgatagaggttttttgtatatgagtgaattggatattgag

SEQ ID NO: 132770 - DNA, 893 bp, Arabidopsis thaliana
  unsure (1)..(893): unsure at all n locations
cgggtttccatgttggctcagtgcgtgaagcaacaacaacagcaacagcagcagcagcagcagcaacatcagttccgtagccttagctccagagagctcagaacaaactctagcccaatcgttggttcaccggtaaacaacaacacatggtcatcaaaatggggatcttcaaatggtcaaccggattggggaatgagctcagaagcacttggtaagttgagatcttcgtcatcgtttggtggtgatgagcctgatgtgtcatgggtccagtcactggtgaaggagactccagcagaagccaaagagaaagcagcaacatcttcctcaggggaacacgtgatgaagcagccaaatccggttgaaccggtaatggatcatgctgggctagaagcttggattgagcaaatgcagctcgatcagcttgtggctcagcagaattgagagacctaaccaaagaatcacatgttcttgtctggtctctctatgtggtagataaaaacctcttttttacaggtggtggtggtagaagggtaacaagattaacaaagaagagaagagaagaaagaagatttctttgtttttggtcaattaattttcacaaaaaacagttttttttttttttatttagagaagagaagggaccaatacaagaaaaaggcttatgggaagaaaggagatgaaacaaaaccttcttggttttctttctcccattttcaatttttttttagggatttctttctcccattatcattattattattgttattaatattattattttttatatattttattgttatgaaaaaaaaacaaaaaaaggaaggccgctctagaggatccaagcttacgtacgcgtgcatgcgacgtcaaagtcttnctatagttcaccnnnn

SEQ ID NO: 132771 - DNA, 810 bp, Arabidopsis thaliana
  unsure (1)..(810): unsure at all n locations
aggtgcactatagaagagcttgacgtcgcatcgcacgcgtacgtaagctcggaattcggctcgagcgaagcaagaggaggcagaccgagtagaactactggttcaggatactggaaagcaactggatcacctggtccagtcttttccaaagacaacaaaatgattggagcaaagaaaactatggttttctacactggaaaagcacccacaggaagaaaaactaaatggaaaatgaatgagtaccacgccgttgacgaaacagtcaacgcttccacaatccctaagctgagacgtgagttcagtttatgtcgagtctacataacaacaggaagctccagagcttttgatagacgtcctgagggagttttgcagacagagagaatgctaacaagtgatgttgcagtagctgagacatcgttccgtgtggaaagctcactggaaacttcgatttcaggaggagaacatattgatgtctctatgaacacagagtttgttgatggactatcagaaccgatgtgggactgggaacagctgacttggccttgaagctatatagattttataatcaagcaaatttaaacttgtttcaattgcttattgttagtttgaattttatgacccgaaagattctttttctttctttaccttgtaacgtgagaatttgagaaataataaatgacctagacagtgacaaaaaaaaaaaaaaaaaggnnnnnnnnnnnnnnnnnnnnnnnnnnnnnnnnnnnnnnnnnnnnnnnnnnnnnnnnnnnnnnnnnnnnnnnnnnnnnnnnnnnnnnnnnnnnntagctg

SEQ ID NO: 132772 - DNA, 517 bp, Arabidopsis thaliana
gtttcttgttgttaaaaatatcgtacaaaaatggccgatgaggtcacaatcgggtttcgcttctatcccacggaagaagaactggtttcgttctacctacgaaaccagctcgaaggaaggagtgatgactcaatgcatcgtgtcattcccgtacttgacgtctttgaggtcgagcctagtcatcttccaaatgttgctggagtgagatgtcgaggagacgctgagcaatggttcttcttcgtgccacgacaagaacgcgaagcaagaggaggcagaccgagtagaactactggttcaggatactggaaagcaactggatcacctggtccagtctttttccaaaggcaacaaaatgattggggcaaaggaaaactatggttttctacactggaaaggcacccccaggaggaaaacctaaatggaaaatgaatgagttccacgccgttgacgaaacagtcaacgcttccacaatccctaagctgagacgtgagttcagtttatgtcgagtctacataac

SEQ ID NO: 132773 - DNA, 529 bp, Arabidopsis thaliana
ttaggaccactatagaagatctatgacgtcgcctgcacgcgtacgtaagctcggaattcggctcgagaatcaagacttgtgattacttcatcagacaataacaccccagtggattctgtactttcctctgattcaatttgcatcaatgtgtcagttgatgatatccgagttggagactcgctattggttttgcctggtgagacatttcctgtcgatgggagtgtcctagctggaagaagtgttgtagatgaatctatgctgacaggagagtcacttccggtgtttaaagaagaaggctgctcagtttcagcgggaacaattaactgggatggccctctacggatcaaagcttcttctactggttccaactcaacgatatctaaaattgtcagaacgcgctgaggatgcacaaggtaatgcagctcctgtacagaggctggcagatgcaatagctggacccttcgtctatactataatgtctttatctgcaatgacggttgccttctggtatttatgtcggtcacacata

SEQ ID NO: 132774 - DNA, 365 bp, Arabidopsis thaliana
ctaaagttcttctcgctcgtaggaaccagagagattctgtctgactactgtggggtttatggttatgctagcgagatcaaggctagctcgagatgtgagcagaagatcacagtctttgcagagaatctgctactacgcacgtctctcctctagattttccggcggcggcggtgatgatggcggcggcagcgcaccggaaatcggtggtaccgattcagcacacgaatgggagaagctccttataccattcgatctggattctctaaggaattcatttcacaagataactccctttcagctcgataagctacttgagttagctctcaatgtatccacttcaatggagttgttctcatggaccggtt

SEQ ID NO: 132775 - DNA, 479 bp, Arabidopsis thaliana
cgacgacgacgacggagatagccgtaatcttagacataataataataacaattcgagtgaccaaattgagataattacaacagaccaaacagatgataaaacaaaaccaatcttctttgatttcatgagaaaagaaagaccaccagatttgaaccttttgccgagctctccttcttccgatcatgcttcaagtggagtcacgacggagatcttctcttcttccgatgaagagaccagtagttgcaatagtttcagatgaaatctttaatttaattttaatgttgactatcttaataagttatcatagttttagattaatacgactctctttcctttttattccatttttacttgaaagcgaatctgtgtcctctcttttcgtttcggtttttatatgatttcgtgaaactttgttggagttttatctgagtgattaaccacccgtttcaagaaaatgtatgttaactttattctctagc

SEQ ID NO: 132776 - DNA, 704 bp, Arabidopsis thaliana
  unsure (1)..(704): unsure at all n locations
nnnnnnnctccaagactttgacgtcgcatccacgcgtacgtaagctcggaattcggctcgagtccttctatcttgttctgcactttaaaaaaaaaaaatatccgtctcactctctcgccgccggtaacatttcccggcgacaaaacttctctactctcaccattcctccatcgtaatctctaaattcttctccattctcttcttcctcccgatcatctcgagctcttcgtgagagattatgtgattatgtaatcgttgttgctgtagaagacgatctctaacaactgattccttcatcatcaccttcgctagatttgtaattttcagagcttgagatgttggatcttaacctcaacgctgattctcccgagtcgactcagtacggtggtggactcatacttagatcggcagacatcagacaactccgccgggaatcgagtggaagagtccggtacatcgacgtcgtcagttatcaatgccgatggagacgaagactcttgctctactcgagctttcactctcagtttcgatattttaaaagtcggaagtagtaacggcggagacgaaaagcccgccgctcagcttcgtactaagagtttttcggtagtgagatgggactctacaatgtgaggactagcttnanctgatgacttcttgaccgtgtacgaaacaatgtactcgttcatcgctcgttcgtagtaaaa

SEQ ID NO: 132777 - DNA, 748 bp, Arabidopsis thaliana
  unsure (1)..(748): unsure at all n locations
aatacgactcattatagggaaagctggtccgcctgcaggtaccggtccggaattcccgggtcgacccacgcgtccgatcccatccgatctcagtattgatgtggaaaaagccaaaagagttgtccatgatctcgctcagagtagattatcgaattcgctggtccaagccgtggcattactcaggcagagaaactctaaaggagtggtcttgtcgctgaatgatttgcttgcatgtgacaaagctgtgccggctgagccaatgtcatgggaggtctcagaggaattatctgatctataggctatttattcaaagagtgatcccaaacccgcaccggaaaaagttttgaggctacaatatctgctgggaatagatgattcaactgcaactgccctccgtgaaatggaagatggagctttatcttctgctccagaagagggcaatttcgtcttttaaatctttggagaaatcacttgagttattatgtattgtgttacggccgagggtggaaaaatgattttgaatttgaaatttgaccaaagtctgtgaaaattttgtatcagaaccataaacttgatatgattaatttgaaaatctgccccacanaaaaaanaaaaaanaaaaataaaaaaaaaaaaaaaaaaacaaaaaaaaaaaaaaaaaaaaaaaaaaacaaagggcggccgctctagaggatccaagcttacgtacgcgtgcatgcgacgtcatagtattctataggtgtcctaa

SEQ ID NO: 132778 - DNA, 620 bp, Arabidopsis thaliana
  unsure (1)..(620): unsure at all n locations
aggtgacacttagaagagctatgacgtcgcatgcacgcgtacgtaagctcggaattcggctcgagggaaatgatcgagggagggctatctccaaggagaaggcctgagttggtagaaaagtccttggacgaaacgcttgtctgtagagaatagataactagatatgaagaaactctttggttatgtgttcaaaacagacatgaagcaatagagaagcgtccttttggatggagaaatctccccaaggtatatcatctttgccataaagtggctttgtttcaactcaaaaccgaggagaaaacactgaggttcattgagaaatctggttgagttgtgtgtcttaagccaaattccgaagatttggttttgaaagatggtttgtcgcctcctatatgtgttctactacatatacgtaccatttgtaattcactctctaacttaatttttttttgttgttgttccactctgtgacaaccacaggcattttgtggctaaaaaaaaaaaacgtggagctcaataaaactccctacagaancgataaaatgatccatcatggatcacattcttnnnnnnnnnnnnnnnnnnnnnnnnnnnnnnnnnnnnnnnnnnnnnnnnnnnnn

SEQ ID NO: 132779 - DNA, 882 bp, Arabidopsis thaliana
  unsure (1)..(882): unsure at all n locations
tgacgtcgcacgcacgcgtacgtaagctcggaattcggctcgagggctgatattcagcctgcctccaccgtcgctatttttggacttggcgctgttggacttgccgtggctgaaggtgcaagagccagaggagcctctaaaatcattgggatcgacatcaaccctgacaagttccaactaggcagagaagcagggattagtgaattcataaatccaaaggagagtgacaaggcagttcatgagagagtaatggagataacagagggaggagtggagtacagcttcgagtgtgcaggaagtatagaagcacttagagaagcctttctgtctacaaactcaggagtgggagtgactgtcatgctgggcgttcacgcaagcccacagcttttccctatccatcccatggagctcttacaaggcagatccatcaccgcctctgttttcggaggcttcaaacccaaaacccaattaccctttttcatcacccagtgcctccaaggtcttctcaatctcgatctcttcatctctcaccagcttcccttccacgatatcaacgaagccatgcagctgcttcaccaaggcaaagctcttcgttgccttctccacctctaaactgaacaaacatcttttacattttccaaatccgtttgattgattgttctactgcttttagagtttccttattgggtctggtccccccccatactaaaataaaagttggaaatgttttctcccnnnnnnnnnnnnnnnnnnnnnnnnnnnnnnnnnnnnnnnnnnnnnnnnnnnnnnnnnnnnnnnnnnnnnnnnnnnnnnnnnnnnnnnnnnnnnnnnnnnnnnnnnnnnnnnnnnnnnnnnnnnnnnnnnnnnnnnnnnnnnnnnnnn

SEQ ID NO: 132780 - DNA, 559 bp, Arabidopsis thaliana
  unsure (1)..(559): unsure at all n locations
nnnnnnnnnnnnnnnnnnnnnnnnnnnnnnnnnnnnnnnnnnnnnnnnnnnnnnnnnnnnnnnnnnnnnnnctttttttttttttttgagcctctaaaattcattgggatcgacatcaaccctgacaagttccaactaggtatgcagatgaacatgcatgtcagtcttaaagtaggttaaagagcattgttactaaatgaagtgtgctttgctggatgaacaggcagagaagcagggattagtgaattcataaatccaaaggagagtgacaaggcagttcatgagagagtaatggagataacagagggaggagtggagtacagcttcgagtgtgcaggaagtatagaagcacttagagaagcctttctgtctacaaactcaggagtgggagtgactgtcatgctgggcgttcacgcaagcccacagcttctccctatccatcccatggagctcttccaaggcagatccatcaccgcctctgttttcggaggcttcaaacccaaaacccaattaccctttttcatcacccagtgcctccaaggtcttctcaatctcgatc

SEQ ID NO: 132781 - DNA, 648 bp, Arabidopsis thaliana
  unsure (1)..(648): unsure at all n locations
acccccccccagacccggttcccccancaacnagncccccngcagagcanttgaccggncgccaaagctntcngcnaanactgnnccccgcccgggatgaacccgccacttctttaactaatccgacctccagttttgagtttcctataatgggtggttccgatttactacctggtttctcaaatgctttcgcccggtgggtattccccgcaagggcatggtaaaggagggtctgggagaaagaaatggacccttgcacaggaaggtaccggtggttacttggcaggtacggcagggttgaacagagtcgtaataacaggaaaagcacagaataacagttacatcttgtaaatatccgactcatacctttgtaaagatccacgtttcttgttttcttttttttttctttctttctttctattcttagcaaaatagatttcattcttgttttttcaccaccacccacaaagtttgattctgtttttctgtttttggtatatatagagggtttggtttgtttgtttttccatttttttcgtaatttattaaccgccaattcatgcgcggcaataaattgtgttattagacctttgaagcggccgcgaattcgatatcaagcttatcgataccgtcgacatcgaggggggg

SEQ ID NO: 132782 - DNA, 529 bp, Arabidopsis thaliana
  unsure (1)..(529): unsure at all n locations
cgattgaattaggtgacactatangaagactatgacgtcgcatgcacgcgtacgtaagctcggaattcggctcgagctctgtctcaaaagacaagtagattccttttttttacagtatccaataatttgtaatcatataaataatcggtgaaaaagaaggattctttgtttgtttcccgagaaaatatcctcgatttccatctcctatctgtcatcggagctttctacttccgaaggagtaaaggatcaatcaagagtttgatcttgttagaatagccgataatggaaggagatgtgttgtcaggatttggagacagacacaatatggatgggaaattgttgcagagtttccagaagagctttgtggatgttcaagacattttggaccaaaaccgattattgatcaacgagatcaatcagaaccatgaatcgaaacaacccagatacttgngtcgaaaccgtggggttgatcaaagagctcaacaaccatatcagaagagtagctagcctttatggtgatctctctcat

SEQ ID NO: 132783 - DNA, 368 bp, Arabidopsis thaliana
cacgccgtcgaggaattcttctccaccaacgaatccggcgacgtcttatcaccaccttgtcgcatctttagttgatgttgtttaaaggttttagctaataagggcatgaaacggatctgctcggtttcaagtgttcaactccttaccagaagtttcagagctttagcatcgccacgttccttgaactatcccctgcagtgtatcaagcgttcatcagttcggatggagagtagcaactttccttctggtgtcagaaccgagagtagtgtgaagccaagaggagcattgatagttctagaaggtcttgatcgcagcggggaaatcaaccacagtgtgctaaagctactctctttctttgaatggtttta

SEQ ID NO: 132784 - DNA, 815 bp, Arabidopsis thaliana
  unsure (1)..(815): unsure at all n locations
ggtnagatctacnttgctggaggtggtggtggttcggangttgcggcggcggtggaantagtatgatccggagttgaatcggtgggaagttgtgactcaatcggcnaggaanagatacggttgcatcggagcagccgttgacggagttttttatgtgatcggtggattgaaaattgggaatgagacctcacgcgcggtggcggcgcgtgcttatgcgagctctatggatcttttcgatgtggagtcgcgtcagtggttaaggagtcgttcggttcctggcggtggatgtgtagtggcggcgtgtgcggcggttggatatgtgtatgtgctaaccagtcacgcggtggagctttcgtttttggcgatttgatgcgcgtcgtcgtggtggaaacaccgggtttggaaaaatggcagaagctgaaaagtcccccgttaccggcacaaggtgccggttaagatggaaccggtgaaggtttaacctgcgtcggagtggaagataaagtggcggtggttcaggtggtgggatgcattgacgatttgcttcggcggagtgggaggggtgagagagggattagagaaagccttgtgttgctgtatgatacgacggagggagagtggaggagagcggcggatttacctgagatgattacacgcgccgcctgtgcgtgtgtggagtggtaagagnggagaccacggcgcaggattatgggtacgagaagttggaagatgctancgtacgcaggatatattaaagtgggcaaaaacaatatcattatgattggtgcacatgtttactgtntgaaaagcaatagcgt

SEQ ID NO: 132785 - DNA, 459 bp, Arabidopsis thaliana
  unsure (1)..(459): unsure at all n locations
gacttggtggccccctacaatgncnaggacttctttcaaaccccgtgntcgcgcacaaggcttctattctatgacatggaagatggacttcaaatccgtggtttccctacacgtggtgtttaactcaacggaacacaaagggacatgaacataatgggtgctgatttgatgatggagcccaacaagagatctaatcggtcgttggtgggacaggtgacttcttcatggctcgtgggatcgctaccttcgtgactgatttatttcaaggggctaagtatttccgagttaagatggatattaagctctatgaatgttactaagtagctaagaatgtgtgttttgtttgaaaattttatgttgacacagagaaatgtgtttacaataattaagttttttttttgccttttcttttgctgttgtctttttgtttatctataattattatgtgatttatttcaa

SEQ ID NO: 132786 - DNA, 618 bp, Arabidopsis thaliana
acgcgtacgtaagctcggaattcggctcgagacataacccctctcaaccaaataatacaccttcttcttcttcttcttcttcttcttcttcacagctgggtttcttctaatggcggaaccgattccctcatcgtctctgtcaccgaaatctctacaatctcctaatcctatggaaccttctcctgcatcttctactcctttaccttcatcatcatctcaacaacaacaactcatgacagctccgatttccaattctgttaattccgctgcgtctccggcgatgactgtaactaccaccgaaggtattgtaattcagaacaattcgcaacctaacatctcctctcccaaccctacttcttctaacccaccaatcggagctcagatcccgtcgccttctcctctctctcacccttcttcatctttagatcagcaaacacagactcagcaactcgttcaacaaactcagcaattgcctcaacaacaacaacagattatgcagcaaatctcttcatctccgattccacaattatcgccgcaacagcaacagattctgcagcaacaacacatgacttcacagcaaatcccaatgtcgagttaccaaattgctcaatctcttca

SEQ ID NO: 132787 - DNA, 521 bp, Arabidopsis thaliana
  unsure (1)..(521): unsure at all n locations
ctatagaagactatgacgtcgtacgcacgcgtacgtaagctcggaattcggctcgagggtagtttagatcgatggatcttcgaaaacgatgagaagattactacccttagttgcgaagagagaattcgtattttgaaaggtgtagcttcaggaatattgtatttgcatgaaggatgggagtctaaggttttacatagagatattaaagctagtaatgttttacttgaccgagatatgataccgaggcttagtgattttgggttagctcgggttcatggacacgagcaaccggttaggaccacgagggtggttggtacagctggctatttggctcctgaagtggttaagacggggcgtgcatcgacacagaccgatgtttttgcttacgggatattggntcttgaagtaatgtgtgggagaagacctattgaagaagnaagaaaccgttgatggattgggtttgggggattaatgaaagaggggggaattctaatgggcttggaccacagatgatgatgacc

SEQ ID NO: 132788 - DNA, 898 bp, Arabidopsis thaliana
  unsure (1)..(898): unsure at all n locations
ttaggtacaactatagaagatttatgacgtcgcctgcacgcgtacgtaagctcggaattcggctcgagcaaatccgccaagggaagcggctctgagcatcttcaagctctcgttccttctcacccttctctccggcggttcagaccttatcgactcgttgccgccgaattgtaaccgagccgagtgtccgagttatgaggttgtccacgccgggaatggctacgagattcatcgctacaacaccaccgtttggatttctaccgaaccaattcaagatatctctctcaacgaagcttctggcaacgattgtctgattacatgaacgggaacaacgattatcaccagaggatagagatagcacttccttatatcacccaagtctctcagaacttgagcaccttcatagtctctttcttcgttcccaaggcattccaacctgatccacctccgggaaacaacctccacgtacagagatgggactcgaggtacgtggcggtgaagcaaattagtggatatgttgcggatcataaaattggaaaacaagtggctgagctgaaggcgagcctacaaggtaccgtatgggccaaggcaattgagaaaagcagagaaaccggcggtgtcggatcggcttgggcttacacggtggcgcaatttagctggccgttccagtggagtcagcgggtcaatgagatttggtttccgtttgaaatggaagatgaagaaactcgttagtatcgttactcagtgaacaaaaaaatgaacacttttttatctaaaaaaaaaaaaaaaaaaaaaaggnnnnnnnnnnnnnnnnnnnnnnnnnnnnnnnnnnnnnnnnnnnnnnnnnnnnnnnnnnnnnnnnnnnnnnnnnnnnnnnnnnnnnnnnnnnnnnnnnnnn

SEQ ID NO: 132789 - DNA, 671 bp, Arabidopsis thaliana
agaaaaagaggagtttttagtagccaagggagaggctgagattaccaaattgaatgctttaccaaactcacataaccatctcttcttgacccttttctttaatctttaatctctttcttcttcttcttcttcttcttcttctcgccaccgctccttcctccctccttctctctgtatcagtttttttctcgataggaaaatggaacaagccgcgttgaagagcagcgtcaggaaagagatggctctcaaaacgacttctccggtttacgaagagtttcttgccgtcaccaccgctcaaaatggcttttccgtcgacgatttctctgtagacgacttgcttgacttgtcaaacgatgacgtttttgccgacgaagaaactgacctcaaggctcaacaagagatggtccgtgtttcttctgaggaacccaacgacgacggagacgctcttcgccggagcagcgatttctccggctgtgacgactttggcttctctccctacaagcgaacttctctcttccggcggatgattttgcgaaccctgaggggctctctcatttcggtggaggcctccttcacggaatatttcggggccaaacctctaccgggaccccggctgttgaaacccggcgtggttaacgggtgaccggaaacatcctgtgactgcagtcacg

SEQ ID NO: 132790 - DNA, 497 bp, Arabidopsis thaliana
  unsure (1)..(497): unsure at all n locations
gtttagcttcatctgaaactgcgaatcccgcttatggaaccgatggatccaagaaaagtgagtgattatacaaaccatgatggtggtttttgatcgccggtattacactttgtttggtttgcagctatcagattctcaacatcatggcttattttggacgagttaggcagtatcttaatagtaacaaagcattagtttttgtacttcttaagttaaaagcttagaacaaaataacactgttgttttgttctaagcttttaacttaagaagtacaaaacaacagtgttattttctataccagacacaaaaactgtgtcgttgtaataacacttaccataacattttctttcagtgtatgtttaaaacccgtttatatggttgtaaaaaaaaaaaaaaaaaaaggnnnnnnnnnnnnnnnnnnnnnnnnnnnnnnnnnnnnnnnnnnnnnnnnnnnnnnnnnnnnnnnnnnnnnnnnnnnnnnnnnnnnnnnnnnngga

SEQ ID NO: 132791 - DNA, 646 bp, Arabidopsis thaliana
  unsure (1)..(646): unsure at all n locations
gtagctcggaattcggctcgaggataggtaacagtcaaacatctgtggagattccaaccaacagggaggtctcgcttcctccttccaccatgtcaaactcttcaacttttcctccaatctcagaggggctaatgcctatagatctcccagaacagcaaaatgagttcaaggtggcctatcctgtttccccagcattaccgagtaagaattatgagaattcagaagactctgtcagctggctaagtgtgccattcctcaacttctaccgttccattaacaagaatttcctgcttagctctcagaagcttgatacatttggcgagcatagccctatctatatttcatcttttagagaggcagagcttcaaggtggaccaaggctacttctgcccgtaggcttaaatgatattgttgttccggtttatgatgatgaacctactagtatgatcgcatatgccttaatgtcaccagaatatcaacgccaaacttctgctgaaggggaatctctagtttcatatccttctgaactcaatatccctcgcccagttgatgataccatntntgaccctagcagaagccatggttcagtcgacgagagcatactntcaatatcctcatctcgcagtacctcacttctggacccact

SEQ ID NO: 132792 - DNA, 516 bp, Arabidopsis thaliana
acttagaagattatgacgtcgcctgcacgcgtacgtaagctcggaattcggctcgagtgtgaatcgaaatggtactgctggggaaagcatatatgccggaaaatttccagatgagtcaccgaaactaagacatgaggagactggtcttttatctatgtcgattgcagaccgtgacaagttcggatcacactttcatattaccttcaggccaaatcagcagcttgatagaaataatgctgttttcggaaagctaattcaagggaaagagatattgaaaaaaattgaacgtgtgggtgatgaggaacgtaaacctactgtcagcgtgaagataatccgttgtggagaatattctggagataagaagaaaagtgacggtaaaaaaaatggaaagcacaagaagtctttaagagtgagaagaaaaaagaggcgaagacactcttcatctgagtctgagagctcttcagattctgagacagattcctcagaatctgatagtgagtcagattcagacttgtc

SEQ ID NO: 132793 - DNA, 484 bp, Arabidopsis thaliana
  unsure (1)..(484): unsure at all n locations
gcgnnnnnnnnnnnnnnnnnnnnnnnnnnnnnnnnnnnnnnnnnnnnnnnnnnnnnnnnnnnnnnnnnnnnnnnnnnnnnnnnnnnnnnnnnnnnnnnnnnnnnnnnnnnnnnnnnnnnnnnnnnnnnnnnggctcgagtccgaattttccgattggtttccgttaaaacctcggaaagcaaaatttgttgttgttctctgagctcgaacatggacgctcaaaaacaggaaaagcttgaataagaatgagactatgaccatggatctttgtgtgcccatgggtgagcgaagtaaagaaggagataaagagatcctttgaagagttctttgttagataatttcttttatggacatgagatgagagtttgttttttttctttcaaaaaaaaaaaaaaaaaggnnnnnnnnnnnnnnnnnnnnnnnnnnnnnnnnnnnnnnnnnnnnnnnnnnnnnnnnnnnnnnnnnnnnnnnnnnnnnnnnnnnn

SEQ ID NO: 132794 - DNA, 537 bp, Arabidopsis thaliana
  unsure (1)..(537): unsure at all n locations
taggtgccactatagaagatctatgacgtcgcacgcacgcgtacgtaagctcggaattcggctcgaggtccagaacgaatctccctgactttggcggcccatcggagtttagcgtgcgaagaagattcagagatgttgtcacattggctgatcgattggctgagacgtatagagggttctgcataccaccacggccagataagagcgtcgtagagagccaagtaatgcagaaacaagagttcgtggagcagagaagagttgcattggagaaatacttgcgcaggctaagtgcacaccctgttattaggaacagtgacgagttgaaagtgtttcttcaggtgcaagggaagttgccactaccaatgagtactgatgtggcctctcggatgttggatggggcggtgaagctcccaaaacagttgttcggtgaaggcggagcctctgcagtgccggtgactgangtgggtcagcctgcaagaggaggtagggatctgctgagattattcaaggagctgaggcagtcagtttctaatgact

SEQ ID NO: 132795 - DNA, 715 bp, Arabidopsis thaliana
ccttcttcttcttctacatctcctcagccgtttcctacggaggattccgatcgatcccttttctctttttttttttcttctggtcaccgaatcattgtcataccccactttgagctcacaactcttcttcctcagattgcttgattagggttttcttctgcttgccgaattgatttccaaggaacaactttttatttattttcatcacctaatctttcgttttcagattccgagtatccaaataatattttaatatttcctctttcgccgccatgagttcctcgatccagatcgttgttgaggagaagcaagtggatgtttttgccctcttcaagatcaggatgaaaagaaggctccacaagtgttcaatgagctgagttttcgggaaccattggggggctgttgtgcaaattttgcttgggtactataccccttcaagaaacagctatggttaaaggctgtgagcatgcttactgtgtgacgtgcatactccgttgggcaagttacaaggagaaacctacctgcccacaatgtaagcttccatttgattttctcaatgtccaccgcgctctcgatggaagcgttgaagatttcatgttcgaggagagtgtatgcctcctcctgagggcatcatggttccagccactggaagcagtggagcgggtttcagacaatgacaatttcaactatgatttcgacattccacctgagtatg

SEQ ID NO: 132796 - DNA, 818 bp, Arabidopsis thaliana
atctcattgatcaaactcacatgtgtttgtaccgtatcacgcttgagcagttcaatgacgttctgtctcaagaaaatggtttgaatgtggattcagattctccggtctttgatctagctgctttgcagttagtagataacaaaggatccattttagaagctcctttgaatagttggtatggaaatgttgtctgcttgggaaaagaacgcgacattcctatacttacaatgacttgcacgctttccgctgttgagaaattcaaatccggtgagacccctataggacctcctgcaaaagcttatgccaaccctttaataaggggacttgtggaaggaggaagattatctaaagaagaagctgaggcttacatagacaaggctgtgtctaaccctctctagtggataattatttactcagaaaccgcccgtttgaacacgatttggagcttcggggttctgagttattccattaggataaaaacccccagtttaggaatattgtgagacctttgaatttgtcttttgaaagagaggactgtgtcctctgttagctgtggtgggcctgctccctaagcaaactctcaatggattttagttatcttcgggttttaggctttaccaagaagctggattcggttaatggattaaagaaccctcccaactgctttatattggccggaaaaaaaccattttaatttttgggatgggtaaaaaaaaaaaaaaaaaaaaaaaaaaaagggcggcccccggataattaagcctggtggaccaggaaattaattcgggccgggtcccggcaggggtcccaccttcccaaaa

SEQ ID NO: 132797 - DNA, 531 bp, Arabidopsis thaliana
  unsure (1)..(531): unsure at all n locations
tatagagacttgacgcgctgccgcgtcgtaagctcgnattcgctcagctttgcagagtctatgggactaccgcattgattctcacagcgaagcgtgcagtcatgagttagggactgtggaagagagatatctaagaagagctgaggctacatagacaaggctgtgtctaaacctctctagtgtatatttatttactcagaaaccgnccgtttgacacgatttggagcttcggttttctgagttattcaattaggataaaaactacaagtttaggaatattgtgagacctttgaatttgtcttttgaaagagaggactgtgtcctctgttagctgtgttgtgcttgctccctaggcaaactctcaatgtattttagttatcttcgggttttcggctttaccaagaagctgtattcggtaaatgtattaaagaaccctccaaactgctttatattgaccggagagaaacattcttattcttcggaatggtactttgaagtttgaagagttattttaaaaaaagatttaacagc

SEQ ID NO: 132798 - DNA, 494 bp, Arabidopsis thaliana
  unsure (1)..(494): unsure at all n locations
gaatgtattaggtgcactatagaagagttatgacgtcgcacgcacgcgtacgtaagctcggaattcggctcgaggtctcctcgagttcaaataggggcttcgggagacacttcaaggcaacctcttgggaccggtgagatctgatagtaaagcaaaagctaccgtacgtacctggttcaacgatcctgtgcctcctcgagttcaaataggggatgatagcaaattctcgatctttttcaatgtggtattcgggtaaaataatcacaaaggaatctgtagtcactggaatttcaacccttttcaatagaatacgtttgtttgtttgttccactgtaatctcacggtgtgtcatgttaatgatccaaccgaaagttccttaaacggatctcctttgtaccaaaaaactgtctggtagaactaaaattgaaccgataaatggatgagccggttcattgaaaaaaaaaaaaaaaaaagagactnnngnntttnttaaa

SEQ ID NO: 132799 - DNA, 887 bp, Arabidopsis thaliana
  unsure (1)..(887): unsure at all n locations
taggtgccactatagaagagctatgacgtcgcatgcacgcgtacgtaagctcggaattcggctcgagaaaattaaacgcaatttattgagaaaatacaaacagcgtgcactatgaagaagacgtcgaagatacaatttcttttcaatctctgcatcatatttggggttgtagtaataagaagatgtaacgcaacgacatactttgtaggagacagctccggttgggacataagctccgatctcgagtcttggacttcaggcaagcgattctctcctggtgatgttctaatgttccaatactcatcgacgcatagtgtatacgaagtggctaaagacaactaccaaaattgcaacacaacagatgcgatccggacgttcacaaacgggaacacgaccgttgctctttccaaaccgggaaaccggttctttgtatgcggtaataggctccattgcttcgccggtatgaggttactagtcaatgttgaaggcaatggcccatctcaggctcccgtgggatctccccaagccgccacttcagggattcttcaaccatcttctaaaaagaataaccctgcgaccggagtcgctagctcaaccgcccgttttgttggcgacagcggttggaggggtaccatgggaatttttgtatattttatggtttttgcttttccattcatatggttttgctgattaaaaactatctataataagtgttttcatgtatatgtgtattcatatttgccctataatgagtgagagtatttatttgttgaaaaaaaaaaaaaaaggnnnnnnnnnnnnnnnnnnnnnnnnnnnnnnnnnnnnnnnnnnnnnnnnnnnnnnnnnnnnnnnnnnnnnnnnnnnnnnnnnnnnnnnnnnnnnnnnnn

SEQ ID NO: 132800 - DNA, 534 bp, Arabidopsis thaliana
taggtgccactatagaagagctatgacgtcgcatgcacgcgtacgtaagctcggaattcggctcgaggttctagatcgcgagcggccgccctttttttttttttttttaaagaaacaaaaaattaatagattccatctaaaaaaaattgggttttgctcactcccttttctttcacatcacaatgaaaaaacaaatattaatgcaaaagtgattcaataaccctacaaaccgttcgtttgggggtgatttttttagcacttggtgaaaaattgaattgtttagtttgtgttttccaaactgataagagctcttttcttgttttatggtttgagggcgagggcgagaccaagctttggtgaagaggtcacagcctttgagtcatactcagctgagaaagtgatgtgcgacttcggtctccattctctctggaccaccatccctgctttcccactgttagaaaatctggtcttaaccactgtgaattgatccacagagtgagagcttccgacggtgaagctgttgttataattgga

SEQ ID NO: 132801 - DNA, 536 bp, Arabidopsis thaliana
taggtgccactatagaagatttatgacgtcgcacgcacgcgtacgtaagctcggaattcggctcgagctgttctatatatttcccaaacttagtgccacttagacacaataagaaaaccgttaacaagaagaaaaaaaaaagatcgaaaatggaatatcaaactaacttcttaagtggagagttttccccggagaactcttcttcaagctcatggagctcacaagaatcattcttgtgggaagagagtttcttacatcaatcatttgaccaatccttccttttatctagccctactgataactactgtgatgacttctttgcatttgaatcatcaatcataaaagaagaaggaaaagaagccaccgtggcggccgaggaggaggagaagtcatacagaggagtgaggaaacggccgtgggggaaattcgcggccgagataagagactcaacgaggaaagggataagagtgtggcttgggacattcgacaccgcggaggcggcggctctcgcttatgatcaggcggctttcgctttg

SEQ ID NO: 132802 - DNA, 697 bp, Arabidopsis thaliana
catagacgagctatgacgtcgcatgcacgcgtacgtaagcttggatcctctagagcggccgccctttttttttttttttttttttttttcagccgacaacacgtgaagattttatcaacacgtattcaactccaccgcttaaagattcacttgtccgatttataaaaaaaaaaaaaacaagtctaagcattaaattgagaaaacaaaagtacattatccgtaccggctccggtcagatctaattattaagcgcatcctcctggagcaaacccgacccgggaactcgctaagtcgtatacaacccggaaaccctgttgctggatattcccaattatggatagtccgcccatcgtaccggcaaacgcaaaacagaacttgccgttggtatccacagggatcaggtaattcgtcgccggaagtgatacgtcagctccacggaaatgtaaaaccaccgtcggtactttaacctcgttcatattggagagatcgaaacacgtgtcgaagagtgagaaatccggagctcttttcaatgtcttagctccgacccggaacgcgtctctcatagcaatataagctggtcggatcaaccgggtcacagacgtacccgaatcgataataactccaccgttaccgatctggtcaagtttaaaaagagaagccgttacgccggggacacgtgtccctccgacgctaattc

SEQ ID NO: 132803 - DNA, 538 bp, Arabidopsis thaliana
ttaggtgcactatagaagagctatgacgtcgcatgcacgcgtacgtaagctcggaattcggctcgagtgagctaatcccgaagtcaactcatgtttgtagaggatggagagctgcttgttgcgatccgattctttggaagacggtggatttgtcaaacatgagatctagtttcatcaagatcccacatagacataaggctctaatgggatcttgaaactctccatgaaccttagcggaggaagcacgaggaccttgatttttcatttcaacttgttcttgagtgatgatcagcttacttacaccgcagaaaggtgtccagggttgagacgggtcgtcctaccggcttggaacagaataaagaagactggtatatgcaaagcgataagaatctggaaagatctagagtcactaacaatgccaagcatcgcaaacccgccttatctcttaacagaaattgccaagaactgcaagaattttaaagagctgaagatcatgggtccattcgaggtcttctttgcaacacgctcatcacttgcc

SEQ ID NO: 132804 - DNA, 578 bp, Arabidopsis thaliana
  unsure (1)..(578): unsure at all n locations
atgccagttggattgatcgctacatcggtattgtggaatttccaggcattgttgtctggcttttgcatcagttggagccaccatctccaaggagccctgctgttgcagcttcaaatggattttctcatgatttcaccaccgatgttctggataacggagattcagcagtaacttctggaaacttctttgaggtccttacttcttcagagctatacaagaacaccaaggttcgagatatctctggaacattccgctgggcaccgttcctggctctgcagaaagagaactcctttttgaccatgctgttacttctttctaaatacaaaatgaagagcatcccggtggttgatttaggtgtagcaaagatcgaggaccattatcacacaatcacggagttataccatatgctggcagaatgcgcggggctttctctgggttttgaggacttgggggattcaaaaactctctcttgaaggccgggtctttcccattaatgtcaaaagggccctattcataaagattttttggagggatggaaccagttctttcaaggcattcaaaggtttttnnggngaaag

SEQ ID NO: 132805 - DNA, 424 bp, Arabidopsis thaliana
ttttcgagcttccaactcctacaatgaggtctagactgggtcctacaatgccaccaccacctatcaatgtgaggaatacgatagaccgggcagactggagtaatcgccaaccaactacaacacctggaagaacaccgaccagtgcaacaccttctggaaggacacctgctctgaagaagccaaaggcaaacgaaccaaataaaagagatatgacgtatgaggagaagcagaagcttagtggccatttgcagaacttgcctccagataaactagatgcaattgtacaaatcgttaacaagaggaatactgcggtgaagctacgggatgaagaaattgaagttgatattgatagtgttgatccagagaccctgtggagttggacagatttgaaccaacatataaaagggcttgagcaagaaaagag

SEQ ID NO: 132806 - DNA, 835 bp, Arabidopsis thaliana
  unsure (1)..(835): unsure at all n locations
gcatcatgaactccatcccaatttcatcgctcgaaccaggcggttcagtccctaaccaacccgagaaactcgtccctgcaccatactctctcgacgactcattccgcagtaacatctccttctccaaatcatcatttgaccaccgctccctcgatttcagcagttctagattctccgaaatgggaatatcctgcgacgacaacgaagaagaagcgagtttcagaccgttgattctaaagaacaagcagccaaggtggcacgagcagttgcaatgctggtgtttgaatttccgcggacgtgtgacagttgcatcggttaagaatttccagcttgtagcagcaagacagccgcagcctcaagggacaggtgcagcagcagcaccaacaagtgcacctgctcaccctgagcaagacaaggtgattctccagtttggtaaagtagggaaagatatgttcacaatggactataggtatccattatcggcgtttcaggcgtttgcgatatgcttaagcagctttgacaccaagcttgcttgtgaatagaagaaaccactcgtctccttgatcattcatgctaatcccttgtctctctctctcttttatctatgcttttggttttttttaggcaaatcaaaatttgtctcaatactcagttgctgtactgtgagagtcagacgtctactattaacatcctcttctctattctaaatcaattgaccctttaataggtagtcnncgnccnnacccnnaggncgacccgctctagagggatccaagctttacgtacgcgtgcgtgcgacgtcnnnnnnnnnnnnnnnnnnnnnnnnnnnnnnnnn

SEQ ID NO: 132807 - DNA, 538 bp, Arabidopsis thaliana
ttaggacaactatagaagattatgacgtcgcacgcacgcgtacgtaagctcggaattcggctcgaggttatttttcagaacaatttcagtcctaaaatctcagaagtcagagcatctctgtctcagatcatattagcaggaggaccaaacacactcgactcaatcttctcacttctcactccctcctccgtagaatccgccacaacatcattcaacactcacaatcctccgccaccgccgcagctcgggtcctccgtctatctccgccaacgagatatcatcgagaagttccaccttcagaacagagcaatctccactcctcatcctcctctgttttcctcaacgtacgatcatcatcaaacttccgagctaatgctccaagcggcggccgggtctccagccgccgctttcgccgctgcgttagcggctgggagggtgacgaaaaagaagaaactttacagaggagtgaggcagagacattggggaaaatgggttgcggagataagattgccgcaaaacagaatgagggtttggttag

SEQ ID NO: 132808 - DNA, 359 bp, Arabidopsis thaliana
ttcgagccgggaagaagctcaggagtcgcaatgaaatcgctgccttcgttgaagccaatccggaattcaggaacgcaccacttggagacttcaatttcactgtccccaaggtcatggaagatactgttccccctgatccgaagcttggctctccttttccaagcactactaccactacttcagagaagagcagtgtcaagcagagccataactaatatgttctcttctaccttctttctgctccctaaagcaatgcgttttgagtctttatagatttgatgttctctaaaactgttatgatattaacatctctaagcaaaaaaatatgatcttttgtctcatataaaaaaaataataaa

SEQ ID NO: 132809 - DNA, 400 bp, Arabidopsis thaliana
aacaggaaatccaagtgggaatgggacctgcaggagagctgcgttacccttcgtaccccgagcaagaagggacatggaagttcccagggattggagccttccagtgctatgataagtactcgttaagcagcttgaaagcagcagctgagacttatgggaagccagagtggggcagtactggcccaaccgatgctggtcactacaataactggccagaagacacccagttcttcaaaaaagaaggtggtggttggaactcagagtatggagatttcttcctctcatggtactcccagatgctgttggatcacggcgagcggatcctatcctcagccaaatcaatattcgaaaacatgggtgtcaaaatatcggtcaaaatcgctggaatccactggcacta

SEQ ID NO: 132810 - DNA, 896 bp, Arabidopsis thaliana
  unsure (1)..(896): unsure at all n locations
gttaaaaaacaagatttctgtcaactccttgtctcgagacacattacaaatcaaaaaaagaaaaaaaaccacgatggctcaaaatggttcgaatactactgtgaagctgatagggacatgggcaagcccattcgctataagggctcaagtggctctacacctcaagtcagtagagcacgagtatgtcgaagaaaccgatgttctgaaaggaaagagcgatcttcttattaaatccaaccctatacacaagaaagtccctgtcctcatccatggtgatgtatcaatctgtgaatctctcaacatcgtccaatacgtcgatgaatcttggccgtctgatctttccatcctcccaacactttccctcggaacgtccctttgcccggtttttgggctcacttcgttgccggaaagttgtttgaatcgatcgatgcggtgccgggagcaaaagacgcccccgccaggatgacattggcggggaatctgaatggagaatctagcggcacttgaagaggcgtttcaaaagagtagcaaaggcgggatgactttttttggaggggggaacattgggtttgtcgatataactgttggggccatagtaggtccaatctctgtcattgaagctttttcaggtgttaagtttttgcgtccagacacaacaccgggcctgattcagtgggctgagaacatttagggcccatgaagctgtaaaaccttacatgcctaccgtttgccgagttcatcgagtttgccaaaaagaaattcagtgtttagtgactacaaaaaaaaaaaaaaaggnnnnnnnnnnnnnnnnnnnnnnnnnnnnnnnnnnnnnnnnnnnnnnnnnnnnnnnnnnnnnnnnnnnnnnnnnnnnnnnnnnnnnnnnnnnnnnnnnnnnn

SEQ ID NO: 132811 - DNA, 801 bp, Arabidopsis thaliana
gcggtcgttctttttttttttttgaattaacagtttcagcaattccaatatactttcagggtaaaaggctacaaccaaactcagctaaactcagctttaagaacaaatctacaacaaaatgggaaagcaaagaacattgtgaagtaagtttttgtttttttcattcttttttccaatcttgagtttgttcgtacggatgtacgttcaaaagtaaactcatctttacattaatcttacacaagaaagctacaagggttaatacaagccttgacctgaaggtgcttgagcttcagatacagaacttgaccacacattgacgctggattgtatcaatgttaaactgataagactgcacagagtaaacgccaccggataaaaccgatgcacaagaacgatcagctgactcatgttcttgatgactgcagagacattttgaacatctagtaaccggaaagataatgactttttaatcgtctcgagttgggaataaagttaagacagttctccctccattagcgtttgcagattccaaatcctcaacgtaattactaactggactatgcaatgatggtgtagacattctctgaattggttgctgctgcgtttgcctcaccgccaagaacgaaggatcaaacttcccattagtcgtcggtgatccaaatccattactagtcggtgatccaacctgtccattactcgtcggtgaactgaatccaccattagtcggtgaaccaaaatgcgcagctgcgatttgacggtggaactgaggcggttgcaaatgaggattagctgctgcagcaa

SEQ ID NO: 132812 - DNA, 519 bp, Arabidopsis thaliana
  unsure (1)..(519): unsure at all n locations
tgnnnnnnnnnnnnnnnnnnnnnnnnnnnnnnnnnnnnnnnnnnnnnnnnnnnnnnnnnnnnnnggctcgagctcatgtctcctctaatggcgtcgatatcaggtatgtggcagttgggaatgagccttttctaaaagcattcaatggaacatttgagggtataactctacctgctcttcagaatatacaatcagctatcatcaaagctggtttagcgactcaggtgaaagtcacagtgcctcttaacgcagatgtgtaccaaagtgcgtctaatctccccttcggatggagatttcaggcctgaaatccgtgatctcatgttgaacattgttaaggttctgagtgataacggagcaccattcactatcaacatttacccttcatcagtctctacaacgacccgaatttccctgtggagtttgctttctttgatggaactggtactccgataaacgacaatggaagaatctacgacaatgttcttgatgcaaactacgatacacttgtgtggtcgttgc

SEQ ID NO: 132813 - DNA, 556 bp, Arabidopsis thaliana
atgttttaggtgcactatagaagagctatgacgtcgcatgcacgcgtacgtaagctcggaattcggctcgaggcatgtctttcttctggctttttccttttctccttcatctttcatttgccgattccttatctcctctttcagctccagttcaaaattttattcacctaaaccattcttgtccaagtagtatattaacgtattcaagaaacagcacttacttcaccaatctcaaaacacttttgtcctctctctcttcccggaacgcttcatactctaccggattccaaactgccacggcgggacaagctcccgaccgtgtcaccggacttttcctttgtcgcggagacgtctcacaagaagtttgccgtaactgcgtcgccttttccgtcaaggagactttatattgggtgtccgtataacaaagaaggtcgtgctttattacgatgagtgtatgcttagatactctcaccgaaatattctctcgaccgttacatacgatggaagtgctatcttgttggacggcgctattatttcatcaagtaatcaaaatcag

SEQ ID NO: 132814 - DNA, 746 bp, Arabidopsis thaliana
  unsure (1)..(746): unsure at all n locations
ttgttcgaggctgagatgaaggcaaaggcacaactaccatcagagaatttaccaaaatttgaggtgaatgatttggagagcctaactgggaagtatgataccgttgtatgtctcgacgtgttgatacattacccgcagaacaaagcagacggaatgatcgcacatcttgcttctttagcagagaagagagtgattctgagttttgctccaaagactttttactatgatatcttaaagagaattggagagcttttcccagggccatcaaaagctacaagggcgtatctacactcggaggcggatgtggaaagagcgttgggtaaagtcggctggaaaatcagcaagagaggactcactaccacacagttctacttctctaggctcatcgaagctgttccaatgtagaccaatttgaaaactagtagatctctgtatagcatattccgagaaggattttcgtggaagacatgcagattctcctaaattcgctgaagagattctcataaactcttcttatatactaggaggacggtctgtacaaacttgcacttctgcagaccctaattgataattggccaaaatgttcaatgtaatcaacgttatttgttgtgctgcttaactgtgtccaaaaacatgtctatacttttctacccaaaaaaaaaaaaaaaaaaaagnnnnnnnnnnnnnnnnnnnnnnnnnnnnnnnnnnnnnnnnnnnnnnnnnnnnnnnnnnnnnnnnntccccta

SEQ ID NO: 132815 - DNA, 720 bp, Arabidopsis thaliana
  unsure (1)..(720): unsure at all n locations
ttaggagcactatagaagagctatgacgtcgcatgcacgcgtacgtaagctcggaattcggctcgagcccttggcaagccaagggttacgtttagtaggccgttgagtacgttggcgcaaactcctagcttaagggcgtctctagggcctactaaacgtaacccttggcaagccaccggtcgagccatgttgcaccctcatccaaggactcgctgatcttgaggctgcagcttgtctttgcactgcgctcaaggctaacatcctcggtatcaacctgaatatcccactctctctcagtcttcttctcaatgtttgcagcaaaaaagttcctcgtggcttccaatgctaatcaagaacctaattatacaacacacacttcatatcaatataatcttcttgtttggacagacaagatgatttctaccaaaaaaaaaaagattatatattattgtctttgttatcttgtatttgtgtgttcatctagctacttatgtatgggtgtatgattgcttctaaacttcacagttatgtgtttttttctgttctcttatatagtttcattggggtgtgtatttgttgttgtatgaattaataaataatatccttataaaaaaaaaaaaaaaaaaaggnnnnnnnnnnnnnnnnnnnnnnnnnnnnnnnnnnnnnnnnnnnnnnnnnnnnnnnnnnnnnnnnnnnnnnnnnnnnnnnnnnnnnnnnnnn

SEQ ID NO: 132816 - DNA, 364 bp, Arabidopsis thaliana
cttgatcctcaacttccttttcttcacaacaatatccgcctgcggtaactgcggttgcccttctcccaagccaaaacataaacctagcccctctcccaagccaaaacctaaccctaaacccaagccaacaccacaccctagtcctagcccggcaatagccaaatgccctagagacgcccttaagctaggagtttgcgccttcgtactcaacggcctactaaacgtaacccttggcaagccaccggtcgagccatgttgcaccctcatccaagggctcgctgatcttgaggctgcagcttgtctttgcactgccctcaaggctaacatcctcgggtatcaacctgaatatcccactctctctcag

SEQ ID NO: 132817 - DNA, 969 bp, Arabidopsis thaliana
taggtgcactatagaagagctatgacgtcgcatgcacgcgtacgtaagctcggaattcgtgctcgagattccaaaaaaaataaaataatacaaatctctctttttctctctaaaaaatcttgatatggatcaaaacgtaccaataagcaagaagctatggaacatcgtacgttttctcttgtacatgatccgcaaaggcgtctcaaaaaacaaactcatcgctgacttcaacgccactctcaaacgtggcaagaacctcatgttccaccaacgtcgtcgtgtccacgccggttccaccgcctcagccgctctaaacgctacttcagccaccgcgtcatcgcgacaagagtacgagtttagctgcagcaacactccaaactattcattccctttctctaatatggctttcatgaggaaaaagagtcacaataatctcttcacgtgtggtcaaacgcctcagacgcttgacgacgacgtagcccccgctagagccgttcttgagctttttaacggcgttggagagaaaggaaacgtcacgccggcagatttaacggtggctttgtctccttatttccccggttttggacagactccattggttagaccgttaagagtaacggactcaccgtttccgttaacgccggaaaatggtgatgtggctaatggacacgttgacaaagcagctgatgattttataaagaagttttataagaacttgaatcagcagaaaaaaatgattgagttcagctaaatattaatccgaattgtgtgtatcttcgtcatatttctcttcttccttaaatatttttttacccctttttctttctttcttttttttctctcgttttgtgctgattaaaatccaaagatgtaatgatattttggggggttttattttcgattcctaacacaattggatattatgaataaaaaaatatcatcggttctattagtaaaatatgtattgtt

SEQ ID NO: 132818 - DNA, 665 bp, Arabidopsis thaliana
  unsure (1)..(665): unsure at all n locations
cgtcgcatgcacgcgtacgtaagctcggnatcctggctcgaggtacagtgtcatttttaggattttctaagaagaaaaaaaaaacagggaagatctttttaagcttctctttcctctctcttctatctttctttctctttctcaatctctctcaggtttctctctcctctctccaggaggtcaaaaaattctttaaagagccgtttagaccaaacccatttttataatcatcaatggacgatgatggatttcgcaattggggatactatgaaccagcggctgcttcttcgtttaaaggtaatctcggtttgcagcttatgtctactattgaccggaacactaaaccgtttttacccggtcgtgaatcgaatcttatgatcggttctaacggttcgtatcactctcgagagcaagacatgaactatagctggattaatcaaccaaaggacaacaagttcttcaacatgttgcctataacgtacaccgggtttatagtaattgtgttgtcggaaacatcttggttcggaattcggtttcagatggtaccatcaaaccgggttttaaatttcacccccggttttgagggggaatnccggtttccncctccctgcttccttgtggaggggcagccttgttagaaggggaaanatgnggggngagnatng

SEQ ID NO: 132819 - DNA, 552 bp, Arabidopsis thaliana
  unsure (1)..(552): unsure at all n locations
taggtgcactatagaagactatgacgtcgcatgcacgcgtacgtaagctcggaattcggctcgagcaggttatactcacagcaatggcgctcatgggcagcattcttcattcaagcggcatggaggaaacattgcaaaaggaagctttctaagacaagagacaacgagaatattccacaaggcacgcaactcaatcttgcatcaacgctctacgtgtccagatttgtgtccaaagctttgcaaaatcgacgaaaagatacagcagattgttccagctctcctgatatgtcacctccggtacctcataaaccagccgatctcgagtttgcaaaggctgaagcatagtgtgtctttgaaggaaaatgactctctacacaaacaaggtagtgaagactccatgtaagctcaaaacatgccctacaacgtaactttccagttattgtcaaataattgactcatcaccacgtcctagatataaaaaaaaacagtangaaaacaagatcattccaaaaaacccagtgaggcacttgatgagctctaaatatataaaat

SEQ ID NO: 132820 - DNA, 793 bp, Arabidopsis thaliana
acaactacaagtacgatgaaaacgttaaggaagagtctttccccgagaacaatgaagacaacaagaaaaacgtctacaactctaacgcttacgggaacagagttagaacgtgaaacaccgtacaaaggttacagccacaacttggagagacaaggcatgagtgacacaaggttcatggagaaaggtagctactactacgacctttacaacgacagaaaccacggccattactaccggaagtcacacagtaaaagccccgccggttactattcttctcccgcgaccgagactaactacgaacagcaatcgtactgcgtacggaaacaacaacgaggagaacagttttaaggatccgtacaactccaagtgggagaagaacttgatgaacgaacagccttaagagttttttcgggggcaaaggcactaatcagttcaagcctttatgaaggtttttatttgatttcctctcaaggctgctacactcttaaaagtgctctcttttatttccacctaagttatatcccatgtcggggtttagtccatttaaatcgttgttatcattgcaagagcttaaaagtgtaagctataccaaaaaagagaaaggagtttttttttttttttagttaatcggtgggtttgcttttctatgggtttttgaactttgatgtttgcgtttgcatatattattcggtgaaagggagatagtttaaataaaaaaaaaaggcggacggccgtccgctatacaggatccgagctgaggcaagcggcatcaagctcttctatagtgtcacga

SEQ ID NO: 132821 - DNA, 558 bp, Arabidopsis thaliana
  unsure (1)..(558): unsure at all n locations
attgtnnnnnnnnnnnnnnnnnnnnnnnnnnnnnnnnnnnnnnnnnnnnnnnnnnnnnnnnnnnnnggctcgaggccgtgcatacaacattccagtatgcaggtaccgaaggaaaacgccacaggcttcgagaggggatggttttctatgacccaccagaatattatgattcaccaggaggtttcattgcgtttaaaccatcgattccaaaaagcttgttacttgacgggaagcataccattgaatcgcattttatcctcgttaatcaccaaatgaaacagatcagatcagctctagccattgcatctcttcttaatcgtacactggtgatgccaccaatatggtgcaggttagataggctttggtttgggcatcctggtactcttcagggatctatgacccgacaacctttcttctgcccacttgatcatgtctttgaggtcaatatcatgcttaaggagctaccagaggaagagtttggccctgggattggtatcagagagtattcttttctagataaccccattgctgccaaaacaagtgaaagagtcatggctt

SEQ ID NO: 132822 - DNA, 1018 bp, Arabidopsis thaliana
taggtgacactatagaagagctatgacgtcgcatgcacgcgtacgtaagctcggaattcggctcgagaggagttagagcgaatgctcaaggaaatactaatcccgaccctttccattgatcgcattgacaagtcacatgctaaatggaagcgagctgacattcttgtctttaaacactggacattggtgggttcatggaaagaccgccagaggtgcaggaaaaactactacaaagaaggtgactacatctacccgaaatttgatgctactgaagccatacagaaggtcgttgaagacttgggcaaaatggatcgatcagaatgtgattcccaaaaagcagcttgtattttatcgcggatactcctctgcccattttcgaagagttaagttcttccgtgtattctgtgtcctgacttgaacaggggaggtgagtgggactcgggagggtcatgcaacgggaaggtagaacctgtgaagaagggttcaatcatcgattcctatcctttgaaaatgaagatagtccaggaagccataaaggagatgcaagttcctgtgattcttctaaacgtgacaaagctgactaatttccgcaaagacggacatccatcaatctacggtaagaccaacacggatggtaagaaagtgtcgacaaggcgacaggattgcagccactggtgcctgccgggagttcccgatgtttggaaccatcttatctacgcatctttgctccttcaaccacattcttaaagttgagctcatacatcaccaaaattagatagaaagagaagagcagaaacaaatgaccagtccagtcttcactgttgtagtagtgatgtcaaattttgtgtaatttattgcccttggagctgataagtagttttttgttactttcatgtagaggtgtgaacaaacggaatcaggatgaaattttcggggtcgcgtaatacatgcagcccgggggatccactagttctagaacggccgccacctcggtggagctcccgcttatggtggcttt

SEQ ID NO: 132823 - DNA, 531 bp, Arabidopsis thaliana
  unsure (1)..(531): unsure at all n locations
gaggaactgttttatcccttcacatccctgagtacactgcgctacatgcatccaagagagtcatggatatgtatgagtttatgaacagtaaggcccttttcaagactgtaagaaagaatcatgaactgaagaagaaagtgaacccagtgattgttcatgtgaattaccatccagataagctcaatagaatgcaagccgtcgttgagttctacgttaacggtaagcaagacgcgcttgatagcttccccgatggttctgaatgattcacctgaaaagcagataggctaaaaaaaactttccgagtttcttgacatttgtgattctaatatatttctcccttttccaatgtttactgcttcatgccttctactttcctctttgtattatgaatttttgtgtatcttatggctaaaatcgcaagtcttttttttctttcttnnnnnnnnnnnnnnnnnnnnnnnnnnnnnnnnnnnnnnnnnnnnnnnnnnnnnnnnnnnnnnnnnnnnnnnnnnnnnnnnnnnnnnnnnnnnn

SEQ ID NO: 132824 - DNA, 353 bp, Arabidopsis thaliana
aagaaatcggaaaactggagaaaccctaaatcgacgaaaaggagagacctttgaatcgaagcttggtgtgtttatactatgaagagtcaatggtctaattttcatcagattgggagaaactctttcttagctgcttctactgtttacgtttcaaacgaattcaacttcttaaacacttctcttcttaatcgaagaagcttctgttttgcagaaggagatcgatccagctttgtagtgttgaaatcggaagcagagttcaacagtgcattgagtaaagctcgagatggatctttgccatcggttttctatttcactgccgcatggtgtggaccttgcttatctctcctgtgata

SEQ ID NO: 132825 - DNA, 537 bp, Arabidopsis thaliana
ttaggtacaactatagaagactatgacgtcgcctgcacgcgtacgtaagctcggaattcggctcgagatccgaagcggagccacttgatctcgaaggtatgttggattcagaagaccaaccagagacggattctggactcagaaagcggcgattcgatttcaaaacccggtaaaactccttctccaaatgcttcatagctttccgcatcaaatcctgtcctttagcaagcttagcggaggccggattcatagcaacggtgctctgaatggcgtattgtaacttgccgagaacctcgaggaagcgtctgccttctaggcggttttgagcggagaagagggaagagaggctgcatgaacaagaagaagagtcgcagaggtgtggagtaacccattggcatatgaaggcgtcagctgcctccacactatcgccgattagagactcggagaagccctgttgctgttgcgggccgaccttagaggatttttgataacgtggtgggtttaaagaccaccattgtttcttggggttgaagaaat

SEQ ID NO: 132826 - DNA, 611 bp, Arabidopsis thaliana
  unsure (1)..(611): unsure at all n locations
agcggggaaggnttcatnccccccgatctgacttanttggggnggcncgnagnccttttaccattggaatggggggccctccnanggntttggaaccccttttcccggggggtccaactttccccggncnggtgggcatttcattgggggatagggctcaacagntctgccccctaaantgctcgngctcttctcttncgaaaccaaccccgattcacggttggtgcgtgaagcnctgtgtgagctggagcttcccntatgtattacacaacattggagaagggtccacacggatgaaatcacttctaaatgcttcaggatccaataaggttccattcttggttgatccaaacaccngtgtccaattaggtgattacgagaagattctggcttacctcttcaagacatattcttcagcagcatttgcatagtccatagaacctatacatcattattcccaaggatctggatgcatagatacaaggccctttctcttaaaacttgtgatgtatataattgtggtaaatattgtatatcaagacaaaacacatgtcttttttttttgtgttttggtataagaatcttctctttcaagcagcagtttgatatcc

SEQ ID NO: 132827 - DNA, 1056 bp, Arabidopsis thaliana
  unsure (1)..(1056): unsure at all n locations
atgttttaggtgacacttagaagagctatgacgtcgcatgcacgcgtacgtaagctcggaattcggctcgagcttccctgtttggcagcgatctttgcgtttccgcaagagcgagcgatgttaaataaggagagagcagcggatatgtacagattaagcgcatatttcctagctcgaaccacgagtgatctccctctcgactttattctaccttctctcttccttcttgtcgtctatttcatgacaggtcttcggatcagcccatatcccttcttcttgagcatgctcacagttttcctttgcatcatcgcagctcagggactcggacttgcaattggtgccattttaatggatttaaagaaggctacgactttggcttcagtaactgtcatgacattcatgctcgccggaggattcttcgtcaaggaaagtgccggttttcatatcgtggatacgttatctatctttcaattaccacacctacaagcttcttcttaaagtacaatatcaggacttcgctgtgtccatcaacgggatgagaatagacaacggactaactgaagtacccgcactcgttgtcatgatattcggttatcgcctcctcgcgtatctgtctctaaggcaaatgaagatcgtaacataacccattttccacacgaagaaatccaataacatagaagaagcataaaaagagtgcatcagatcttgatgatcttgacacgaccaatccttgacaatgattaagagattggtcctaagattattcttgcttaattacaaaggtgttgtgagtttgataatgattggatggtgatagatgtcttgattggagataaatatatatgttcaagtttgtaattgtagttcgaatctaaaattggttaaagtttattaacaagaagaaccttgtggctggnnnnnnnnnnnnnnnnnnnnnnnnnnnnnnnnnnnnnnnnnnnnnnnnnnnnnnnnnnnnnnnnnnnnnnnnnnnnnnnnnnnnnnnnnnnnnnnnnnnnnnnnnnnnnnnnnnnnnnnnnnnnnnnnnnnnnnnnnnnn

SEQ ID NO: 132828 - DNA, 530 bp, Arabidopsis thaliana
  unsure (1)..(530): unsure at all n locations
gactcggacttgcaattggtgccattttaatggatttaaagaaggctacgactttggcttcagtaactgtcatgacattcatgctcgccggaggattcttcgtcaaggcaagtcctctgtttcttgatttcctctgtttttaacttcccctgtttcttgatttcccctgttttactgatttccttttctgtgtctacacagaaagtgccggttttaatatcgtggatacgttatctatctttcaattaccacacctacaagcttcttcttaaagtacaatatcaggacttcgctgtgtccatcaaccggatgagaatagacaacggactaactgaagtagccgcactcgttgtcatgatattcggttatcgcctcctcgcgtatctgtctctaaggcaaatgaaggtcgtaacataacccattttccacacggggaaatcaaataccatgggggaggcattaaaagggggcatcaggtcttgttgtctttgcanggccatcccttgcaattgttaaggntgggccaaggt

SEQ ID NO: 132829 - DNA, 727 bp, Arabidopsis thaliana
taggtgacactatagaagagctatgacgtcgcatgcacgcgtacgtaagctcgggcgtccggaaggtattcttgtgaataccttctttgagctagagccaaatgctataaaggccttgcaagaaccgggtcttgataaaccaccggtttatccggttggaccgttggttaacattggtaagcaagaggctaagcaaaccgaagagtctgaatgtttaaagtggttggataaccagccgctcggttcggttttatatgtgtcctttggtagtggcggtaccctcacatgtgagcagctcaatgagcttgctcttggtcttgcagatagtgagcaacggtttctttgggtcatacgaagtcctagtgggatcgctaattcgtcgtattttgattcacatagccaaacagatccattgacatttttaccaccgggatttttagagcggactaaaaaaagaggttttgtgatccctttttgggctccacaagcccaagtcttggcgcatccatccacgggaggatttttaactcattgtggatggaattcgactctagagagtgtagtaagcggtattccacttatagcatggccattatacgcagaacagaagatgaatgcggttttgttgagtgaagatattcgtgcggcactttagccgcgtgccggggacgatgggttagttagaaagacagaagtggcttaagtggtaaaaggattgatggaaagt

SEQ ID NO: 132830 - DNA, 542 bp, Arabidopsis thaliana
ttgttttaggtccactatagaagagctatgacgtcgcatgcacgcgtacgtaagctcggaattcggctcgagaaagggtgtcataattggtctctcgcggtggcttggcgacacggaacagagaattaatcgagaatctttttcagcttgtaaccggaattcatggcgatgcaagccggtgttcagacctctaaggtccttatcctactcggcgcaggtgtatctggttcgatcgtattgagacatgggaggttgtctgacctaatagcccaacttcaagacttactcaatggtgctcaaggagttgaaagcactccttttaagtatgacggtgcactccttgctgctcagattcgacagcttgcaaacgagatcaaagaactaactatgaccaatccagttaccatctttaatggagattcaaactccagtggctatgcatcttacctggttccagcggctgccgttggagctatggggtactgctacatgtggtggaagggctggtcgttttcagatgcaatgtttgtgacaaagaaaat

SEQ ID NO: 132831 - DNA, 544 bp, Arabidopsis thaliana
ttaggagcactatagaagatttatgacgtcgcactgccgcgtacgtaagctcggaattcggctcgagagtaacaacaacaccaccaccaaaccttagccaagatcttggtctctctcttcacccatttcaagggaacaacaacacagtcgtagttcccgagaccaacaatttcaccacgactcatttcgacacgttcgggagaatctctggatggaatcatcacgacttaactatgacgtcatcatcctcatcagaacatcaacaacaagaacaagaagaaaggagtaatggtggtttcatggtgaatcatcatcctcaccatcatcatcatcaaccgtcgatgatgacattgcttaatagtcagcaacaacaagtgtttcttggtggccaacaccaacaacaacaaaggggtacccttcagtccagtttattccctcattcgtttcgttcttgggatcatcatcaaacgacgtcggatcatcatcatcatcagaatcaagcttcttcgatgtttgctccatcatcacaggatgggtctcatgg

SEQ ID NO: 132832 - DNA, 560 bp, Arabidopsis thaliana
  unsure (1)..(560): unsure at all n locations
gcacgatcagacatgtcgggttttatgcaaacctcgtttttcttcggatacatggcttgcatttgctacggattcttcttaatgctcggaacagttggcttccgcgcagccctcctctttgtccgtcacatttaccggtcgatcaaatgcgagtaagaaggtctgtacaccaatcttcttatgttgatttccttcttcttcttctgccttcttacgaattttgcttagaacaaagaagataaagagataggttgttagaaagaagagagacacaaagacaatgtctgattattttctaaagaagcatctcttctcattagaggttttagcgagagtctctcttcttctctctttattttgggctacagaaattaaattacttgtatcctttctatatattttacctattgtaaaagactatcaatacctttgaattcgagtttctttgtatctaataaatttcaaaacacacaaacaaaaacacaaaggtcgaccgctctagaggatccaagcttacgtacgcgtnnnnnnnnnnnnnnnnnnnnnnnnnnnnnnnnnnn

SEQ ID NO: 132833 - DNA, 813 bp, Arabidopsis thaliana
  unsure (1)..(813): unsure at all n locations
gggtcgtgtcactactccatccgtggaggattcaaacaacggtttaccggttcagcaacccggtacaccgaaccagcgaaccagagttcccgtgagtcaattcgcgccgccgaattatcagcaagctaatgttaacctatctgttgggaggccatggagcactggtttgtttgattgtcaagcagaccaagccaatgccgttttgaccacaattgtaccttgtgtaacatttggacaaatagcagaagtgatggatgaaggagagatgacttgtcctcttggaactttcatgtacttattgatgatgccggctttatgctctcactgggtgatgggatcaaagtatagagaaaaaatgaggagaaaatttaatcttgtggaagctccatattcagattgtgccagtcatgtcctatgcccttgttgctctctttgtcaagaatacagagagctcaagattaggaatcttgatccttctctaggttggaatgggatacttgctcaaggacaaggacaatatgagagagaagcaccaagttttgctcctacaaatcaatatatgtctaagtaaacatttgattttagttgacttccatatttattaaaacattatttgtggaccattgtacaatgaaagtgtgctatattaaaatttgcaatgcaagtgtgagattgataataaaaaaaaaaaaaaaaaaaaaaggnnnnnnnnnnnnnnnnnnnnnnnnnnnnnnnnnnnnnnnnnnnnnnnnnnnnnnnnnnnnnnnnnnnnnnnnnnnnnnnnnnnnnnnnnnnnnnnnnnnnnnnnnnnnn

SEQ ID NO: 132834 - DNA, 748 bp, Arabidopsis thaliana
  unsure (1)..(748): unsure at all n locations
gttgatcactccgtgcttcagacgctgtataaggttacaattattcgtattctaganaatggaaagnattggttataagngtcgagccaagcagcttcagcctcaggagtcacacactggtaccttcactctctctaccttaggaatgtttggcgttgatcggtttgatgctattctaccccctggaacaggagcgattatggctgtcggagcatctcaaccttcagtggttgcaactaaagacggccgcattggcatgaaaaaccagatgcaggtgaatgtgacggcagatcatcgtgtcatctatggtgctgatcttgcacagttcttgcaaacattggcaagcattattgaggacccaaaggaccttacattctaggccaaattactgcttttcgcatcccagtcttctctgcttttgattccatgggagcttgtatttctgcggtaatcagtttctttgatagaacaaaccttttaagattaaacataatcatttctttgtttgagatatatcttctgcaacattttctgcatggaaaggccgtcccacatgattttgctactgacttcatatatatccacttcatgcgatgaatcttatatgaactgataactttagcatgattaataacatgaatcttatatggaaaaaaaaaaaaaaaaagnnnnnnnnnnnnnnnnnnnnnnnnnnnnnnnnnnnnnnnnnnnnnnnnnnnnnnnnnnnnnnnnnnnnnnnnnnnacaat

SEQ ID NO: 132835 - DNA, 459 bp, Arabidopsis thaliana
cttctctcattttcttcttctccaagcccccctcctttctatatatatctgaaattggtcttttataaaacaaacttccatttttcgtatggctgcttcttttcttacaatggacaatagcagaaccagacaaaacatgaatggttctgctaattggtcacaacaatccggaagaacatctacttcctctttggaagatcttgagataccaaagttcagatcttttgctccttcttcaatctctatctctccttctcttgtctctccttccacttgtttcagtccctctctttttctcgattcccctgcttttgtctcctcctctgctaacgttctagcttctccaaccacaggagctttaatcacaaacgtaactaaccagaaaggtataaatgaaggagacaagagcaacaacaacaactttaacttattcgatttctcattccacacacaatcatc

SEQ ID NO: 132836 - DNA, 629 bp, Arabidopsis thaliana
  unsure (1)..(629): unsure at all n locations
ttttaggtgcactatagaagagctatgacgtcgcatgcacgcgtacgtaagctcggaattcggctcgagaagaaaaacagagcatcataagaagaaaaaaaaaagcaatggggatccttcagttcatggtgaaagaagcccacagttattacctccttccgaccaaacacccttcttctgttctgtctctctccgctttagattctcagcttttcctccgattcaccattgaatacctcctcgtttacccacccgtttccgacccggagtattctctctccggtcgtctcaaatccgctctctctcgcgctctcgttccttacttccctttctccggccgcgtccgagaaaaacccgacggcggcggaggtctcgaggtcaattgccgtggccaaggtgctctgtttcttgaagccgtctctgacatcctcacgtgccttgactttcagaaacctccccggcacgctgactaagctggagcaaagcttctttcgctccaaccgtcaattcgatgtcctcgcttggtggctccaccttctcgtccgttcaagttcactttgggttccgtgaagggtggtgctgctttagccgttnggtgttaacaactgggntttccnatggaaatggta

SEQ ID NO: 132837 - DNA, 530 bp, Arabidopsis thaliana
ttaggtacaactactagaagattatgacgtcgcctgcacgcgtacgtaagctcggaattcggctcgagaattccgcaccaccacatccacgtgtctcaacctccactctcctacgtctctccaccgtcgccggcgtctgcagcgtctgcttcatcaattcctcgccgtctctctgaaagaaaaaaaggaaccacctttctctctctgttttgctcgatctgttgtaatttactctgtagcgatcatcagatcgccggcgttttaaaccgccatgaaactctccgacgttggattagacgttgtcaaaactccgagattggttaaattgattgcgtttgcgtttctctcaatctcaacaatttttctcttcaatcacttctcagattccttctcttatccatctcttccttttcccatctcctcttcttcaaacgtcaccgaagctattcaaaccaacataacatccgtcgcggcggtggcaccatctcctccaccgagtcctcgtctcaaaatatcacctcctccgcttc

SEQ ID NO: 132838 - DNA, 539 bp, Arabidopsis thaliana
aggtgacactatagaagagctatgacgtcgcatgcacgcgtacgtaagctcggaattcggctcgagaacaacttcaacgttgcatcgtcttgttcaagaaactccttgtacttgacatgacgaactgtggatcccttgaatgcttccccaagggtatcggaagtctcgtgaagctcgaagttctgttgggatttaagccagccaggtccaacaatgggtgcaagctcagtgaagtgaaaaatctcacaaaccttcggaaacttggtctttctctgactcgtggcgatcagatagaagaggaggagcttgattctttgataaacctaagcaagctgatgtccatttcgatcaactgctatgatagctacggcgatgatctcataaccaaaatagacgcccttactcctccacaccagctccatgagctttctctacaattctatcctggaaagtcagtccatcgtggtttgagcctcacaagctttccatgtgaggtacatgtgaatatgttcaggtaatttggggaaaatgcagaacca

SEQ ID NO: 132839 - DNA, 797 bp, Arabidopsis thaliana
  unsure (1)..(797): unsure at all n locations
ttttaggtgcactatagaagagctatgacgtcgcatgcacgcgtacgtaagctcggaattcggctcgagtttctcgtcgaagaagcttacagatcttcttaacgtggcacgtgtaaccccggctgttaaccaagttgaatgtcacccagtttggcagcaacaaggtcttcatgagttatgcaaatccaaaggagttcacttatctggttactctcctttgggttcccaaagtaagggagaagtcaggctaaaggttcttcaaaacccgattgttaccgaggttgctgagaaacttggaaagaccaccgcccaagtggctctccgttggggactccaaactggtcatagtgttctaccaaagagctcgagcggggctcggctcaaggagaatcttgatgtttttgactggtccataccggaagatctgtttaccaagttctctaacattccccaggagaggttttgccgagctactgagtttgcgcatgagacacacggcttctataagaccattgaggaattgtgggacggtgaaatttgagataatgtccctcctttctacttgtttaaccataaaccattaaggacattgaaataaatatgttatctttttatatttaatctttctatgagaaaacactaaacacatgcttgggatttcatgatgtttggcaaaaaaaaaaaaaaaaaaaaaaaaaggnnnnnnnnnnnnnnnnnnnnnnnnnnnnnnnnnnnnnnnnnnnnnnnnnnnnnnnnnnnnnnnnnnnnnnnnnnnnnnnnnnnnnnnnnnnnnnnng

SEQ ID NO: 132840 - DNA, 451 bp, Arabidopsis thaliana
aaaaaaaacagagctcactcattattatctctctaaaaaccctagctttctccatgggctttcccgtaggttacacagaggttttcttaccgaagcttttcgtacaaacgctttcgattctcggattcatcagaaccatcgtcttctctatcttccgcttcttgggtctctcagattttctcgaaatggatcaaacctggcccgattacacatcgtacccgacccgaatacccgaaacccgctcacctttctccgcactcctaattagagagatcctaccggttatcaaattcgaagagttaacgaattccggcgaagatctaccggaaaactgcgccgtttgtctatacgaattcgaaggagaacaagagatccggtggctgagaaattgcagacatatatttcaccggagctgtcttgaccgttggatggatcatgatcagaagacgtg

SEQ ID NO: 132841 - DNA, 549 bp, Arabidopsis thaliana
taggtacaactatagcaagagctatgacgtcgcacgcacgcgtacgtaagctcggaattcggctcgaggaacacgttctctgggattgacaactacaaattgatcttctgggcacttagatttcatggcaagattctcttcagggatatctcacttgagatcttcagggtttggcaaccatcagagaacatgattctcatcaggtggaatcttaaaggtgtacctagagtcccatgggaggcaaagggagagtttcagggtacttctcgctataaactcgaccgaaatggcaaaatctatgagcataaggtcgataacttggccttcaacttccctcaccagctcaaacctgccacttctgttttggatatggtcaccgcttgccctgcaagtcccaatccaactttcatgtttggcgccatggattcatactcatcttcttggattgagttctacaaagcagtgcaaaggacactagacaagcaagaagagcaaatgcttgggcaagaccatttcgtcccatgctcataatgccattaggtcacactc

SEQ ID NO: 132842 - DNA, 328 bp, Arabidopsis thaliana
agcaaaaccgcgagctctcatggcttccggcggcaaagattccgatcgtaccttagggtacatgacacggaaagatacagaagtcaagctgccaagacctactcgtgtcaagaacaaaactccggcgccgattcaaataactgccgaacagatattaagagaagctcgagagagacaagaagctgagatccgtcctcccaagcaaaaaatcactgattccactgagctttccgactacagactccgccggagaaaggaatttgaagaccagatccgtcgcgcgagatggaacattcaagtttgggtcaaatacgctcaatgggaagag

SEQ ID NO: 132843 - DNA, 476 bp, Arabidopsis thaliana
  unsure (1)..(476): unsure at all n locations
tgtttcttgtcgcatacccgtattttaatgtcaacgagatgcttgtagtggaagagctctacaaggaagctgttgtgaacactgaccgaaaactaatcatcttcaatggagaacttgaccgcatacgatcgggttactatccaaagttcttttatccgaaactggctgcacttaccaagacacttcttccaaagatggagacagtgtactacatccacaatttcaaaggacagaaaggaggtgtacttttcagatgttatccaggtccatggcaagtactgagggggacaaggaacaaatacatttgtgttcatcagcaaggatccatgccttctcttagggaagttgccctcgacatttttgcggccccttgagatttttgtattgaaactttttcaaggaacccccttttaagggcnatgncaaaaaanaattttttttgcntaaatgggttnnagggnccccccntttttttc

SEQ ID NO: 132844 - DNA, 562 bp, Arabidopsis thaliana
ttgttttaggtgcactatagaagagctatgacgtcgcatgcacgcgtacgtaagctcggaattcggctcgagctgagaagtttggaaggccccaaaacagaggtttcgcttacgtcgacttcaccaacaagaaggcactgaaagaggcaattggtctcagcgagcagctcatgactggccgccgtgtactcatcaaagacgcaaagaacttcgagggtcgtcctgacaagtctgagagggaagcaaatgcctccggcgccgccgccaagtccggtcaccccccgtccaagcggctcttcgtcggtaacttgagcttcgatgtcaccaaggaggccctcgaggaaaatttcagcaagtgtggaacagtcaacaacgtgcatatggctaccttccaggacacaggaaaatgcaagggatatgcttgggtggaattcgaagagcttgccgcagcaaaagcagcggtgagaggattcatgctagtgaaggaggacgatggccaggaagacgatccttccgatagcgaatccgactcggcctccaaaagaagtcgaaaaagctcaag

SEQ ID NO: 132845 - DNA, 511 bp, Arabidopsis thaliana
cgcgtgcgtaagctcggaattaggttcgagcttaatcaaaagctctctgccttgttgttttgttgatgttttatgaagtgatttgccttagattggattgaaatggctacggggcctacaaggagctggttccagatacggcagcagaaaccggataaatcaagcccttctataaagggacatgagggaaatgtgaagaggcgggggagacctcctttgaatgatgcaccatctaatgctgctaaacaggaagttgctgcagcgaagcaatatatcggagaatcattttgaatattcagaagaagagtctcccagaaaaaaaaagagcggcgaacctttttagaacacaaacctacttagagctgatgttcctgggaaagacaaaaaggggtttattaaagaacctttgataaaaaggaaagggtgttttttccctataccaaaaccaaaaaaggggggggtggaagacctttcaacctggcttagcattattgggcccggggggcctttc

SEQ ID NO: 132846 - DNA, 436 bp, Arabidopsis thaliana
ggcgtttggagaccgaagaagtctctctcgttatcatgtcgtccttcagcctcggtttcagctgcttcttccgccgtcgacgtcaatgaggctgtgacttcagagaaaccaaccaaaacgcgtccgtttcgaatcggtcatggtttcgatctacatcgtttagagccagggtatcctctgatcatcggtgggattgttattcctcatgatagaggctgcgaacctcactccgatggcgatgtgttacttcattgtgtagtggatgcaattttgggagcactaggccttccagatataggtcagattttccctgactctgatcctaaatggaaaggagctgcttcttctgtattcatcaaagaagctgtgagactcatggacgaggcagggtatgagataggaaacctagacgcgacgttgattctccagagaccaa

SEQ ID NO: 132847 - DNA, 576 bp, Arabidopsis thaliana
actgtgacgacgcatgcacgcgtacgtaagctcggaattcgtttcgaggacgctggatgggaactatattccgcacgcaataacaagaaccaaacacctctccacttagctttcgttagcattttcatggaagctgccaaattcatcgttgaaaagacgaattcagtcgaccttgatgaactcaatttcgccttatcaagtggatctacttgtattgttgggattatactggagagatttccagagctagctaggaaaaatgcttgggaggttgaagacggctcgcgatcaacgttactgcattatgcgtgtgacaaaggtgaccttgaactgacaagtatattgttaggactcaatcaaggactagaagaagctcttaacagcaaaggtttaataacctttgcatctaacaatccaaagaggcttcattataattcctggaggatttattggacaagccttcattggctttttgggtaagggcccctcaaaaaagacagtctttcttcttccgggacaaaacaaaattccgatcctttggtttcaggggggaaatttgggaactagcacccaatt

SEQ ID NO: 132848 - DNA, 533 bp, Arabidopsis thaliana
  unsure (1)..(533): unsure at all n locations
taggtgcactatagaagagctatgacgtcgcatgcacgcgtacgtaagctcggaattcggctcgagcaatgataaaacagaaagttgattcagccacagagagaaccaccgattgaaaccgttaagagaatccatctcggttcctatctttggtctgttgacttcatttgtggaggcttaagctatcggatggggatcattaatcatctttgagtgaggcagagatttctctctaggagctctctttcgttttatttatatgtcgacattatataatgtgtttttctctgggagagaagcagatttggagttagagaagtactattttcatttgttcttttaataactttgttgcaatttgttgaagttttgtttcccttgagttctttctgttgtaacaatttacaataaccagccattacattgcaaaaaaaaaaaaaaagggnnnnnnnnnnnnnnnnnnnnnnnnnnnnnnnnnnnnnnnnnnnnnnnnnnnnnnnnnnnnnnnnnnnnnnnnnnnnnnnnnnnnnnnn

SEQ ID NO: 132849 - DNA, 816 bp, Arabidopsis thaliana
tccaaaaaagagaaaggaatagcaaaaaagtttttttagccaaatgtggtgataatttcagaaaattggaaaaaccaaggatatagccccaaaaagagagattattttagttcaaaacccaaagagaattcttacccccaaaaagggtagttttttttcccattaagaccagacattgccaagaggtatcgggtcaccaacaaaaatcaacccggtaatgtgtgggatcaaggatcaaagaacaaggttcaacatcggtttaaagccattgcacaaaaacgtatcgtacaattcgaaggtaaaagcgatccttaaaaatcgtcggatgagtcagctcacgggaatcaagagcaaagagattttgatttgggttacgatctctgagatctttgttaatcatcaagatccgactcaaaatcacttttgctaatcctacgggactatcacgaactttccccgtctctgcttttgaagaagacgaatgattcatttgtcaacgctcaccatcatgatactttgcttagataaattatcttttgttttttccttataattccttttgtttagctaagttctattttcaacattttgtatttctgcatcttttccattagagattttataaaaataataatatagaaagacaaaatgtataattaaaaaacaaacaaattcctttggaaaatttgagatagtggttatgcatgtttgctacaacttataaaccaaaaatagtaagaaaatgagaaaattaaatataaataaaaaggaagagggcggccgctctagaggatccaagcttacgtacgagtgcat

SEQ ID NO: 132850 - DNA, 494 bp, Arabidopsis thaliana
ctcatcgaaatgtcgtctcaagaaacgaaatcagatcaatgtgttggagcagagatctgcaatggcgaatcaaactgcaaacagaaagccaaagagattttatcaaccatgaatctacccaaaggtcttcttccactagacaacatgacagagatcggtcacaacaaatcaaccggttatgtctggatcaagatcaagaacaaggttcaacatcgggttaaagccattggacgaaacgtatcgtacgattcggaggttactgcgatccttgagaatcgtcggatgagtcagctcacgggaatcaagagcaaagagattctgatttgggttacgatctctgagatctttgttaatcatcaagatccgactcaaatcacttttgctaatcctacgggactatcacgtactttccccgtcactgcttttgaagaagacgaatgattcatttgtcaacgctcaccatcatgatactttgcttagctaaattatctttt

SEQ ID NO: 132851 - DNA, 645 bp, Arabidopsis thaliana
cccccctcgattacgacggtataccataagcttgatatcgaattcgcggccgcctcatctctctcacaaatcattttctcagacttctctctttctcttaaaccatgcctgaggcaccaaagaaagaatctttagaggttttcgatctgacgcttgaccaaaaaaacaagcaaaagcttcagttgatcgaagaactcacctctaacgccgaccaagtccaaagacaagtcttggaggagatcttgacccgcaatgctgacgtggagtatctcaggcgacacgacctcaacggtcgcactgaccgtgagactttcaaaaacatcatgcccgttatcacctacgaagatattgagcctgagatcaacaggatcgctaatggtgataaatcacctatcctctcttgccaaacccatctctgagttcctcacaagctctgggacatctggtggggagaggaagctaatgccaacaatcgaagaggagctagacaggagatcactcctctacagtctcttgatgcctgtgatgagccagttcgttcctgggctcgaaaacggcaaaggattgcttttcgtcttcatcaagtccgaatccaagactccaggaggcctccctgctcgtactgtcttaaccagttactacaaa

SEQ ID NO: 132852 - DNA, 551 bp, Arabidopsis thaliana
  unsure (1)..(551): unsure at all n locations
nnnnnnnnnnnnnnnnnnnnnnnnnnnnnnnnnnnnnnnnnnnnnnnnnnnnnnnnnnnnnnnnnnnnnnnnnnnnntccctttttttgtgtttttctttaccgcctaaaaagtaattgaatttattttagtcaattctcaactctacatttacaatacatagcagattgctattccaaaatcaggatatcaaatgggctcttgaattcagaatgtattatctacaaattctgtttaagaaactcctctttaagtctcttgtgaaggtaaatcccatatgagaaggttaagctagctcatgagaagcaatgcttcacgagttcggcccaaaagactcaaagcggttgctgctatgtgatgtccagttagccctgcaagagcaagctgctccctaggcgatgcttcttctatgtagccatccggtaacacaatgggtctccacttgatattcccatcgagctggccatcgagggctatgaactgcgccacatgagaaccaaaccctccaacacagccttcttcgacagtgataaggaatttgtggttctgac

SEQ ID NO: 132853 - DNA, 544 bp, Arabidopsis thaliana
atagaagagctttgacgtcgcatgcacgcgtacgtaagcttggatcctctagagcggccgtcctttttttttttttttcttttttttttaaaacaaacaaaaatctattattgtctgataaaaaatatattaaaaagggacattaaataaagatcaccaagtgacgaggaatggtcaaaagagatgggagacctcctttagagttgcatcgatcatcttgttggaggtttttatagcatcatgtattctcccagccttcacataagcatcgatcattgttttataagtgttaacatcaatatatccaaaatcatcagcaagtgaatcaacaaaaacagactctgcttctgacaacatcctgttttcgcaaaaccttgtaataatgtatttgtcactgaggtagtcgttcttgggtctcgcctttttgtaggtctccatagcctcactaaaccaacccatatcaaagcactcgtccaccattatcttaatggtatcagagtccaagcaacccttaccggttccatttttatctaagagttcatgg

SEQ ID NO: 132854 - DNA, 539 bp, Arabidopsis thaliana
atagaagagctttgacgtcgcatgcacgcgtacgtaagcttggatcctctagagcggccgtcctttttttttttttttagagtgatcagaaaaatattttctatttctttcactttgacctctataacatccaaaccgactaataaaaccatcccaaataagcaaacaacaatcaagctaaggaaacagcaattggactcctcacaacatggactttatctgtccaactaaaccatccaaattggtattgacccttttcagtcgcattcatcacctggttcttcagtggtttaataacgattttaaaccgctgcttctgaccaatccggttaaaggacaatatattcggtatagccttaaccgaaatacccgatggcggtttaacgctgaataagtatgtgcttgttgagttaccagttccaacatttgtaactgttcttttaacggtcaccgtcttcttgagattcgggaccgcgattgacgggtaattgtgattataaccgggcggaattttactaggacatttgaatgtcgggtca

SEQ ID NO: 132855 - DNA, 541 bp, Arabidopsis thaliana
tgacctatagaagagctttgacgtcgcatgcacgcgtacgtaagcttggatcctctagagcggccgtccttttttttgtttttttcttttaagataatgaggatttgatatatatacaaggagagtaggttaacacttaacacttagtcatgacatcaactaaaactcttttgtctttttttccctacccaaagttggatcctagaccaagaatttaagattatatctggcgatagatttacagattcttctcaagtttaaagcagttaaaacctagatgagattgaaacctcacagctaagtgaagttgttcttcaagagtaggaacggaccaagccaaagttgacaaaagatttcgacttgaagagacccccaaagagaaatcttgtcggtgattcgtgagaaggcgatttctgtctttgttgttgttcttgagggttgttcttgactttgagaatagtttggcctatggtttgtcttatggaatctatggtcttagcatcgattgagtaaccagatgcatcactgacatagaatgtgt

SEQ ID NO: 132856 - DNA, 821 bp, Arabidopsis thaliana
ttaggacaactatagaagagtcttgacgtcgcatgcacgcgtacgtaagcttggatcctctagagcggccgccctttgtttttttttttttacacaaagcaatccacaatattcatatcatgattgttctcaagttactttaaccacttttgcattcaaacatcgtcaagttagaagattagagtttgagaaaacaatttacacagctcaacgttctcaaggctttctaacatttacaaaacccaaaccttaatatacccaaaaaatcgcttccttcaactacggccggtctctaagcttctctatttggcagcataccagttttgagcacattttgcatcaacagataaatcgactgagagaatattccttccgttaaagggcttagacatacagtccacaactatgtcctttgcgatctccgctgattcaattggtccttccaagattacttcatcatgaatctgtagaagcaatctccaaccaagcttcttcaactgttgatttatcgatatttccaacattgcacacatggcaacatcagctgcacttccctggactggagtgttgattgctgctctttggatatgatttctctgagcacgtgactttgacgccggaaatctacgagacctttctagtaaagtgagtacatacccatcttctatagcttctttcttagcatttcttgcatttccttactctgcctgcattgaccgagatcgactgttctgactttttagtgaaaccttcatctctaaaagccgaccgggttccatacgcatgaaagtaagctctggctttttctttgaccaagcatc

SEQ ID NO: 132857 - DNA, 658 bp, Arabidopsis thaliana
  unsure (1)..(658): unsure at all n locations
tccnttnnnnnnnnnnnnnnnnnnnnnnnnnnnnnnnnnnnnnnnnnnnnnnnnnnnnnnnnnnnnnnnnnnncttttttttttttttttcactggaacttattaattgcgattaattatgcaatttttattcttttggtttgaatgcaattttatcctacaaaaatataagaaactcaacaatgaaaactgaaaaatcgaaaagactatcattccttctatacattgaaaacattctctacccatgagagtccatttggacccaaacctaacaattccttcacacataaattgttcttgtctaaacactactaaacaacaacacacaaaatctcacaataaaacaatcaaccaaaccgctacaaacgctttaaatcaatttcttaccacattcaatgatttcacaagattagtttacatcactcactcagagctatttgagttctcctctctactatcatcatcatgatcactctgttgctgcttctcttgatgctccaccgcattgttcgcttgttccgcattcgcgtttgcgtttccgcctcttgaataagccgagttcaaagcggctaacatcccgagattcgagtccggcatacttagtcctaagttctgagtcggctgcggctgagctaaaaaagaacctaactgaagtggc

SEQ ID NO: 132858 - DNA, 754 bp, Arabidopsis thaliana
  unsure (1)..(754): unsure at all n locations
nnnnnnnngnnnnnnnnnnnnnnnnnnnnnnnnnnnnnnnnnnnnnnnnnnnnnnnnnnnnnnnnnnnnnnnnnnnnnnnnnnnnnnnctttttcggccgctttgatttgaacaaatctataataacataacatattacagtgtgttattaacacattttcgtgtagacaagtaacagatatgtctatctatacagacttatttttgagacttgtacacacaacatttgaagatccctcatgtatgttaggttgtagtaatcgtcactctatatacatcttccgcatcctatacatcctcttcctttctaaacatctctctactacttccccatatggttcacatcacccagtaccttgctcagtttctgcgatttcattcatagtcttgaacggaaaaagcgtttcttaaaaccaagatttgagttcttacgggaggaggacgtggcatatggttgaccgttgagacaacccgcaaatctgatatcccatccttcgatgttctttggaacacatgagtcgaataggaattgcccgagtacgctgtgagcgtttatgctcgttggttggagtgggcggaaggacgatctttctctctgttcttcttgtgaagatgatggatcgctgttgttgctgttgctttgatacggtgctgagctaggtaagaaaaagtggtcacatggcccagtggctactcttcttaggctttggttagagttcacagcaactttctgaaggtcgcatattaactcaga

SEQ ID NO: 132859 - DNA, 563 bp, Arabidopsis thaliana
tatagaagagctttgacgtcgcatgaccgcgtacgtaagcttggatcctctagagcggccgtcctttttttttttttttcattcatcagagaaaatccattacataacagtttacaaaataacatccatctcttcctttctgcatttaatttcttttcaatgaaaccccctgattttatctatcatttacagaaatcgaacctacaaaataaaaccattcaattctatcccccaaagtttttttcacatcgaaatgttaagatcaatcttaggcttcttcatggcaggcaaaggaacaaacgaatgacacctcgggcatttcggattgttctttgccacaaacacgtacgataagcaccctggacatccagccgccacctgagacgccgcgacggtggcagaagcggttccatcgtaaacgccgtcatcttcaggagattggcgtttctttgtatctttctccgccctttccaaagccaatttcaccttatctagtgtgcaaacactcgatagatacgagagagactgatttggagaaaaagaagacagaggaggaggaagag

SEQ ID NO: 132860 - DNA, 560 bp, Arabidopsis thaliana
  unsure (1)..(560): unsure at all n locations
nnnnnnnnnnnnnnnnnnnnnnnnnnnnnnnnnnnnnnnnnnnnnnnnnnnnnnnnnnnnnnnnnnnnnnnnnnnnnnnnnnnccacgcgtccgatcgtttctgcttttcacaatcttcgtcgcggttattgtgacttctctgctactgattggggacggtccattggacttcccaacgtacgatgatgttgtgtattctctcatttagtgtatcatcatcaagacatcaaactatataataaggcttgtgtttgtgtgtgtttatgtagtggaaaagatgaatttgagtattggtcaaaaaaaattacatcactactaaaaaaaaaaaaaaaaagggcggacgatctaaaggatccaagcttacgtacgcgtgcatgcgacgacatagctcttcgggggggcccccttaaaggaaccaagtttacgtccccgtgcatggaaagactgggttttctatgggggcacccaaattaaattccttggccccatttttacaatcgccagattgggaaaaccctgggaggccccaacttaatgcccttgcgaaaaattccccttt

SEQ ID NO: 132861 - DNA, 567 bp, Arabidopsis thaliana
atagaagagctttgacgtcgcatgcacgcgtacgtaagcttggatcctctagagcggccgcccttttttttttttttttctactaagacacatgtatttgttattcatcaacttcgaactgaaccagggaagagagagacaacaacagtttatcaagcatcgtgaagtttgcagatggaaatttttgataaccaaatcgacctaaaacatcccaacagtagagacaaaagaaagtgctttggatctcttaccattggaatacaccacgagaatggaatagaaactaagaaattactgcagaacttgcaatgtgattcgttggttgagaaggaagttcctgttctttgtaatgtatgcgttcattgcctgggtttgtgatgtgaaacgcaccaatgctaccctctttgaagttccaagtccttgaactgtgaggaactggatggatccaggataatagagacagccagataagaacctatctatgtcatctgttatagcattcaccggaatcccatgtagtgcaaccactttcccttcttaggacggaaggcttggttcgagcccgga

SEQ ID NO: 132862 - DNA, 858 bp, Arabidopsis thaliana
  unsure (1)..(858): unsure at all n locations
ttccttacatcactacactaggatgcacgcgtacgtaagcttggatcctctagagcggccgccctttttttttttttttaaaattagattgtaaatgctagtattaacttcaaatatccgtcaaaattttcaattattttcagtgttctcataatctaagcccttaatgttacaacaacaaaacaaccagaaagacgttgtgaaagaaaagaccaaacatcaaaccacagtttctggttatgaaaacaacagtcaagtggtagagattctgatgccactcagaacatagcctccaaaagaactcatctgcatgtgagggtgagatcttgaaggaagcacctgatattcgcgtagccatggttctgttatttgcagattgatcgccattttaccctgttgaagcttgtgcatacatgtcgccagcggctgtaaatactgatgatatatggcaaaaggagcagagtacggccagttaggggcaatacatccttagctacgatccatggggcttggtcttgcgcagccatgattagactcgaaaaaccgttttcttgccacatctctattgtttcttttgaagctttggctccagcttttgcggctttgataattatgctctctggtacaacaatatctactactccagcctcagttggtacagatatttcttcaaccataacatcagatgtagctgtttcattaatattgttctcagctttgcaaactccttcttgttgattgtttccttcagtagacccagttttggctgacgagagctcgtttatcgatgactgcacgatcctctttaaaaccttgtnactaaagttgaacatccttaccatctccacaggataagga

SEQ ID NO: 132863 - DNA, 598 bp, Arabidopsis thaliana
  unsure (1)..(598): unsure at all n locations
atagaagagcttgacgtcgcatgcacgcgtacgtaagcttggatcctctagagcggccgcccttttttttttttttttttttttttttttttttttttttttttagggaaatgctagtattaacttcaaatatccggcaaaattttcaattattttcagggttctcataatctaagcccttaatgttacaacaacaaaacaaccagaaagacgttgtgaaagaaaagaccaaacatcaaaccacagtttctggttatgaaaacaacagtcaagtggtagagattctgatgccactcagaacatagcctccaaaagaactcatctgcatgtgagggtgagatcttgaaggaagcacctgatattcgcgtagccatggttctgttatttgcagattgatcgccattttaccctgttgaagcttgtgcatacatgtcgccagcggctgtaaatacggatgatatattgcaaaaggagcagagtaggacagtagtggcaatacatccttagctacgatccatgggtcttggtctgccgcaatggattagcgcgaaaccgtttctggcaatcccatggtctttgagctggccagnttngggtt

SEQ ID NO: 132864 - DNA, 542 bp, Arabidopsis thaliana
  unsure (1)..(542): unsure at all n locations
nnnnnnnnnnnatagaagactatgacgtcgcatgcacgcgtacgtaagcttggatcctctagagcggccgcctttttttgttttttttatgagttattagtttttattacattaacacttctgtgtttaattacatttcttacaacactgaccttgaccttattaatcactggcctgtgtgtctggagagattgattcgggtttttgagtagtaatggagatggcttcttctatagcttgaaagaacgtagcaattttgtaagtaaagaacccaaccaacattggtatcaactccaaatgcatgaatccatactcaggaacaagtattgcgttccatctattgaatatcataaccaacacaacggggactagtaaccgtggctggttagctgcacctttggcaactcctctggctccatctgccatggcatctacagagttaccaagcatcctcatatatgcaagtgaacccaacaagccagcaccaaaactaagtgctatctctggggtgtatgagatataagctgagactaaaccaacac

SEQ ID NO: 132865 - DNA, 649 bp, Arabidopsis thaliana
  unsure (1)..(649): unsure at all n locations
nnnnnnnnnnnnnnnnnnnnnnnnnnnnnnnnnnnnnnnnnnnnnnnnnnnnnnnnnnnnnnnnnnnnnnnnnnnnnnnnnnnnnnnnnnnnnnnnnnnnnnnnnnnnnnnnnnnnnnnnnnnnnnnnnnnnnnnnccaaccccttcccaattttatttaacgcaacatgaaactttggaggttaaagggaggggcatagtttagtagagagactttttttgtcatatcacccacccaaattacaaattttttcccgatcaagattatttcaggacccaatctctacctgcgaagtctttcttgatgtaacaaaagattttactaataagcgatttcttcaagaacttggagggtttttgggggaacccattctagatgttgggctgttatcccggaggcattacccgagtatatacttcccagtccctttgggacagtttctagaaacattcctggtcttactggtaacggttttcttcctgtaacgcttccccttccttttaacccactgggttttcttccttcggtagaagaatcggattctttgctaagattatctgcgccttcatctttcccttgcattacattctggatcatctgctgcacagtctttccaggtttcagagctaccaatttggctaagaaatt

SEQ ID NO: 132866 - DNA, 728 bp, Arabidopsis thaliana
  unsure (1)..(728): unsure at all n locations
gaatgnnnnnnnnnnnnnntgacgtcgtttgccgcgtacgtacgcttggatcctctagagcggccgccctttttttttttctttttttttttttttcagcgcacaaaaagatcatcccattcccaatatgtcactctagacaagcttaaattattagtattgtctactgaggaaaaagctttttggtaaaatacacaagagctatataatacacatatactttctatattacatagagagaagagagaggaggctcatgaagtggcttgagcttcctcagagctactagcagagacttggccagtaccagtagcagtgtggccctcttcctcttcttcttcttcttcatcgcagaagatgctctcctcgcttgtgtccgagaacgcatcttcctcgtcttcttcgctaacttcttcttcgtttctcttctttctcaacactttaatgccttttctttgaatagaaagccttctccggtttctcgctttcctttttcctctgggaaactcttctccttgagagtgatgttcatgcagacggttccttcctcccttactgctttcgttctcatatgaatcctactctgctgcattgagcttacgtttctttatcccggaattagtcttggggccacgatcaaccagacgagcccactcatgcctattcctcacgcaatcaagaacagcccgtgaatggcttgaatatgcatattgttccccgctgggttt

SEQ ID NO: 132867 - DNA, 559 bp, Arabidopsis thaliana
  unsure (1)..(559): unsure at all n locations
nnnnnnnnnnnnnnnnnnnnnnnnnnnnnnnnnnnnnnnnnnnnnnnnnnnnnnnnnnnnnnnnnnnnnnnnnnnnnnnnnnnnnnnnnnnnnnggggttcctaactttatattataccacaaaaacataaatacagctcacaaaaagatcatcccattcccaatatgtcactctagacaagcttaaattattagtattgtctactgaggaaaaagctttttggtaaaatacacaagagctatataatacacatatactttctatattacatagagagaagagagaggaggctcatgaagtggcttgagcttcctcagagctactagcagagacttgtccagtaccagtagcagtgtggccctcttcttcttcttcttcttcttcatcgcagaagatgctctcctcgcttgtgtccgagaacgcatcttcctcgtcttcttcgctaacttcttcttcgnttctcttctttctcaacactttaatgccttttctttgaatagaaagccttctccgttttcttgctttcctttttcctttgggaaactcttctccttgaga

SEQ ID NO: 132868 - DNA, 545 bp, Arabidopsis thaliana
  unsure (1)..(545): unsure at all n locations
nnnnnnnnnnnnnnnnnnnnnnnnnnnnnnnnnnnnnnnnnnnnnnnnnnnnnnnnnnnnnnnnnnnnnnnnnnnnnnnnnnnnnnnnnnnaaaataatccgaaagtaaaatagttatttcggatatttacctatattagaaacaaacattcaacacaagctcagttcgtgaattggagaggtctctgactcaatgggagagatcacggactctttaataagttggagtcttttctttacaaatacaaaagatctattagatttcatcgttctgtgagttctctctctcaccacttgtcaaatgcatttccctgcgtgcagttaaaaatctcccatagttttaatcaaaagccatatagtttcacagaaggccaagcgtcttcagctgctggacatgctcagttggtaaagccgggggagaccattctgaccccggcatttcgccatctacatcctcgaccacatactcctttgttagcattcttttggcgagaatgtggtaatggcgctgccaaatgcgctgtccaaccatggttgcaaccaat

SEQ ID NO: 132869 - DNA, 872 bp, Arabidopsis thaliana
  unsure (1)..(872): unsure at all n locations
nnnnnnnnnnnnnnnnnnnnnnnnnnnnnnnnnnnnnnnnnnnnnnnnnnnnnnnnnnnnnnnnnnnnnnnctttttttttttttttttcaaactcaaatgataatctctcttttcttttgtatatctttagagagattacacttcttgtcctatattatatatatcatatcatatcatattacatcatcttgtgtggtccatcatcacataacacattaaaactagagaaatggtacaacaatcttccttctttctcttctcctatctcttacatcaaatttcctgctttttattttttacacctctgcatctttttggttattaagggtctctctattttatcagtttttttcttttcttacttcacttcctgtttatatcccaacacgacaggttggtccacccctaccgggtaacattccaatcgccggtaaccttggcatttggtagttgaaagagttgaaggagtcggagagtgtagaaggagtagaattatcatcattatcagaagaaggcgaccacagatccgatccgttattgtcagcagaatcagcaaacagaagcaaatgatgagcgggcgatgcaaacggactatctggcaagctatcctccaacctctctggtagattcattgtatcatcatcagatccttctttagaacttcctttccctttctctcctccatcatactctctcttgatcacggacaatgggcgtggagatataagtgattggctgaaaggattcggagagtgaatgttggtaggggaattgagttggaaatgcntcttgacgtcaagaagctgnagattcatcagccttctgctctgaagttcnagaatctcttcttcaaacttactcctccacaac

SEQ ID NO: 132870 - DNA, 549 bp, Arabidopsis thaliana
atgattcttcagcgtctctacgactcactatttggaaagctggtcacgcctgcaggtaccggtccggaattcccgggtcgacccacgcgtccggaggatagagcacatccctggccgatatctttccttcgcggtgcaatataacggctcgtaccatctctgactgcatttggatcttgcatctaccttgactctcaacgttggctgatgagatggacaacttccgaaggattgatgaccacttctcttgcacatgtccttcgcaattgcatggagatggaactggaggaggcaaagcctgaacagggaacagtcgtggatggagggagactagcagggagccagatgagctggccctatatctgctagttgctctcatctgattttacaaccatgcttgtgctgtgtacttttgccatattatgacaataacttgtaagatgcctattgatatagcacacacaggcatgtgtgcgcaatctatgtgcgtgtgaaggagacactgtttaagtttcaatgacgaggcgttcgtcatcaagaacttaccta

SEQ ID NO: 132871 - DNA, 544 bp, Arabidopsis thaliana
  unsure (1)..(544): unsure at all n locations
nnnnnnnnnnnnnnnnnnnnnnnnnnnnnnnnnnnnnnnnnnnnnnnnnnnnnnnnnnnnnnnnnnnnnnnctttttttgtttttttgatgatcacaaaatcccataccataggcaaataaagtcacacaccaaagatttgacaaacgcagacacacacttttgagctcacacacacaaaactctcgccacacgaatgaaactattaacaaaagacattttgagacatttttttcataagctctctttctttaccctaatcaaaatgcctaacggctcttggtgtcgccgccaccaccgtagctcctcctcctcctcctctaaccgttgtatccctattccggtatacttcagtaaacgattgtctcggcgatgacgaaagagacttggaaactctcggagacgaaactgattctctctgtgacggacttcgccaaaatccagctccgtaaaacctattccacatctctttctctaatgctaacaccgcctcatcatcttcatcagtctcctcctccgtcgtaaaccccgtcgctaccgatttt

SEQ ID NO: 132872 - DNA, 565 bp, Arabidopsis thaliana
  unsure (1)..(565): unsure at all n locations
ttaggtgccactatangaagatcttgacgtcgcctgcacgcgtacgtaagcttggatcctctagagcggccgccctttggtttttttttttttttttttttttatttcaaacatttatttcctctttatggttcaaaattattaggagtatcacaatatatttatgtatttaatttctctccttatgttttggcaaacacaaaaaaaaaaatatcttgtataaactgatacaaacccgtttcttatttctctctcgttttctccaaaagacttatcaagccgcaccatcacaaagcttgagagaaaacgaaagactcgttaatcaagaaaactctcagccaaaaccttcaaagtcaatttgattaaactaaacacatcaatcaaatcccctcgtttctcaaaacccatatctccttttcttctctcaccttgttttagccgtaaagtaatcaccttttcaacttctcaaaagccctctgtttctctcatctccctctctctgacgatgaaagagtattggacatctttggcttctctactcggcgttttagccttttgccaaagc

SEQ ID NO: 132873 - DNA, 565 bp, Arabidopsis thaliana
atagaagagctttgacgtcgcatgcacgcgtacgtaagcttggatcctctagagcggccgtccttttttttttttttttcttttaataactttaattacgatttgtttttaaaatttattacaaacgataaacagcttgatagctctttcgatatggttatggccttatgggtagaaccggggtaactagatatggaaaatatggagaaatctttagatttttactgccaaagggttgtctgattaaaatgaatccgggaatccgtttttacattcctaaaatgatgagaagaataccaaatcgaatttccgacagaaccaacgcagcactaaggtgacaaaacgagatatataacttactccctttcagcttccatgggcacaccacactctgcaagttttgatgattggttgggttgattcaggaggaagtacattgtcgtcgctggttggtttctcaggggatctcctctctggtaagtcgcactggtttgttttgtagatacacaatctctctgtctgctacatttatgagatgctgctctgatccttcttcatctgacac

SEQ ID NO: 132874 - DNA, 785 bp, Arabidopsis thaliana
cgacggccagtgaattgatttagggtgcccctataaaaaagctatgacttggcatgcacgcgtaagaaagcttggatcctctaaagcggccgcccttttagagaggtttagagaatatgctttttttttatccgggtgaataagttttcatacaaaagatagtttgatcaacaagtattttgatatatacggtttgacctgattgatttggatctgtgttccaaaaggtcacaagacaacgaggaataacataaactcattcatacgtcccattttcaagttcctctgagaaatggaacaaattcggtgtgatatgttttgattgactccacagcagcaacagcattagcttcttcttcgggataataagcgatcggatcagatagatgcggttctggaatcttcagcaccccttcgagcatggcgtggaggcagtaagctgcatatgttacatgatacccgccttcttgcaccataagcaaccttccatggctgtgctcctctgcaactcccctcattatctgcccaatccttctgtatccattcattgtcaggctttgtctcccgtttggatcaaaagcgctagagtcttgaccaacaacgagaacaaccatatcgggtccaaaccttctaactgcaggaaccaccagctcattcatggcatattcatatccccggtcacccgtgccattcggtaaagggacattcagacggacgcgtgggtcgacccgggaattccggaccggtacctgcaggcgtaccagctttccctatagtgaggcgga

SEQ ID NO: 132875 - DNA, 863 bp, Arabidopsis thaliana
  unsure (1)..(863): unsure at all n locations
nnnnnnnnnnnnnnnnnnnnnnnnnnnnnnnnnnnnnncgtacgtaagcttggatcctctagagcggccgtcctttgttttttttatgtactcaaatctttattcaatgtaaaaacaaaatcctgaaaacagcaaagtttttcttgtctctttaaagcattacagccaatacacatataagagagtattacttttttctcttcctttctataaatggcaaaacaaaagcaggaaggagaagaactaggaggaacaagaaagcatgcagacgcctggcctgtaagcccaggcaggaggcaaccgagcatatttctccatccccggctgttcctcataaggacgtttcattagacggatcaaattgttgacttctgagaaatcgccttgttcagctgcatctattgcactttggcacagatagttcctcagaatgtactttgggttcactgaatccattcttgcttttctttcttcatctgatacctcactaccacccacctcttgtatatagcttctcatccatttgatccatgcttcttttctctcctttccgatgtccagagcacagctttcaaggggttcaataactcattttcgggtgtgctgggattgtgcttttacatttgcaagaagccggaagaagttggtgtaatcaactttatcaacagacatattgttcaaaagtttgctaatgacctccttgttatacttggtaagaccaagcttcttagacattatggcttgataccatccatgaatttatcaccgtacctctccatggcgtaattcgccnccttttgatttatcagttgagcaaccgccagagtcttagaaaattgagcaatattccacaagccgatgtc

SEQ ID NO: 132876 - DNA, 650 bp, Arabidopsis thaliana
  unsure (1)..(650): unsure at all n locations
nnnnnnnnnnnnnnnnnnnnnnnnnnnnnnnnnnnnnnnnnnnnnnnnnnnnnnnnnnnnnnnnnnnnnnnctttttttttttttttgttgtaccaatctttattaatcaactttcaaaccagttttaagatgcagatcatcactcagatattacaaaagctttgaatgcaagaatgaattttgctatacgaaaacaaaagacaaaacagaaaaagaaaaaaagaaaaaaagtattcccctgaaagacaaaatgggtataagagtttgtaagaaaaaaacagagaaatattttcagttggtcaatttctcaacgatcttggaaagagctgaatatgagccaatgactgaagatattgctcctactatgatgattaagacacacaacatcatctgggtcggggtaacttttctccttacaatgctcaagaaacaagctggaggaagtattagagtgacgagcatagtcaaccaacggtcccaatccaatggccatggcaaggcccaaaggagggggatagccgagaccaccaagcagagttgaggagacccattaggggtctaatgccgatggnggtncccatggtgncctggaatgccttggtggnncaacccccccaggcncttgntnctggggnatgggcaancttga

SEQ ID NO: 132877 - DNA, 641 bp, Arabidopsis thaliana
  unsure (1)..(641): unsure at all n locations
cactatagnaatagctatgacgtcgcatgcacgcgtacgtaagcttggatcctctagagcggccgccctttttttttttttttgataaaaaaaagtagatgtttctatttcttcatttgttcataaacaaaatacatatatatatagccatcccaggctcatcatggacttatctattaattagtatttttttattaataatatataagttataactccttcctctgtagccaatcaatgagctttaagcagagtttacagtatatggaatcaatagagctttccactggcgaaatctgatatcagcttcacaatgtgtttaggattctcaacatgtggaagatgaccggaatctggtacttcccgcaaaaccgcatttgctagctcacacaacaatttaactgagagctggttgctaactatctgatcgttctcactgcataccacgagcgtcttatggtcaatatgtttgatgtgtgacgcgacgttatagcccccgctaatcataaaatcgaccatagcatcctcccaccacggcatttgacaatgtaaccgaccaatattagtccaatctatgttctcggataagggcgaggaacaaaaggctaggacattggccaaaaggcgcagagggaatgact

SEQ ID NO: 132878 - DNA, 962 bp, Arabidopsis thaliana
ttgttgagagaaggcaaaagagaatgatcaagaatcgggaatccgctgctagatcaagggctcgaaaacaggcttataccttggaactggaagctgagattgaaagtctcaagctagtgaatcaagatttgcagaagaaacaggctgaaataatgaaaacccataatagtgagctaaaggaattttcgaagcagcctccattgctggccaaaagacaatgcttgagaagaacccttaccggtccgtggtaagaaggtgaagtcaaagcaagaagaacctgctaatgtaatacaggaccactcaaaaggaagacactgggagagtaatatgtaatagaagatagtgctactgtacaggagaaattacagagacgcttacaatgtagaaatcttttgagctgaatttaactaagagtgcagtctgtgtagagtatgagagctttcaatatgaattcataattttcataaacatatgtaaaactttcagatttagctatagagaagatgtgactaactcagaaagaaaatccgttaattggagagtgaggtaaactccggctgtaatgtgacctggaagtagtactagacgatggaccaaagatccgggaatcacctctttgaattctcaaattgcttctcttcctactatcccagcctatctcttcttcaaccgctttagcaaatgcgctatgcaccggatcacagctttcacacaacagcctcaagacttgcttaattgatggcctagaccggccttctttctcggtacacaatctcacaaccgtcacaactgcatcaagttgttttcctccagcatcattaatagagtctttgattctcgggtctaccaactcgaggtgttttgatttcgccaacaaaaaccgctgagacatttccacaaggttcctaccttcatcaactgctcttctcccggttatgagctcagcaacacaactccgtagt

SEQ ID NO: 132879 - DNA, 594 bp, Arabidopsis thaliana
cactatagctgagctatgacgccgcatgcacgcgtacgtaagcattggatcctctagagcggccgccctttctttttttttttttgaaaatggaagagaaactttctcatttgaagaatcactaaattcgcttctggttttcacatccagaggcaagcaagcccaaagccgtacagaatcatcagttagaaaagagataagttggattggatccccagactccattggaaaaagataggctcctaggaactccgggctctgtccctggacgtcccaagatgaccttacctcaactttgtaggtgaaacgcatctctattcgagagcttgggctctctctttacggattgtccctgcataaggccaacccagagctgggactgtatatatgtgtgctcaactatgaggaacctacaagggaagggaatgcctatcttcagatgtgatatcagctgccaacttctgacaaaacggatgtgctggcccatcagcctaagtaagaacacacaccgagcgacatgggaaatgctgaagaatgaacccgaggggattgatcatgacagtaatattccatggctatgcagtggaacgaagt

SEQ ID NO: 132880 - DNA, 614 bp, Arabidopsis thaliana
  unsure (1)..(614): unsure at all n locations
gannnnnnnnnnnnnnnnnnnnnnnnnnnnnnnnnnnnnnnnnnnnnnnnnnnnnnnnnnnnnnnnncttttttttttttttttagaaacacacacataagaatgtatttgttttgaacaagcacacacaaataagagaatccaaagtcttacaacacaaattagtaaaaagactaaagagttttcaaacacatcagtaaataaaacttaaacattggaactgtgcatagtgttttttttttgtcttgagcatcttcgtttcaaacccgctctttgttcttcgatttctccactgcacctggagctaagccaatagaatcagaacccttcatgatcttcagtttctggcatgtttcagtaaatatctcccatggaacatcgccaacaagcatccaatcaccgtctttatcttcataagtaagcacaaattctgatccatgaagaagatccttcagtttaatctcgctcattctttccctcccttgagcaccatgaagaccacattgaccaagggtgaagcagctgaacattttctcaagtgcagaagacaactgttgataggaagtgtaagttctcaagtcgacctttctcagatacggagcaccatccatgct

SEQ ID NO: 132881 - DNA, 595 bp, Arabidopsis thaliana
tgaatgaactgcactatagtaagagctatgacctcgcctgcacgcgtacgtaagcttggatcctctagagcggccgccctttttttttttttttcttaatgccctcgtcatcttcatcctcatgcttcatgactttcagctttcctttcagctcctgaatctccatttgaagtttctgcttgctgtctaactccttctcaagctgaaggatcttgttcaacgtctcctcttttttcctcttgtgttcatccacaagtcttaggacacgatcatctgtctttttctgctccagggaagccaactggagggagctgttcatgacatcgctcttcttcttgtcttcatcaagcttttgtctctccagttcagttaatgcttgcttcttgtccaattgtttggaccaaatcttcagattattcatcttagcctccagttcattggttagcctctctttttctctaaagatcctgtttattttctcccgcgataactcctgcattttttttgtttcttgtttataaactcggtccagctcgtctttctctatgagaaccctccgcagagagagcgttttctcattgttcatgtactggag

SEQ ID NO: 132882 - DNA, 628 bp, Arabidopsis thaliana
gacactatagatgtagcttgacgccgcatgcacgcgtacgtaagcttggatcctctagagcggccgcccttttctttttttttttttttttaaacccctagaaaccaatcaccatgtaaatgttcaataacccaattggtttgtgtacaaaggcatttttcctagacgacagaaatctatgggtacattacaactgaaaaagaaccattgtctctatccccaaactaaatcaatcaaattcgtcactcaaaactatgtagagagaatttctattccagctgtatttacatggaaacctaaaatgaaaaaaaaagaggttagaaaggcattgttgatgacgatggtataccagatggggtgtttatggaccggtttttctttctttctttctcagctgcggggatcatcattcaatggcaagagacatggaagtggccgtctcccaaaaaggaatcattgtcaattaaatcggctttcttcgttggaattgccagcttcctctgggtggtttttcaatgccgagctagaaaaagcctcgttctaacggaagcctttaacgacagtcattagtctacggtattgagcccgtgcctctggatattgagccatagacttcactcgggttaga

SEQ ID NO: 132883 - DNA, 625 bp, Arabidopsis thaliana
  unsure (1)..(625): unsure at all n locations
nnnnnnnnnnnnnnnnnnnnnnnnnnnnnnnnnnnnnnnnnnnnnnnnnnnnnnnnnnnnnnnnnnnnnnnnnnnnnnnnnnnnnnnnnnnnnnggacaaacaagaaaatgtttattcatttatcgattgatcttattcatcaacatcttcgacatatttcttccataaccaatgctgtctccaaagaagataaacctcttcaatcggaacctgtttcgtctccggcaacagaaagtaaacgaagcttcccacccccaatataagtccggcgaataaaaggaatattccgtacttgagatggcacagcgacaccaggaaacactgcccgattagagccgtgaagaaaaggttcacgcacaccacaacgctctgaccggctgatcgagtctttagagggaaaagctcgctcggaactaaccatcccattggaccccagaatcgaccttcccccaatccaattagacggataaggcccacaggattcagaccgagcgattttggtagctccttaccttcccaaacttcaaggctagggttactcctactacaaccatgtaacaaaacatctccacgctagcttaaagaagaagaaaccttcttccaaatttatcagctgaatacata

SEQ ID NO: 132884 - DNA, 692 bp, Arabidopsis thaliana
  unsure (1)..(692): unsure at all n locations
ttttnnggggccntttccctttggggggccnccntnggnccngcccccnggtcccccaaccgggggggtttttttttnncgcctttgccnccttnaaccccnttgnccgnngtncaaaaatgnttgggttggttgcccccnctttggtggtaccgaaaggcccaaaggtcntgtcatcatgnantccctnccccaacaaaggatttggaaggtcacttgnccctgggggnccaaaaacctttggtaaaaggttccccattaccaatggttttcccatacacaaccaaaggacaagctttggccaatcaaggcaaagccaacacctaatcttaagaagccgagagaaacatacttggcctgtgtaaacaacagaggctacttgatagtgatgtagcggtttgtcccgtgcctagcccaatagtctttaagatcaacaggacacgagagatcatatccttctgctgataaacggctgagtaatctcgagaaaacgtttccgctcattttcctaccgcccatccgagaatgcctcttgtttggcatctgcggtaatggatactgggataaggtggttgtgcagcaacacgattgccagccgccatttccccatttgtaacaatgacgcgtagagcctgtgcacgaacacatgggtacaggcattgtcgtctcatcgaaggtgactaagttcaaag

SEQ ID NO: 132885 - DNA, 550 bp, Arabidopsis thaliana
  unsure (1)..(550): unsure at all n locations
gctatcaaannggtaacagattttgatttttaacngttacgattttattttattttttgaggtcaaaacacagattttttatgcaaaccatttttgcccatccaaaagatacacataacaatggttttaccatacacaacaaagaacaaactatggacaataaagacaaagacaacacctaatcttaagaagacgagagaaacatacttggactgggtaaacaacagaggctacttgatagtgatgtagcggtttgtcccgtgcctagcccaatagtctttaagatcaacaggacacgagagatcatatccttctgctggataaacgggtgaggtaatctcgagaaaacggttccggctcattttccgaccgcccatccgagaaggcctcttgtttcggcacccgcgggaatgggtacgggggnaangggggttttgccacaaaacggnttgcaagcggcatttncccctttgtaaccggcgggtaannctgtgcccgaaaanggggaaggccggaccnngggtaccngggatcggcgnaccgagggttt

SEQ ID NO: 132886 - DNA, 622 bp, Arabidopsis thaliana
  unsure (1)..(622): unsure at all n locations
ntttaggacgnnnnnnnnnnnnnnnnnnnnnnnnnnnnnnnnnnnnnnnnnnnnnnnnnnnnnnnnnnnnnnnnnncttttttttttttttttggtctaaacttatttttattgagagactaaagacagaaagatacaacagtcgatacataaagtgtggacatcacaaccaaattgttcgtaaacacagaaactcccacatttttcttcctaatttcacagtatctctcagttactatactgaagatgaaaatataagagaaagtgagaaagagagaagacggtatagctaaactatagagagaagagctaaattaaagagctccatcattcatttgcagaggacgatccatattccaagcattgagactctctatggtcacagtttgtgttccattgttaaagacatacaaatgtgcattctcttttactgctttcactggatacactcttgatgttatcaccgttttacctaatgctccaaagctctcttactactgaatgatcaatcaaactccttagagagatccttccatcagccatatcaacatccacaaaaccagcaaacgatggtttatacatcctatcttttgcgagtaaacccgtgtcttgctttaacgac

SEQ ID NO: 132887 - DNA, 477 bp, Arabidopsis thaliana
  unsure (1)..(477): unsure at all n locations
tacgacnctctataggggaacctggtacgcctgcaggtaccggtccggaatttccgggtcgacccacgcgcccggaaaccgaggaagcaagagaaaactccgccaatggatgatgatcccaactatgagtccaatccacatccattgttccttctcggtaatgccaatctctcctctcctgcaaatctttgggttccatatgttctaaaaaagaaagaagaagtggcccactcttacaccctgtgccttggagctttttataggatgttgtttttatgggctcatccaaactacgtttggatcagggggttggtgcccctcattcttttcttcttttaaagcgggagaaagctttggattcattgatttcacccgaacgccagacatatagattggttttgcttgctctgggtaaatatgtctaaaaaacccggttccagttttttttattttctaatatcccataatatatttatt

SEQ ID NO: 132888 - DNA, 616 bp, Arabidopsis thaliana
  unsure (1)..(616): unsure at all n locations
nnnnnnnnnnnnnnnnnnnnnnnnnnnnnnnnnnnnnnnnnnnnnnnnnnnnnnnnnnnnnnnnnnnnnnnnnnnncttttttttttttttttaattgaactgtagaatttcctaatcaaggagcagtaataaaaaccacaaagagtatttattgttcaaggacattcttaaatcaaagtagattaattaaaagcttgtaagagttttctttcttctacttcttgttgatgctgaggatcttgtctctaagaagcctcctcatgattttaccagagagagatttagggattgaatccacaaaatggacggctctaaccttcttgtaatgagccacatttgctgcaacaaagttgagaatgtcttcttccttttctgtcgctttcggatttatcaccacgcaagccgccggaatctccccggcttcctcgtccggtaacggcacgacggcaacgtcttcaacggatggatgagtgagtagaatagcttcaagctcggccggagcaacctgaaaacctttgtatttaataagttctttgatacgatcaacgatgaagatgtctccatcatcatcgatgtaacctatgtctcctgtgtgaagccaaccttgttcatcaa

SEQ ID NO: 132889 - DNA, 617 bp, Arabidopsis thaliana
  unsure (1)..(617): unsure at all n locations
nnnnnnnnnnnnnnnnnnnnnnnnnnnnnnnnnnnnnnnnnnnnnnnnnnnnnnnnnnnnnnnnnnnnnnnnnnnnnnnnnnnnnnnnnnnnnnaccagatcgaagttcttttaggcttatagaaagatttacagactgcttatttccagagcgtcaaagggaacttttttacattagagacttgagatattcgtcgggaagtcgttgatcatcatcatagctggacattaaaggaactgttcttgcaatgttgagacaagcttttgagaatgatcttgagaatggacatggattcagacactccctggtcaagcgtttccatgctctagatatcttctgggcaacatgggttcttgcttcatcaacagttgatcccttgtcctcgttcaggtaacactctacatatgatccatcagttccatcttggttctcatccttggcccttccgagatcatcccaaagcctgagaattgtagctgcagatgatacaatccccgggttactctctattagttcgactttctcttttggtagttcttcgcctaccaggatataggcatgaagcatcactaaatgaacacctgaacttcacaccccattcttcatatactcttca

SEQ ID NO: 132890 - DNA, 679 bp, Arabidopsis thaliana
  unsure (1)..(679): unsure at all n locations
nnnnnnnnnnnnnnnnnnnnnnnnnnnnnnnnnnnnnnnnnnnnnnnnnnnnnnnnnnnnnnnnnnnnnnnnnnnnnnnnnnnnnnnnnnnnnngacagtaatcgaatcattggtacttaaactagagaatctattagtcgtgtaacaaaaattagaatacaagacttaaaggaagagagagtgtattgatttggtgagagaagacaaaacaagttcctgaaacatagagaagtgtctacattctcaagtggaactttctgttttctgtttcttggccttctcaatcagaggtttcaactgtttcttctcagcaagaagtttgaggaagttgaacagaaacggaatgtagttatgcttcctcctaatgttctctgttctccatttcatgaacttctcttcctccattacaatcttatcactcgcagcctcgatcccactgcctacctcagcaatcaacgcattaactgcttcctcttcgcttttgtccacacaagtattagcctgctgcaacagctgttccctctgcctttgaagctccttgagttccgcagtgtagatatccttcctgtttttaatgacagccaaaagattgaacctgatctcgctctgtgagtacctntcaatccgttcttggatcactggttgaaccatttgcagccactcgataccagtttggtc

SEQ ID NO: 132891 - DNA, 734 bp, Arabidopsis thaliana
  unsure (1)..(734): unsure at all n locations
gattgagctgannnnnnnnnnnnnnnnctatgacgtcgaaggcacgcgtccgtaagctggaatcctttaaagcggcccccctttttttttttttttaactttgcagaatttccactaaaaaacttgatcaggagaacaatacacacacatagacacaactatgtataaaaggaattatgtacatcaaaaactataacaatgaaataggaataaaaaaacatacaaacaaacaacaaacaagttcatttttcttttgctgggattcgccggttgggagaaacttactcgccggtgaccacaaattaacacgccgacgaccacatcaaaagggtatcgaagaaactacaatttaggcaaagttgtgaaaagctgtgtgctataagaacatgttgattaccattagtaacaacattagagtgtttccaacaatgtccaaagatatcttctgcggtgctgcagcattctcactaaactgtcctgcgttcacatattcgcttcttccgctgctgctagtcgctgagacatttaccgacgtcgaacagtcgtagtttgcccatccgattctctgaccgaccagatcatagacaaagatcttgtctttaagaaccaaatctccaaggatcgttatcccttgattctgtatcctttgaaaaccgcggacgcgtggnnnnnnnnnnnnnnnnnnnnnnnnnnnnnnnnnnnnnnnnnnnnnnnnnnnnnnnnnnnnnnnnnnc

SEQ ID NO: 132892 - DNA, 643 bp, Arabidopsis thaliana
  unsure (1)..(643): unsure at all n locations
nnnnnnnnnnnnnnnnnnnnnnnnnnnnnnnnnnnnnnnnnnnnnnnnnnnnnnnnnnnnnnnnnnnnnnnnnnnnnnnnnnnnnnnnnnnnnnnnnnnnnnnnnnnnnngaatcgaacttgatttcatcgtggtattattgggttatatatgctactgaaatttgatttaagaaaaacaaaaaagacagaggaatttcgaaatttggtgtactctgtgactcgatttcagagcatgtggaagatcaacggagcaccaaactgaggatgaagtgtaagaaccgtatgaggtgcgtgagtgtacgaaggagacagctcaaaggagaatctctgcagaatcaagacaagtgccatcttagcttccatcaaagcaaaattctggccaggacagaatcttggtccccatccaaacggaagaaacgaaacttggttctttgtggcttttgagataccatctgcgaatctttcaggattgaattcatgcacatcttcaccccagagctcgggatcacgatgaaccataagaacaggaatcactacttgtgcaccacctggtagtgtcatgtcttcaccaagctttgtttctttctctacggttcgaccaagtagtatccctggtgggataacctcaaaacttcgttcaa

SEQ ID NO: 132893 - DNA, 622 bp, Arabidopsis thaliana
aattgagccgcactatagatgactatgacgtcgcatgcacgcgtacgtaagcttggatcctctagagcggccgccctttttttttttttttatgaatcacaatcacaaacacttatttatcatcttacaacaatttaataaaatacactcatgcatatttttttagttcgtgaggaacatactggattaaggaaaaaaaaaccataattagaattttgtttgactaaatcaaatcatttgtttagtcctaaactaacgacatgttggataaatccatctaaatcattcactgagctcccacgttcttgaatcgcatccaacgctgctttcctcagctccacggctttgatcctctccgtttgatttccggtcacggaatcagcgaaaactcgagctaactcgtccgggtcaggcaccgtgtcaggtccttcgcaagcacgcacacctactttcaactcatcaaccaccagagacgcgtcagtgtactggtcagctctcatcggccacgtcagcatcaaaacgccggcgacaaccgcctccaccacagagttccaaccacagtgcgttaaaaacgcgccaacggctcggtgacgtagcacagctacttgtggagcccatcctt

SEQ ID NO: 132894 - DNA, 526 bp, Arabidopsis thaliana
  unsure (1)..(526): unsure at all n locations
tttaggacgannnnnnnnnnnnnnnnnnnnnnnnnnnnnnnnnnnnnnnnnnnnnnnnnnnnnnnnnnnnnnnccttttttttttttttttaaagttttaatactttttattattaagttttaaaagggaaatacaaatgtgtgattacaaatccaggaaccacaattgaagtttataactgaaaaacaacataagataggtaatacacccaaatttatccatccttagatcccttaaaggtttcttagtaaaaagtaacgaccaaattctccgaacgagcctcgaactctcccaccctatcagctgcagcacgtatcggaagcagttgaatatcatccaatccaattggctgatacagatccaccctctccaacatacgaccataacgaatcagatactcgagaacacgtaactcgtgcgtaccaccataaaagctccacacctccactttcttaagtgttttcttcaaacattcatgactggtattctgcccccaataagcctctggattcgatctgaggcacc

SEQ ID NO: 132895 - DNA, 569 bp, Arabidopsis thaliana
tatttaggacgcactatagaagatctatgacgtcgcatgcacgcgtacgtaagcttggatcctctagagcgtccgcgccttttttttttctttttgaatataagatatgtaactttttattgatgaaaatgttgagaaaaaaaaagagtagaattgaaatgacaagatggttcactatcttcttggtttcactaagccctaaaagtaaaaattgaaaatgaagaagaatccaaatcttcctctttgcccttttagtagccccttcttcttcactcacatcccaacttctcttatgtacacacagagtaatctccaaccagtaacatctctcagtacctaacaacaagtgaagctaaaggaagaaggagccaatgcaatctcaatctgtagggaaaaatgaatggagggaatgaagacaatagaacagaaaatacagagacagagatcacagggcaatgaagaggtgaatgaatgaacaaatcataaagacctgattgatactctacactaatgggttcccttgtaatgaagcatcttatgaagtaaaagtgggattattaagcttaagg

SEQ ID NO: 132896 - DNA, 521 bp, Arabidopsis thaliana
  unsure (1)..(521): unsure at all n locations
nnnnnnnnnnnnnnnnnnnnnnnnnnnnnnnnnnnnnnnnnnnnnnnnnnnnnnnnnnnnnnnnnnnnnnnnnnnctttttttttttttttcattgtatcaatatgagagagtaggctttctctttcactagttaaagtggtcttgtcatcattcagcaggtggcatgattcttctaggcttttcaatttcgacttgagttcttcaagttctacattggcattaaaaagagaattctccagtaccatgttttcctcagagagtttcttgctgttttctgtagcactctgcagacgggaaatcaacatgtccttctcagaatgaaggcctgatttctcttcagcaagtgacatagaagcttcctccaatgttttcagctttcctctgattgtttccagctcagcattcaaatctgatatggagttctccagaagaaggtttttctgaacaagcttttccatcatttctaacttctcaatcagggccgtcttttcaatactttctctttcccggatttccttt

SEQ ID NO: 132897 - DNA, 519 bp, Arabidopsis thaliana
  unsure (1)..(519): unsure at all n locations
nnnnnnnnnnnnnnnnnnnnnnnnnnnnnnnnnnnnnnnnnnnnnnnnnnnnnnnnnnnnnnnnnnnnnnnnnnnncttttttttttttttttcgaaaacaaatctaatactggtactggttcgggccaaaatcaatcaaaaaccacattgatgatacacggagggcttaatacattagattactctatacaacagacacagacatatagaggttctagctcaacaaagagcaatggtactatgagacccatctgttctcggaccggttgagagagaacgatgaagattgaacctcgctcaactggaaaggatccggttcgattccatagtccgttaatggtctatgctcgagcacattgtcatggttcttcacaaagtcgggaatttccacctcgcctttctttatgtcctcccaaaggtactgcaacctgctcacgtacttaatcttgcagtacagtcctccacttaaaagaaggcggccaagagtggcaatgacaagtcttgaacgaagaccaggg

SEQ ID NO: 132898 - DNA, 530 bp, Arabidopsis thaliana
  unsure (1)..(530): unsure at all n locations
nnnnnnnnnnnnnnnnnnnnnnnnnnnnnnnnnnnnnnnnnnnnnnnnnnnnnnnnnnnnnnnnnnnnnnnnnnnnnnnnnnnnnnnnnnnnnnnnnnnnctctgtttcaactccaaatgttgctccctttcttcaagtttcttttcctttaactcaagaaacttgttcttcacttcagtctctctggctgctgcttcatgtttcagttgaaagttgacttctttcttctccagctccatcgatttcccttggatggtctcattaagcaacctaagctcattctccctggcttcaagttgcttaagagatgtttccatcagctcagtctcttttctcattctctcagactctgttgtttgcttaagatcaaagtctttgactttcatgtctaaatcacaagtcttggcatcgatcgtcttagaaatcaaagcaacctcatttttccttgcttcaagctctgtcattagctcttcatgcttcttcatcatcgaatcatggagcgaaccagaaagttctctgggcgttgagc

SEQ ID NO: 132899 - DNA, 525 bp, Arabidopsis thaliana
  unsure (1)..(525): unsure at all n locations
nnnnnnnnnnnnnnnnnnnnnnnnnnnnnnnnnnnnnnnnnnnnnnnnnnnnnnnnnnnnnnnnnnnnnnnnnnnctttttttttttttttgttttgttttgttttgtctcatctctaaaccctacgtcaaactcacaatgacaaaacatatatatctcgttcttacattcccatgcatcactcatagataaaaattaataaattgtatcacccaaatggcgagtttcttccttgtattaatccaccattagggttcatcataggactcaatggtgatctcctaggcgatggcctttccagtaatttcccaccattattcccttcatcacctgataaacctgatttcctttcgtagatctccgacaaagaatccaaatccgtggagacatgtgtagccatctgtatctgaattctatgctcatcatcgatcgattggtttgcggaaagatcgtgatcttgatcagaccacatcaatagtcctttccttacatcgttaccaaaattaggattaggtcgcttcttcc

SEQ ID NO: 132900 - DNA, 529 bp, Arabidopsis thaliana
  unsure (1)..(529): unsure at all n locations
nnnnnnnnnnnnnnnnnnnnnnnnnnnnnnnnnnnnnnnnnnnnnnnnnnnnnnnaaaaaccaaattttataaccctgcgtcttggttttatgtaaaagaatggtataccgtttgcaactaagatacaaccatcatatacctatataaaaaaaacagagataatcatcgcagtatcatcacttttatacgtttaaagaacacttacacaacaaacacaccaaatgcaatccacaactttcattttcttttgtatggcatttctcgtgacagaattatttggaactatgaacatttggtttctccaactgtaggagctttgtagtagtatgcaggtacagttgctgggaaaaacatctgcccaactccttccgcttttattatcggaaatattatccccgatgctcccgagattaatttggctccaagccagattcgttttggggaagggaatgggattaacaaccgtatgactccataaaccgcaaccgcaaagaaatggcagacaagtgttaatggtcgagggttcaa

SEQ ID NO: 132901 - DNA, 648 bp, Arabidopsis thaliana
  unsure (1)..(648): unsure at all n locations
tttaggacgnnnnnnnnnnnnnnnnnnnnnnnnnnnnnnnnnnnnnnnnnnnnnnnnnnnnnnnnnnnnnnnnnnctttttttttttttttaaacacagaacgattatagaagatagatagagaagcgaaatcatcaacaaaacataatatagcccgagattaatatgcaatttcaccaagattagagtttgtcaaaaggggtgaaattagaatccgaaagtcattagcctactcgatccggtttactgattaccggattccacaaaagacaaaataaaagcataaacctaggataatagatagttttttttgttcagaaaccgacgaagaattagatccgacgacagattctaaacctctttgttctcgtcggtgatcacggtcttcttctccgcgaagatccaagtgacaccaaaaggatccgtaacttttcctttgaatcccagttcaacttctgcctccgtaacctccactttcacagctccggcgtcaacagctttcgcaacggcggcttcagcatccttagttccgagaangaaaagtcactcccgaacctttccgatttcgcagtagaaaaaccaggggagagaggaaacgtcgcaaanaacgnagggaagagccagcgagnttaagctcagaagngagac

SEQ ID NO: 132902 - DNA, 581 bp, Arabidopsis thaliana
  unsure (1)..(581): unsure at all n locations
nnnnnnnnnnnnnnnnnnnnnnnnnnnnnnnnnnnnnnnnnnnnnnnnnnnnnnnnnnnnnnnnnnnnnnnnnnnnnnnnnnnnnnnnnnnnnnnnnnnnnnnnnnnnnnnnnnnnnnnnnnnnagggaaaaccaaacttttcatgttataatatatacaggtacattacattaaatagtatgcaatcgccctgggttaatagatttttggatgattttgggtacaatgagaaaacattatgggctcagaagctttggacccatttttgaaatcatccaagaagggattgcatcaacgagctgcgcaagatctttggacatgtcagcacgaaggatcttcgagtccattcccagcgaacctccaacctctttagccatagattcccacggagtcccgacagcaatattcgctaaaaactcacttcctcgattcaccgcttctgccattcctgggggaacatccggaagagcctgttgcagagggagaccgtgatctccgcgcggcgttagacatgtctgcttgagctatgatgatcacacagcactgagctagatgagttcacttgatctctgatttcacg

SEQ ID NO: 132903 - DNA, 752 bp, Arabidopsis thaliana
  unsure (1)..(752): unsure at all n locations
nnnnnnnnnnnnnnnnnnnnnnnnnnnnnnnnnnnnnnnnnnnnnnnnnnnnnnnnnnnnnnnnnnnnnnnnnnaccaaacggatgctgttcaagggcctatggcctaaagaaagagattatatataagttcaagggaaatgcattaactaaaactgaaaaactttaaaatcatacattttgcattggttatcggtccaaatcataatcaacttatttgataatcaaaatcataagttcatattccaaatccgaaaactgcacggatcctatggaatataagatctctccatcctctctcagtgttttccaccacagtcgcattcccgtatctgtcctcttcaggaacgtcagtgtgagtaagattgacaatggtgactcctggttgaggctcctcgaaaacgatcttcaccgttgaatcaagaccatcaggccagctcccaaatctccacttctgaacaatcaatttgccttcttcaagctcaagattcattccagtaacagacccatcaaagacactaatcggaccattcacatctttactaatcttagcattactctgcgtaaaacccttccaacgattcttatccattaaaatctcatacaaatcccctactttgcaattaaacttctcggtcataagaattggcttaaacccttccttaatcttcgccttctttttttccttaactaccttacttttcccccggagaagcaacacccccgggggcagaccaaattttttccccgccc

SEQ ID NO: 132904 - DNA, 511 bp, Arabidopsis thaliana
  unsure (1)..(511): unsure at all n locations
gnnnnnnnnnnnnnnnnnnnnnnnnnnnnnnnnnnnnnnnnnnnnnnnnnnnnnnnnnnnnnnnnnnctttttttttttttttaacacaaacataatttatttcattttattcataaacacaaacacaaacataacagcagaaaaatatataaaacaagaaataacataattgaagcaaaacaagaacatgagaacaagtttcaaagattgattcaagaagaaaatttaagaccagaacctttaaacttctcttcaatggttctatcaatttcctctgccaatgactcactcaaagtatctctccatcctccaatctctccttttctaaagaaagttttagtctctattccatttggcaatttcccttctttgttaacttccaaattacttaaactctcaaagctacacaacttcacaatctctctcacttcttcttcttcaataaagccacattccaagaactccgcgatccgcttcatctcaacttcggtctgcttctttagctcctcg

SEQ ID NO: 132905 - DNA, 506 bp, Arabidopsis thaliana
  unsure (1)..(506): unsure at all n locations
nnnnnnnnnnnnnnnnnnnnnnnnnnnnnnnnnnnnnnnnnnnnnnnnnnnnnnnnnnnnnnnnnnnnnnnnnnctttttttttttttttcgtataagccatgtaacaatggaaaaggattgtaccaatacaaatgttaatctcgtataagctacatccaacaactacatatataattctacatttcgtatacattatcattttccgctgtttggtttttacagtttttttcctctcaccaaaaatagacctaaacaaatctaccaaccttttaaaccgttatagattcgaagaaagatccttgaagtaaagcttgagtgtctcgtaggtcatgaagcaaatccctacaccaggtaccactttgtagtactctggaagaattcctctgtacaggcctctcgctccttccgtttgaacaatacgctttaatgtgcctaacaaacctgtcttgtacactaccgctcgcccgcctattccttccagctgcttccttcttctcaccagat

SEQ ID NO: 132906 - DNA, 628 bp, Arabidopsis thaliana
  unsure (1)..(628): unsure at all n locations
tnnnnnnnnnnnnnnnnnnnnnnnnnnnnnnnnnnnnnnnnnnnnnnnnnnnnnnnnnnnnnnnnnnnnnnnnnnnncttttttttttttttttttttaggattgaattgtatatatatattgatagtaattatttttcaatacaacaaaattacatcgtcggttattatgttcttttggttgcaagatttctctgacgtgtaaggcctgccattctcattgttcctccacctcctccatttttgtcagatcttttacggctacgccaaagaagccgaattggagtcccagcaaagcctgcatcagtgcgtagtgtttctccatataccttctgtacgtatccgaaaacagctttgcgtcgtttacaaagaaaacaaacgtcggtggccttattgctgcctgggtgcaatagtaaacgcgacctcgcttgcctccacgggtccttggaggggatttaaatgcaactgcttccccttatcacttgggtcaatatagccggactaagtcctccttgatcccccctttgaaccgagcagcagaaccncaaaattgcaacgcatggccagtaattnnggtganaanaaagggccattngggangggttnccgaaangccccaatnggagntt

SEQ ID NO: 132907 - DNA, 783 bp, Arabidopsis thaliana
ggcaccccccccgaggtcgacggtatcgataagcttgatatcgaattcgcggccgccaagatttggtgttttaactatcagatccattatgagcatacgcctctgccaatgaaatccgagtcttctagaagagatggtgttacggacttcgcggtcgatgctatatatatatgtaaaaagcttaatatggactggacacagaaattccataacaacttttttcgttttttttttttcactggaagattaattttcattgatgagtactaggtgaaatacaaggagtcgacgatcaatacatgatcccgaaaactaacccgaaggataacaagatatcctaggaaactaagtccaagaaaatggggagcaaataacaacactacaaaagaaacaagtcaaaacactgacggctaagaaagcaaacatcagagggaattaaaactcataactcagaatctagcaccaaacatcttgcaaattatcaatccaaaaacgagaaacgcttgaattagtggctagccaatggagacgagaaaatccacgacaccggatagcgactcttcctataccaaatgaagactacctcacaaataaagagaaccaaagcatccataccagcaagaatgggagacgactagaaatcccacacaactttctggaaacggcgaaatcgaagcaaaccaaaccaagattggttcacgcctagtaagacaccaatgcaaaaggagagacctcgatcaaagtctaaacccgtagaagacaaggaccggagccccattacaa

SEQ ID NO: 132908 - DNA, 507 bp, Arabidopsis thaliana
  unsure (1)..(507): unsure at all n locations
nnnnnnnnnnnnnnnnnnnnnnnnnnnnnnnnnnnnnnnnnnnnnnnnnnnnnnnnnnnnnnnnnnnnnnnnnnnnnnnnnnnnnnnnnnnnnnnnnnaattataacccgttcattacatttcgttaaccaacagacccaagacaattcatacaacaaaaactattctcttctttggtttttgtttgagagaaaaaaaatcaaacccccagggaatacccaaacctggtaacccacaaaccaagaatatgtaagaaaaccaacgaatatcaaaagatgatctttaattccaatcaaagaaaaaaaagaagaatatttgttgtcttttgggttctctcttcaagggctatgaagatgctctatcactcgccttttctccttcggtagtcgccgaagacatgtagctcacggccagagacgtgctctcatcggtacaatgcgtctgaggaggaggaggaaccaaagcagccggagcttgaaaatgttgcttgcaattgtggcaagttat

SEQ ID NO: 132909 - DNA, 872 bp, Arabidopsis thaliana
  unsure (1)..(872): unsure at all n locations
nnnnnnnnnnnnnnnnnnnnnnnnnnnnnnnnnnnnnnnnnnnnnnnnngggagggtctatatcattgtccaatttgctgantcatacaaatgctttcatatgattcattgaacaaaacacgcatttacttataaagcgcatttatatgttcacatgatttgtacaaaactcatgagactgcatcaagcagaaagtatttatttatctttacatgtcaaagctttgagaattaagcaatgacgaataccctaagttcacctctgtccccgcgagttatgcgcatggtatcatcaacataggtaacttcgaaatccccagttccagggtttgacaatggtctgaaactgtcgggaaccctcgggatatcaaacggaggaatctgcgacaagttgcccgatttcttcacagttgtttcctcaaatgttatcttgatcttgcaagtgcctaaaaattcaaacttgtgtgccaatgtcgcagtggcttctaatggcggaaatggccaaggggcncctaattccacctctgctatnttntcaaaatctttgctaaacacatcaanccgttaaaacacctgncccaaaataacngggatcaaacgtccagtaggtaaaccaanaaggctacccctaaaaaccgaaaaaaaaacgccctnctatacaacagcctccatttcccttgaagcttatcaaaatcatcggttaaatcaaccggtcccccnncaatttcattttctttacaccacttcngctctttctaaatcacaacnnccccacaantctctntttatcccaaacacccnanttatttganttgaataagcattnctttccncccccccgatcaaaaaaaaagtgggggtccttcnccccat

SEQ ID NO: 132910 - DNA, 534 bp, Arabidopsis thaliana
tttaggacgacactatagaagatctatgacgtcgcatgcacgcgtacgtaagcttggatcctctagagctgtcgccctttttttttttcttttttgataaaattataacttgacaatccaaacaacacgtaaggatcgcagaggttttcttataatgatcgaaattatacacatacctgccacatacataatacattaccacatattggcgttcaatttattaatgagtagctgctagctgacttattccacaaaaggaaacgacgactatactttcaaaacacaatgtaacgtagattacaagtttcaaacacaatgtatcgtggaatacaaaattacgatcatatcatatattttgtatttggccacgttacttaaagccaatcatttttctagattaaccattgtaatcagaagtgggtgtgtcagtattcagaataaaagcgcccaatgcccaatctagaggaatgttatcttttcctgctttactcgcatacttgattctttcatcatcaagagcaacaccaagactat

SEQ ID NO: 132911 - DNA, 520 bp, Arabidopsis thaliana
  unsure (1)..(520): unsure at all n locations
tttaggacgnnnnnnnnnnnnnnnnngacgtcgcatgcacgcgtacgtaagcttggatcctctagagcggtcgccctttggttttttttttagatagattgatagatagatagattgatagatatatgatagatagatagatagaattaaacttaaggtgagtatatcacctaaaatgaaaatgagaaaatgagaaaacatctttagcaaagcaatctcctacaccagaaattaattccaaccattcatgagcatccatgtatcatccatgggttcataacattttgtaaaatcataaccccatgtcaacactgcttgctccggaacataaacggacgttgtaccgtgcagattcagattcatcacctcggcaacaatattctcacatctggtactatcaatttccgagtttgcagttatagaatcaacttctctgttcataagggcattgttgttgattgtgatagaccttatgtaattttcaagggcattgttgcgaggggaaaaagcatcacttctc

SEQ ID NO: 132912 - DNA, 406 bp, Arabidopsis thaliana
aaatatggaagctgctaaatgtctttgttcttgatatgtcatgaagacaagatttttgatttcccgattggtgagtacaaaaacacaccgatcgaggattaaaattaaaggttacataaaaccaaatgatggcaagatggtttacatgaagatctgttgaatcatcatctctaaccagctttcattgctttgggagaagtaaaagtggaatcatcttctcctggcagctggttgcacttgtgcccctcctgcctgtccacccgcgggttcttcagccatgtttgatgcttgtgtaacggcattcatcactacgagtcccagcggtatcaaatacatccaatatttcgcccaaaatgatcatctctggtggtggttcaacttctccctctacattctcactgcctag

SEQ ID NO: 132913 - DNA, 523 bp, Arabidopsis thaliana
  unsure (1)..(523): unsure at all n locations
ttaggacgnnnnnnnnnnnnnnnnnnnnnnnnnnnnnnnnnnnnnnnnnnnnnnnnnnnnnnnnnnnnnnnnnnctttttttttttttttttttttttatcgaaactatacgattgtgacttcttattgaaactttgtttgaaaagtatcacatctcacaatttcatgtaacttcgacacgtatagtttggccatgtgttagtgttacactactcttttctttcaaacaacatgacaacatacattattttattttcgataatgagattaaaatataaatacgagtctatctcaccttacataattaaacaagaaactttaacacaattataccccccaaatgaacctgcatttacaattaacattatacacatatgcatatgactactctatattgaatcacacaagcaaatggtaacagcaatgctagaccattcatgcaggagcaggactaactagtagtagagaatgttctacttctttttgtttattaaaagttggagatttcgggagaaatatttct

SEQ ID NO: 132914 - DNA, 792 bp, Arabidopsis thaliana
acccttggcgggctatgacgtcagcatgcacgcgtacgtaagcttggatcctctagagcggccgccctttttttttttttttttagaataaaacgcgagagtaataatcaagaagcgtcacattaagagtacaagagcttaaccagaaaagaagaaaaataaacaaggcagagtctagtaagactaggactaaccaaacaaatggtttttcattaaatcagaagtcgagcttaaccggatatcggtcgatgcagtgttcccacggactactaaccgaaggcttgacattgtttagagccacccaaactgcactgttacacttaaacccacttccaaaagcaatctgccaaacccggtttcctttcttcatcctacctttagcctctatgtaagccagttcataccaaatcgagctcgaagaagtgtttccaaatctgtgcagtgtcattctggatgcctcgacatgagtctgcgaaagctgcagattcttctcaagctcatcaatcacagctctaccaccagcatggatacagaaatgatcaaacgcaagcttgaaatccggaatatacggcttcagcttcgagttaaacagtttcttcgtaaccaaagtcatgaaaaacagaatctgctcacttataggaagaaccaaaggacctaaagtagtgatattcgccttaagagcttccccagctatagccataagatctttcgacaacgaaaccccggtctttttccaattaattaacgggacccccttggggtatgaccccggggaaatttcccgggacccgg

SEQ ID NO: 132915 - DNA, 846 bp, Arabidopsis thaliana
  unsure (1)..(846): unsure at all n locations
nnnnnnnnnnnnnnnnnnnnnnnnnnnnnnnnnnnnnnnnnnnnnnnnnnnnnnnnnnnnnnnnnnnnnnnnnnnnnnnnnnnnnnnnnnnnnnnnnnnnnnnnnnnnnnnnnnnnnnnnnnnnnaaggaaaaagtttaattttatttaatgacattaataaacccaaagttgagtgtgagagtagcaaaggacataattagttcaagcagaagcagccaaaagtccattgtgtctgatcagaggctctggggaaggttctcgtcctctgaactccacagacacttttagaggagcttttcctgctcccagagcaagtatagcgtttctgaatctctgtcctgtttctttgacagccttaatgtcatccaacccagcatcttcaaaagctgaaaacgcatctgcagacaaaacctccgcccacttgtaactgtagtatccagctgcataaccacctgcaaatatatgactgaagctacagaggaatttatcttcaggaagtggagggatcacttgtgtgtttatggacaccctttgatcaacttcggagatggtctctgcccacctggcatggattttgtgtgcagcgtcagatcaactgagcaacttcaactggggaagactaagggaccctgcccggattgtttttgcaaccggtagcttctagaatacattgtcgggaagagttcttcctgttagataatgcctagcaatgctattaaaggtttcctgggggagaacagttttcgtaaactggaacgggaattaactgattccactgatttccggatccagccctagcccctattctctttggtagactatctgagagcatggcaattatgga

SEQ ID NO: 132916 - DNA, 529 bp, Arabidopsis thaliana
  unsure (1)..(529): unsure at all n locations
nnnnnnnnnnnnnnnnnnnnnnnnnnnnnnnnnnnnnnnnnnnnnnnnnnnnnnnnnnnnnnnnnnnnnnnnnnnnnnnnnnnnnnnnnnnnnnnnnnnnnnagaaaaaagttcattttattatccaatccaagatcatattggaatctttttttttgtatacatcattacagcttatgaacaagagggggttttctttttctttctctcatcttgggagttatatacagagccacaattttcatctctttttctccaaaattttctagttgttttttgtttctttcgaatcctaattgtaaaagattcgcttcttcctatctctcaaaagaaaatctgagtgcttataatcttcaataagactgcataacagaacatgcaactgcttgtgcccaatgtctcaacctctgcttcatttgttgaggatcgtcccctgggcataagattttaacagaatctgaatcagttttctttggactacaaggtatactgtatgagaaagttgacgcagatgcactgctgctacggg

SEQ ID NO: 132917 - DNA, 767 bp, Arabidopsis thaliana
gaaataccgccccaggggtggtttttttccacccaggtcacctcggacggttggttaaacaaaaatcggggcccaagtgaattttgaattgtagggggacccccataaaaaaaggctaggcgttcgcaagcaggcgtccgtaagctggggtcctctagagcggccgcccttttttttttttttgtaaaaaaaaaaaccctccaatatttaaatcctcatgttctgtagcaaaacttaaaaaaggattactaatctttcaccaccaaaccggttcgaactcgaatcatcatcattacagattattcggcgcccttgttgctgttgttattgctaggcacaagctcgaactcacctccttcctcttcttaattctcctcttcctcatcttcatcgccgtactcttcatctgcaccttcttcatcatcaaagttctgctccgacggctgagattgctgatcaggctgagccgctgcgggagtagttgtcgcagtcgttacagccggaggccattgctgctctggttggaccatcaagggaacagaattatccggtttaacaagaccggaagatgaacaagaagctgcaatgttgttgttgctgtggaatttgttcctctctccatataaagcatcaagctggtgaaagtaagggcaagtcttggaatcttcgggacgtttcttgttgctctctttgactttcttgaagtatctgtttatgttttcccatgtccggacgcgtgggtcgacccgggaagtccggtccggaac

SEQ ID NO: 132918 - DNA, 528 bp, Arabidopsis thaliana
  unsure (1)..(528): unsure at all n locations
tttaggacgcactatangagatctatgacgtcgcatgcacgcgtacgtaagcttggatcctctagagcggccgccctttttttttttttttacaattacattttcttttatttttatttgcttatgaaaaccccacattgtccccctatcttaacattttttatttatatatcccaaggaaaaaataattaaatcacagtttattttaattttgttttaacatattaaatctctcttcagtataacttaaaaatcaaagatgaaaaaaaaacaaaaagaaaaaaccctccaatatttaaattctcatgttctgtatcaaaacttaaaaaaagattactaatctttcaccaccaaaccggttcgaactcgaatcatcatcattacagattattcgtcgctcttgttgttgttgttattgctaggcacaaagctgccaaactcgacctgccttccgctatgcttcattctcctcttcctcatcttcatcgacgtactcttcatctgtacctttttcatcatcaaagttct

SEQ ID NO: 132919 - DNA, 861 bp, Arabidopsis thaliana
gattgatttaggacgcactatagaagagctatcacgtcgcatgcacgcgtacgtaagcttggatcctatagagcggccgaccttttcttttttttttgtgttgaatttattatttgatgttgattactcttttattcgatgttggatttacaacttgagatacgttgcaggaatacaagcattcattttgattagttataaataatatatataggtgatctaaatgataacatagctcttgccaaagtttacttaaatgatccggacattgtgctagagagctgggacactgagcgatcccacgtcaagaactctgtgcaatatctcaccaaccctagcattgattttcaatggaacaatgtcatcagctcttgtttcgcctatatttacaattgcggtcatagcaccagcctcatgagccgctctgcaaaggcgaaaagcgaacattgtcattaaggatgaacccaacacgatgaatgcatcgctctgttttgcaacttccattgcttgagtagctatttccttcgggatgttgtctccaaagaaaattacattaggctttacgactcctttgcactactaacatactggtatattaaaacccttttaccaaaaatttttcttaatatatatttcaccatcatggcttttgtttaatgcccaaagttatactcttgatccctggaatttcccttttacaaaaaacttattctattggcttttcggcccccaccttgtggggatatagaatttggccttttataaatcttggaatcgcttggataaaacaaatttatttcggggggaaaaaaaataataaaaaaccctcttaatcttcttataaaaccacacatataaaac

SEQ ID NO: 132920 - DNA, 878 bp, Arabidopsis thaliana
  unsure (1)..(878): unsure at all n locations
gtcntttgtcaaggacggtataactttaccttgtaatagcaagcaagggccagctatattagtttgcctttcnttgcataatcatgttgacaagattttcgatgtcncctatatgttgcaggtatctctctaagcctggaacagtggaacgatcttcggaaccatgaggaggatatcgataaggccctctctgagctttctgaggtttaaaagcttgtgtaatcgggtattggaaggtggctttggttgttttggtttgtttttcagaacaacaccatgttctgcaagtgttagctgcttcgagttagttcatgtgttgaatctattatttgatgttgattactcttttatttgatgttggatttacaacttgagatacgttgcaggaatacaagcattcattttgattagttataaataatatatataggtgatctaaatgataacatagctcttgccaaagtttacttaaatgatccggacattgtgctagagagctgggacactgagcgatcccacgtcaagaactctgtgcaatatctcaccaaccctagcattgattttcaatggaacaatgtcatcagctcttgtttcgcctatatttacaattgcggtcatagcaccagcctcatgagccgctctgcaaaggcgaaaagcagacattgtcattaaggatganccaacacgaggatgcatcgctctggtttgcaacttccatggctgagtagcccttcctcnggatgttgcnccaagaaaatacacagggttaggccccttgnactccccaacnggaaatggaanccctccnaactttcgcatccggatncacaggcttgtcagcaagctccggccgggccnnggaaattcnaagtcgccnt

SEQ ID NO: 132921 - DNA, 697 bp, Arabidopsis thaliana
  unsure (1)..(697): unsure at all n locations
tttaggacgnnnnnnnnnnnnnnnnnnnnnnnnnnnnnnnnnnnnnnnnnnnnnnnnnnnnnnnnnnnnnnnnnnctttttttttttttttttctgaaactggaataaagcatagaaacgtttcaagtgtttacaaatactactgtatatgacttttggagcattgctcaagaaaaatcacatacagatgcatgtaaataagaaataagagtttcattttcttattctgaacaataatcataagtaatgtggctgtgctctgtacagctaacaacccggaagagaatgcttacttgagatgttcaacgtcctgcaaaaatcaaacttccccaggaagcatagtatctaccggaccaagatcacagtaggcaatgccctctccagtgaggtgtgcaacacatctcttctcagccaacagttccgcttccgacttggcgattcgttggcgaaggtagtcatcaatttctacatccttgacaagttcataatctccatctcccttcgaccggcatggcatactgaagacaaggcctcttcaataccataaggatttccatccggggacaccccaggcggaaaccaatcaccctcaggggtgggggttacaagagctttttggtcacaatgggccgcagtgagccnngaggtggccnttttggataaaacccncctttntggaannccaggggccccnnna

SEQ ID NO: 132922 - DNA, 802 bp, Arabidopsis thaliana
ttaggacgcactatagaagagtctatgacgtcgcatgcacgcgtacgtaagcttggatcctctagagcgtccgcccttttttttttttttttttttttttttttttttttttttttttttggggaggatttggatcaccctcttctttgctcttctttttcatcagaaaaccattgtctactaataatagtaataataagcaccgtcacaaattcaccatcattgtttgatgataatctattttacatggtagaagaattgcagacacccataaataaaagactcagtatatgttttctttattcccattcgatggttgaaggaggctttgatgtaatgtctagaaccacacggtttactccttgaacgctgttacagattttccgggaaacatcgtccagaaacttgtgctcaaaattgaaccaatctgcggtcattccatcttggcttgtaactgcacgaagagcaacaacatgagaattgttctcttgtcaccttggactccaactgatcttacaggcaagaacactgcgaaagcttgccagatcgaatcatagagacccgcatctctgattgattggatgaatatctcatcaacctgacgaagaacctcgagggcgtttccttgggtgacatctcccaagactctaactgcaagtcctggaccagggaatgggtgacgcttcaagaaccctacaggaacgttcaagattcttccaagctcacgaacctcatctttgaagagaagcttgagtggttcgatgagcttaatttcatgtctttagggagtcctccgacgtta

SEQ ID NO: 132923 - DNA, 505 bp, Arabidopsis thaliana
  unsure (1)..(505): unsure at all n locations
nnnnnnnnnnnnnnnnnnnnnnnnnnnnnnnnnnnnnnnnnnnnnnnnnnnnnnnnnnnnnnnnnnnnnnnnnnnnnnnnnnnnnnnnnnnnnnnnnnnnnnnnnnnnnctctgagttatcgaatattctatatatgtaaatggccagtttgacaattacctaaaatcatatgatagacataaataattctacaaatttttaaaataaatttaaactaaaggacaataaaattaccattatgttcacatttagtaaatatttcatggacgaatttctccacgtcgattttcgaaatctcataattttccggcgccggaatatacgggggtcgtgataccttaggcaccaaatcccaatccaaccctttaaagaaatcatgtccctggattccttcaacattaatcctacggctaggatctttctccaacagttttcttaccaagtctcttaacgatgtcgtttctccgaccaaactcggcggttcagttaatatctttaaaaaag

SEQ ID NO: 132924 - DNA, 522 bp, Arabidopsis thaliana
  unsure (1)..(522): unsure at all n locations
nnnnnnnnnnnnnnnnnnnnnnnnnnnnnnnnnnnnnnnnnnnnnnnnnnnnnnnnnnnnnnnnnnnnnnnnnnnnccacgcgtccgggttgccggtttgaaccatcgaggctcgcgaaaccgggtatggtgaaaaccatgttcttccgctggatccgtctcgagatgttatcggctttgatagcaaagacacctcttctcgagatcttgaacatcaaaaactgttgggagattggtcttgatgcgataaccggatataacgaccggttaatgaagttggttttcaagtattgttccttctccgcgcagcaaaccacactggacgtgcccaatattcagatcttcaagtactttgggaaagtctatcgctttgagttcgcgagtgcgaacaagttaatggaggaggcatatctggactaccgtgaagagagccgttacaacgtgagtgcaggagcaataatcagtggatttctctacagtatgttgtctgctaagacattcacaatctgtccgtatgtcctt

SEQ ID NO: 132925 - DNA, 514 bp, Arabidopsis thaliana
cccagatctgtttatctcgttgattactcttgttatcttcctccggagagtcttcaggttaagtatcagaagtttatggatcattctaagttgattgaagatttcaatgagtcatctttagagtttcagaggaagattcttgaacgttctggtttaggagaagagacttatctccctgaagctttacattgtatccctccgaggcctacgatgatggcggctcgtgaggaatctgagcaggtaatgtttgggtgctcttgataagcttttcgagaataccaagattaaccctagggatattggtgtgttggttgtgaattgtagcttgtttaatcctacaccttcgttgtcagctatgattgttaacaagtataagcttagagggaatgttaagagttttaaccttggtggaatggggtgtagtgctggtgttatctctatcgatttagctaaagatatgttgcaagttcataggaatacttatgctgttgtggttagtactgagaacattact

SEQ ID NO: 132926 - DNA, 750 bp, Arabidopsis thaliana
acactatagaagagttatgacgtcacatgcacgcgtacgtaagcttggatcctctagagcttccgcccttttttttttcttttttatgactaaaccaaaatttgccaaataagcagctatttctagttataacatcacgagtcaccagtcgatacattaaatttaaagttgcaactagaaatatattgaaaaacagaagcagtcacgagcgaaatctctcatgcttccaccttctgagatttgttccagcgaccacccggtgaatctgatcccctctttctcccgaatctccctcctcttcttcctccccttcctccacggccacccttgtcaaaccgatctttgcttcgtaggagagtccaatactccttttcagcttcgccaataacaggttctaggacagcaataaaattcttcacggctagtccaccttcattggctaatactgctgctgcacgggctttctgggatgcttcaggttcatcaaacctaagataacccgtctcagatcccatcttgaaatcaacaaacttgacatcaccaaattttccgaaaacagccttaagatcttcacgtaagacaacatccttattatctttatgggtggctagagcacccttttcttctttctcatcatcttcatcctctgctccctcggcctgaacctcaccagtgttttctttatcagcatcaggagtatctgctggctttgtttcactttcttccattgtcttatcagttggatcctca

SEQ ID NO: 132927 - DNA, 620 bp, Arabidopsis thaliana
gtttatgagcaccatatcgaattcgcggccgcaaataattaaggaaagagatgtgtgcatttgatggcacataaagctaaacaaaacaataccaggtatgacgaaaccaaaatttgccaaataagcagctattgtctagttataacatcataacatcaccagtcaccagtcgatacattaaatttaaagttgcaactagaaatatattgaaaaacagaagcagtcacgagcgaaatcgctcatgctaccaccttctgagatttgatccagcgaccacccggtgaatctgaacccctctttctaccgaatctccctgctcttcttcctccccttcctccacgggcacccttgtcaaaccgatctttgcttcgtaggagagtccaatactccttgtcagcttcgccaataacaggttctaggacagcaataaaattcttcacggctagtccaccttcattggctaatactgctgctgcacgggctttctgggatgcttcaggttaatcaaacctaagataacccggctcaaatcccatcttgaaatcaacaaactcgacatcatcaaatgttccgaaaacagccttaagaacttcacgtaagacaacatccgttattaattt

SEQ ID NO: 132928 - DNA, 678 bp, Arabidopsis thaliana
  unsure (1)..(678): unsure at all n locations
gacnnnnnnnnnnnnnnnnnnnnnnnnnnnnnnnnnnnnaagaaaaatgattatattcttacaagttatacttttttttttacaaaattcgtttttaattgtataatttttttgtcagagaaatatatatttattttctaaaatcactcttttgcagttttatttcacttattcaacaactcatcacggcgcaattatacacgaaattaaccgactgtttcttgcctagtaaatgccattccggtgttgtaacacttggtacccatgagttaagctcaatgaatccttcacctggagcctttggtccaccaatcactataatccgatccccacaagctctaaaagctaaaccccaaccggtcatcgaacccgcttgctcaggcaagttcccaactttattccaaacacgtttctccttatcataccttctaaccgccataccagcgtgatcagctgcataaagcgggtcattcacaaccgctacaggcggtggagccatcgcagctgcagacattccgttcccctggttagaccgcggtggtgacatctcagggatctctgtccatttcctagtcttcaatcaaactctccccacaagtaaaacctttggctattctcttcncaacaccaatcccaccaatgacataaaacttcccatccataaacacaccggaacac

SEQ ID NO: 132929 - DNA, 650 bp, Arabidopsis thaliana
cactatagaagagtcttgacgtcgcatgcacgcgtacgtaagcttggatcctctagagcggccgccctttttttttttttttttttttttttttttttttttttttttttttttctgggaagaggaaaaatattcaaaatccctttaagggggctatacacttctggatattaacatacaagagggcttagcctatctttattttttacatagtttttttaacttgcttacgtcggtttataggtataccgatcttagttttatttaaaaccaaaaacaaaatctctacttagctactaaatataatattttggggcgggactagtttggctttcttgctgggttatggctcattgatgtagctttggctttgtactcagtttttcatggccatctttgcacttccctgggaggaagaagaagaccaagatgaagatgaagatgaagatgaacttgaagaagccgccgtctcaacgaattgggttgtgacttgttcccacttggggattggctgcttaagctctgtctgttgggttgatgtcactggcttgccactcacgattggactggttgatgtcttggagttccttgagactctcattcacttcttgtgggcagaagcctgggagggttgggctctggggttgggt

SEQ ID NO: 132930 - DNA, 576 bp, Arabidopsis thaliana
actatagaagagttatgacgtcgcctgcacgcgtacgtaagcttggatcctctagagcggccgccctttttttttttttttttttttttttttttttttttttttttttttttgaggaacaaaaacctatcggagaaccaaagcactgaatcatttgccagagttggatattgggataatgcgggaaaagctaaatgacactaaccacaaacaagtgtggtatgatggaatactaatgaaagtggggtctttggccgagtctttaatcaagagttgcttttgctactccatatacaattacagaagcttttctaatcgatttaaaccttatcactattgaccttgtttcttgaagctaaaatttacatcttcattcatcgatttctcaaatgttttggctttatcttcgctaaacccgaaactttccaaaatctgggggggctggtggatccttttgagaccaaacacccaaaagccagtaggccgtggctaattccccatccacaataaatatatttcttttattctaggcccaggcattgggcttttgagccggcttagatagagagagatgct

SEQ ID NO: 132931 - DNA, 653 bp, Arabidopsis thaliana
  unsure (1)..(653): unsure at all n locations
nnnnnnnnnnnnnnnnnnnnnnnnnnnnnnnnnnnnnnnnnnnnnnnnnnnnnnnnnnnnnnnnnnnnnnnnnnnnnnnnnnnnnnnnnnnnnnnnnnnnaaatttgaaatttgtattgaaatttggaaattatctctggcaaatgtctagagacattgcagacgccttacacttgtaacattacgtttttgaaaaggaaaacttctttagaaaaatactcttaccattcgttaaacatacgcaccattgcataaacaatgatccattaataatttcatctctctttatgatttcattatcattaacagcgacggcctcgccgacaactcaaagtgcctgctgtcgtggtgatggaacccacaagtgacgatggcctcgcactcaggcttgaagctcttgcataagtagacggagcttcagcaccggactcgcggaaataagctccgttcaacaacatatcgccttccgatctccaattccaatctctccatttgctttcgggtgcatcttcatgttttggatcctctttattaaagcgggtgttaggagcaagaaatctattcccttggctgtatatnagttggagaagcacttacaccgattgcatacatttcccagtgagtataatcattgttcactacatggaaatatc

SEQ ID NO: 132932 - DNA, 477 bp, Arabidopsis thaliana
  unsure (1)..(477): unsure at all n locations
nnnnnnnnnnnnnnnnnnnnnnnnnnnnnnnnnnnnnnnnnnnnnnnnnnnnnnnnnnnnnnnnnnnnnnnnnnnnnnnnnnnnnnnnnnnnnnnnnnnnnnnnnnnnnnnnnnnnnnnngggagagcaaaatgactcgtttaaatcacagtcaaattacatatacagctgcataaatattgcaccgtccaaaaaaaaaaaaaaggtacgcattcgtcactatttttctttttcttgttttcttctataaatatgaaggagacgagagatgagtatagataatggggtcatttattagccttgatgatgatcacaaggaagtatacaaagctcttatgccaaagctctcgggaacacctctgatgaagcttctttccgtgacaaagaatctgatgtagtttatctggtttattcctctgttgatctatgacacattcttcacctacatattcttacaaaccatatatngccgatcag

SEQ ID NO: 132933 - DNA, 643 bp, Arabidopsis thaliana
  unsure (1)..(643): unsure at all n locations
nnnnnnnnnnnnnnnnnnnnnnnnnnnnnnnnnnnnnnnnnnnnnnnnnnnnnnnnnnnnnnnnnnnnnnnnnnnncttttttttttttttttttttatgcaatttgctcttttattaaatcgaaagaaatgcaaatagtgaaggagacggataaaaaaaggtttgagagtagtaaagatcctcaagaacaaaggatatacataaaagtcttgttagcttaaatagatttgtggcaatgcgacattattctcctctcccaatatgttgttggtcgactcattcaagaaggcgcttgtacttgcaccacccgatggcaccaacgtagaggcatatactgccgatagaacctccaatcacagtccaaatgaatctacttggaccatgtttattatccgtgaacaactctatggttatattcataccaaatacaccagcaactgcgataaaggcgctcatcaccagagtagctgttgttagcatcacacccatctgcagaagatgattctgcttgtcatctagcattatggtgatgtaggcctccatgtcatgcccatattgccttagtggtgatagttggtggcggtgccatcgagctgggcgaatttgcttgcaaaagcttgggggcgtgggcgtgggattggg

SEQ ID NO: 132934 - DNA, 736 bp, Arabidopsis thaliana
  unsure (1)..(736): unsure at all n locations
nngaatttnnnnnnnnnnnnnnnnnnnnnnnnnnnnnnnnnnnnnnnnnnnnnnnnnnnnnnnnnnnnnnnnnnnnnnnnnncctttttttttttttttctgttaataatttattgcacctatcaattcaaatatagtcaaagttctcttcttctgacaaaatcaatcataattgtacatcaaaaccaaattgctcatacaaaaacagaacatgccaatcatacatacattacctatatgctaatcaacgagtgatgtattgaatctcggctcggtcttttaaccattcaagcacttttgctccttctaaaatctcttgtacctgatctttcacacgctcctcgtcgaactcttgtttatgtttcttgaattctgagatcgagttttcgacctctttaactagttcatctgttgagaactctaagttttcgcgcttgaagatatctccaacagctatattctgcttgattatgttggtgatgctctctctttgagtttctagaaactcatttactgctttttgacttgaaagagaagccaactggtcttcgttaagcttcatgtttccctgaatctctagaagcctagctccataaaactgtcttccttgttcctcaaataaagattgaggaatctctacttcaaccatctttcgaatctgctcaagaatggcgttgtctgtcgcttgctccttggcttcctgctccatctcttgacatcttttagccagagtttc

SEQ ID NO: 132935 - DNA, 736 bp, Arabidopsis thaliana
  unsure (1)..(736): unsure at all n locations
nnnnnnnnnnnnnnnnnnnnnnnnnnnnnnnnnnnnnnnnnnnnnnnnnnnnnnnnnnnnnnnnnnnnnnnnnnnnnnnnnnnnnnnnnnnnnnnnnnnnnnnnngggagaagaaaggatttactatttcaaaataaacatattttctcatgaattacatcattacaagaaatctcaacaaaagaggatgaaaatgttaaagcgaagatgagttttcacttccagagttcttccatggggattccacgctcttgtgcaacatcgcggaactgtctcatctgttgtactgctgcaagagtggctctcgcattgttgagagcattgttgcttccaagctgtttccccaatgcattctcgactcctgccatctctagcacaatcctaaccgctcctccagcaatcacaccagtacctggtgaagcaggtctaagcatcaccttggctgctccataatcaccctctgatctgtgagggaaagtagaatacttagtcataggaacttgaacaatgtttctcctagcatcaatagcagatttctgaacagcagcaacaacttctttagcctttagcacaaccaacaccaacattcccttggttatcgccaacaacaacgattggtcttaacttcaattgcttccctcctttaacaaccnaaggcnanctcctaagttggaaantctctntcaanccactntatnttttttctttggttcccccataccgactttctttgttg

SEQ ID NO: 132936 - DNA, 662 bp, Arabidopsis thaliana
tagaagagtcttgacgtcgcatgcacgcgtacgtaagcttggatcctctagagcggccgccctttttttttttttttcaaaatcaaaacaactttaaactttttaaagaaaccaaaaacatagattccagatatacaaacgatataaagtcagctagtactataacatgtgaatgggacacttctatacataatctctctctatcgagaacagagaccaagaatctcgagagaatccactttggtcatacatgagaacgcttaacttagacagaagcacctcactcgggatctctatataatgctacactgcctctctcatgagtctctacggaaatcttttattgctaaaccaacttcaagactctaagagagattacatcttcatgctgctcaacaatggctcaccagatgccagcctgtctataggactgcaaagggtagctgtgaaacggataagctctagccatatggaccggctttacggctgcaggtattgcccaacttaactctcttcttggaggtggggtgggagggtgcatattcctccttctgtccacttctatcagtgtgcacatctcctggattacctcttttaatagcttaagttgaaactccaaactccaaccaccaatctctcctgctgcctactttcgcattctg

SEQ ID NO: 132937 - DNA, 648 bp, Arabidopsis thaliana
  unsure (1)..(648): unsure at all n locations
nnnnnnnnnnnnnnnnnnnnnnnnnnnnnnnnnnnnnnnnnnnnnnnnnnnnnnnnnnnnnnnnnnnnnnnnnnnnnnnnnnnnnnnnnnnnnnnnnnnnnnnnnnnnnnnnnnngggaggccaatgaatcaaccatttagaattaaacatctaaggcctgaaataacaataatatttagcttttcaaacaaacaaaaaaactaatgaaaattcggaatagtttatctgacaatgccttcatttccagcaggaaccaagtccttatccctccttgggggattagggcattcaaatcccaaaaccctagcagggtctccctgtatgaaattcgcaacttcaaagcttgacttgcctcctgcacaaggcatctctttgggcaacttctttaaaatctcaagacaataaaccggcctagggttcatgaggaagaagatagggtctaaacacttgagcccgctcgcagttgtcccatagaacatgctcactcgagcatctacagccacgggaacaatgtcttcagttaactcagcgaacaaaggactgaaccttagtagataaggctctctacatgtggttccctccggacaaaccactagatctcctttggctaatagtctctgcattgcctnaccgctttcttcctatct

SEQ ID NO: 132938 - DNA, 861 bp, Arabidopsis thaliana
  unsure (1)..(861): unsure at all n locations
nnnnnnnnnnnnnnnnnnnnnnnnnnnnnnnnnnnnnnnnnnnnnnnnnnnnnnnnnnnnnnnnnnnnnnnnnnnnnnnnnnnnnnnnnnnnnnnnnnnnnnnnnnnnnnncggggctctcaaaacgaatattataagaaaaatggaaacagacaaaatatatgatagaatcgaaattacagctggctctctatgtttcttttggggcccaaccattaaaaatttaaaattggatttgtcccccattcagggaatgccacgtgtcctcttgcatctagtgcaccttaagagctctctcatatttcatcaatgggattctcactccactttctctcttctttttttttttttttaaacaaccaaagtattacttacttatcactacaaacgccaaaataccccacttatcttacaaccaacattacatataagaagataagacatatcacatcccaacaaattacattctgtatcctttacttactcctcttctagtatatactatcgaagattcctgtgacctgcagggcttggtgctctctgtgaacttatgctcgctgttcttagaagtctcctgaactcatgcaggcttattttcccatctctgtctatgtctgcttcatccagcagtggatctattgatcctcttaaccccgtgtgcattcgaagttcctcaggcgttatgtacccgtctttgtctaggtcgaatttctcaaaagctgctcttgaccttagctgccatttctctgaatcatgttcttctagttgatgaacatgtagagctgctgctacaaactctgtgaagtccactaacccatcagtgttgctatcaatcgcttcaaggatctcagcaactcgtga

SEQ ID NO: 132939 - DNA, 637 bp, Arabidopsis thaliana
  unsure (1)..(637): unsure at all n locations
ttatgacgtcgcatgcacgcgtacgtaagcttggatcctctagagcgggccggcctttttttttttttttttttttttgggtcaaaccttttaacaataccaaacctacacatatttttgttccttcgtccttgatgatatgagagattgctctcttatacttaccatgtgatacgaaatacaaagtaggaaccagagatgtgttagattcattcaataataaatcatccgagaccacaaattacgcgttacttgagaggcaatcattgtctcccaagtgtctctttcttttttcctcacaaacactatacagagactttttaattactgcgtgaagattacgaagagcataacgagatgcgttgtttggcgagtactcgttaagctttttcataagcttaggatcagagcatatatactcttccgttgactgtgtcagatgccgcaggggatgtagaggaagtaaaacgtagcgatgttgagagagtgggggagaagagtgtggagagtgcgacggcannnnnnnnnnnnnnnnnnnnnnnnnnnnnnnnnnnnnnnnnnnnnnnnnnnnnnnnnnnnnnnnnnnnnnnnnnnnnnnnnnnnnnnnnnnnnnnnnnnnnnnnnnnnnnnnnnnnnn

SEQ ID NO: 132940 - DNA, 645 bp, Arabidopsis thaliana
  unsure (1)..(645): unsure at all n locations
nnnnnnnnnnnnnnnnnnnnnnnnnnnnnnnnnnnnnnnnnnnnnnnnnnnnnnnnnnnnnnnnnnnnnnnnnnnnnnnnnnnnnnnnnnnnnnnnnnnnnnnnnngcaagggttattatatttcatccaacggaaaagatatattttacatcttgtttttgctctctttttgttacaaatagtttaaaaccaatataaggagaatacatagcttatttcgttactcattagggctctttcatcatagtaaccccataaatggttaaacagtgtagtgttgttgaatggtatcaatgtcaagccccttgagcttcactacagattcaacgtgaccctttagagtgtgaagctctctcagcctcgcaacttcggcacgccttttggcctgctctgctatttcagagagctcgttcttattgtcgttgaacattgcttctggaggtggtagaccatggagtgtacgttgagctagtgcccactgagcctccccctctccttttccattaatctttttagttgtgaacgcagttttctggttgatcatgttatcccaagccttgccagtgagagcggaaccggttgattaacttgagaatatcaagaggaatggtgggtatgatacctgtataccatataccctcagc

SEQ ID NO: 132941 - DNA, 829 bp, Arabidopsis thaliana
  unsure (1)..(829): unsure at all n locations
ttaggacgnnnnnnnnnnnnnnnnnnnnnnnnnnnnnnnnnnnnnnnnnnnnnnnnnnnnnnnnnnnnnnnnnnctttttttttttttttaattcagtactaatctatgtatatgcacttatgtttattattcgagtacaaactctgaaaatgttggcagtggagataaaaaaagaaaaaaatggagatcttttggctaacaccaccaataccatttgaacgaacaatcaaaagctcagaataaattaccacaagtgaaaagaaaaaaaaaaaaagactatcgttcttcaaaaagtgtgcttctccactcttcgcttttgctccaacaatctctcactctctcctctgacgttttgactctggaggtgatggtggttcaggtctccgagttgaattccctcgctctgtaccttcctcctcctctgcctctctcgaagaggcttgtctactattgctgcctctgcctgtagcagcttcacctgagcttgaggaggctacgttttgagatataaacggcatgatctgctgaagaacactcgatatgaaattcccttcatctgtcgtagttgctggctctacttgtgcatttgcaactgcttcgtttgtttctgtggacgctgtggcagagggatttgctgcaccctgagactccgtgctcccggcttggttttctcgacgagataagggcctcaaaaactgatggattctgtttctcaattcagacaaaccccgaccgccaggagaagcactgctatcaccttctcttcctggagtaccgacgctctgtggctgcctagaagattcagtaacaggctgatgtacaccatcc

SEQ ID NO: 132942 - DNA, 565 bp, Arabidopsis thaliana
  unsure (1)..(565): unsure at all n locations
nnnnnnnnnnnnnnnnnnnnnnnnnnnnnnnnnnnnnnnnnnnnnnnnnnnnnnnnnnnnnnnnnnnnnnnnnnnnnnnnnnnnnnnnnnnnnnnnnnntttttttgctaaggaaagagactcttgattactttttaagactaaactgagagagtatgtaaactctgaacttcttttgaatttgtctatcaccataatctataagcaatactacaaaactgaaaatacgcataaaccaaaaaaagatccttcatagggagttcttcttcttcaagcagatttcaacttgtttgatgctgatgcaagttgagatagtgttctgtgtcccacgaacaacagaaacactcccaacaaagaaagtgccttgagagtcgtgaatagatccaacttcaaccagaatagcacatatagaagcaaaacagctccaattccgcagtgggaaagtaaagcggatattgcagaaccagtcagcgatgggaagctctttatggtcattcccacaccggtgagcccaatgaggaagctcgtaatgggaggtacgatatccgccatcaaagcttgaggg

SEQ ID NO: 132943 - DNA, 800 bp, Arabidopsis thaliana
actatagacgagttatgacttcgcatgcacgcgtacgtaagcttggatcctctagagcggccgccctacacttttgtttttgcttcaaacattgcatttgcagagattgagcaaatcaaagttacaaacttacaacaatacaaatgtgtatgtaaaacaaacaaaaggaacaatctttaagcattccttggatcactttctctttttcttttatacaaatcattacataaacattaaccaaactacactgtataaatgtaaaatcatctgtccacttcttggctctctatgaggtatttgaatgatgcagagaggttgttggatccagtggttgcggcggttgtgacagagtcaaagcatggttcagctgttgctctagccttctggctcgccatcttcgtctccatctcacaaactcaaccatcactgaacttccgcatatgcatacaccaaatccagcaaatgttgacagaagaactgacagaactggttgcaacttcaccacagagtaaaatatatgggcgaagagaacgaccaacgcaaactggacagatgcgtaaatccagacaaatcttctcattaccatggttgatgcggtcatggatgccagatgaccatgaatacaagaaaacggcagtgatttagcgatgggacctgtacccatattctcaaccaggagctgctcgaggaagcagaagtaagcgagcttgctgatgattactagaaccggttcctcctggcacaccctttagccagagacatctagctgaggaacacccaaatttcgaaagcttcggacg

SEQ ID NO: 132944 - DNA, 506 bp, Arabidopsis thaliana
  unsure (1)..(506): unsure at all n locations
nnnnnnnnnnnnnnnnnnnnnnnnnnnnnnnnnnnnnnnnnnnnnnnnnnnnnnnnnnnnnnnnnnnnnnnnnnnctttttttttttttttgcaaaaactaaaaacgcttgagaatgttccaatctttgagattttttaaaggatccaaggaaatctgatgatgttattttgtttataagaagtgtacaaacaggcagctaaggttttgaagttcttagcttatgattctttctgaatctttcttcctttgcctcatcagctttgtccagaggtcgaagttgaaacttctgcactgcatacggggcaaaccttgtttatcttcaaccagttgtttatgcactccgagtggtaagaatgtttgcatgggagcagtatcaggtcttcgtcatcctcatagtctaaacgacatataacacatgactcattggttccgttctgattgtctccttctttatatctttttgaaggcaaagatgcaattgtatcagcagacaatcctctactt

SEQ ID NO: 132945 - DNA, 515 bp, Arabidopsis thaliana
tttaggacgcactatagaagagtcttgacgtcgcatgcacgcgtacgtaagcttggatcctctagagcggccgctttttttttttttttttttttttttttttctttagaacgttttggtgctagttttcttatggttcagacaaaacgaagtagcaaagctgctttatacaccgtgaaacacacacataaagaaagaaaaaggtcagagacaagacacttttgtaacagactcgagagtgtttgctactgcttagtggaggctgcgcatgataccgtgtatgtatcctccggtcataatgaaagacatgatcgacacaactccagcaggaaatatcttcttcgaacgcatgtatcgggttcccattacgtacattaacgcacccgccatcactacaccaacggttgatgcaagaacaggttttgttgggagctgactgaagacatacagcagaacagcagctgacagtccacctgcaagcaacgatttctggctaccgctcttcagataaccca

SEQ ID NO: 132946 - DNA, 697 bp, Arabidopsis thaliana
cactatacacgagctatgacgtcgcatgcacgcgtacgtgagcttggatcctctagagcggccgcccttttttttttttttttttttttttttggctcgaaatatctttttttctaatgctcgaaatatctttagtgaacagagaaaaacacagatgatctattctgatatgagaagagaagtctccaaactctactaagtaccaaaatcaaaacttgtactgacagacagacccagaaacagaaacacagtcatggaatcctctactggaaacttgttattaccagtgacctcttccttgtcctcttcctcgaccacctccacgtcttccccaacctcggtttccgcctctaccagctccataggatgatatcccctcaaaggccttgcttcacaagctgggttttgcaataggacccgacccacgtcccttcttttgtgcaacattggtacccacttccattgttgctattagcaggccgctttccttccattgtggtggaggtgaggcttaccggtttggggcttcttttccagaacaggtgagaatagtgtctcccaataaaggggggccttttggatgcaatgggttttgtcatcccccaaaatgttattaccaggggccttaaatccccagttggggggaatttcctggcctcttttgtgttttaaaataacctccgccttttccctcctt

SEQ ID NO: 132947 - DNA, 522 bp, Arabidopsis thaliana
  unsure (1)..(522): unsure at all n locations
nnnnnnnnnnnnnnnnnnnnnnnnnnnnnnnnnnnnnnnnnnnnnnnnnnnnnnnnnnnnnnnnnnnnnnnnnnnnnnnnnnnnnnnnnnnnnnnnnnnnnnnnnnnnnnnnggagcacaatttggaactgcagacactgatacacaaaccatcatacattgatacttcacaaaagtacatcttgatatgtcagatactatgagagttcttttggtaattcgcattgctactaccaatgtaactctacaatgctaaaaaagagaatgaaaaagaagaagaagaaaaaaagcatcgcgctataacttaagaaaacctaaagatcaataataataacatcttctccaaatcgtatgagctttagatccaaccattgctccttgcttcacatcagtaactcctccacaatctacaatcctacaacttcttacctgaagcagctcttcgtttcccaagtttagatttctcaagctccaattgcatctccatcaacatattcattcgttggaactcaagctcctttg

SEQ ID NO: 132948 - DNA, 447 bp, Arabidopsis thaliana
  unsure (1)..(447): unsure at all n locations
nnnnnnnnnnnnnnnnnnnnnnnnnnnnnnnnnnnnnnnnnnnnnnnnnnnnnnnnnnnnnnnnnnnnnnnnnnnnnnnnnnnnnttttttcttaacaactacaatattacaatcttattgagatatcagttcaaaggattattcaaagaacatgaacaagaaaatttaagggcctcttctacttccaggtcgctcgatcaggggattattcaaagaatatgaccaagataaaattaagaaaaacacaaaaaactaatattacatgtagaggttgttttagtcgtcacctctttttgttttgcctcctccggcttgctcgatttggaccaaacttggagcgtaattgagaataacttgcgaaattccttcaagtgaatctgtagcctctccctctccagaacctacttcatcgactttattatcctccccgagaatgtatatcttgt

SEQ ID NO: 132949 - DNA, 662 bp, Arabidopsis thaliana
agactactatgacgtcccatgcatcgcgtacgtaagcttggatcctctatagcggccgccctttttttttttttttttaaagtaaaaaagtttgattgttgttgttttggtttctttttctccatccccatcaaattgtaagcttcaaaagagtcaagttccaaaaaaatacatcttttctttaacatgttactttatgaaacagaccagcgaaccattttgatctcactatcagatcaaatttataagcagagaaagaacaaatataaagcttcctcacacaatttcactgcagctattagtttcttggttctagtcgagaattttttctccggttgcgaacaagttccagaccagagttccaattagatacagtgcaactgctactttgaacacatcatcccatgaacctcgttggaggatgtaaccagtagctgcagtgccaaagacaccagctaggactcctgctgtgtttgatagtcctaagagtacaccagcgtatcgtgggccaatgtcttgatgattagagtagagacccgactgagagaatgcatcagagccctgactgcatgccatgcagagaactgccattgctggagttttgacatggctcagctgactcaggaagaaggcagggcctagaaaacaattgattgcataat

SEQ ID NO: 132950 - DNA, 788 bp, Arabidopsis thaliana
  unsure (1)..(788): unsure at all n locations
cgattctannnnnnnnnnnnnnnnnnactatgacgccgcatgcacgcgtacgtaagcttggatcctctagagccgccgccctttgggtttttctttttttttttttttttttttttgcagggaataaaaaatattttaggtaaaaagctaataatgtagatatatctgagatgttttaaactaaataggggactacatagatctctctcctcacactcacttgatcagggaaacgtaagcttcatttacagagacagagtaagaagaggcccaaattattcttttaccttgggttgttccatgtatgctttatcagcttctgccacgcgattctggaacatcgtccattcgtttctgcatctctccctcaccccttgccatggagatttcccctcctccgactcaccctgacttccaagggaaggaatcacttgatggataatccactgtgaatctaccacaccaatcttctcatgagcaggctcaacgcatcgtctgagagcaaaatcgagaccccatccatgaacaagatcattctgaatcatatgccatacacannnncatgcttttttaaaaaatccagggccataatctaaacaacccagcaattggaggaaatggtggtcaccgcccctccctgtttttcctaatttcttgggaaatctggggccctctccttttggatttccaagaaggccgttttgggtttaaccgggtgaaaaattcaacctgcttttaactactaacgcccttttggtggaaggccaccccaatcctctccctttaat

SEQ ID NO: 132951 - DNA, 640 bp, Arabidopsis thaliana
  unsure (1)..(640): unsure at all n locations
ttaggacgannnnnnnnnnnnnnnnnnnnnnnnnnnnnnnnnnnnnnnnnnnnnnnnnnnnnnnnnnnnnnnnncttttttttttttttttttttttttcccaaatgtgtttattctatatttctagcaaatgtcgtgagaatacatgagaatcattgtaatttgtaaactaaagattgtaacaattattacaattacaagaaaattcaggctcaatatgaatttagaaccgcatgatcatccatttatgaggttcagttccgggaactgctgccgttaaggttctggaaaagctcgggaagatgggcattggtgagtttggttctcttgctgatctcttggttccttcttcttcttatcctttggtttattccgatatgccatgcgtctgtgcagcagctctcctctctgcagtgtttgtcgccggcttcaaaccgattttcagcagctccttctccacgtccagcatgtcgttcgggatgtttatgtcacggaatagagctttaaattcgtcatcaaccttaatctcacacttgaaatnatttgggtatgcaatgtcctcttgtgaatttgatagcaagtagatgtcccctgaagcactcagagccttcaaatcctccattacattagggtaagcctc

SEQ ID NO: 132952 - DNA, 705 bp, Arabidopsis thaliana
  unsure (1)..(705): unsure at all n locations
ttaggacnnnnnnnnnnnnnnnnnnnnnnnnnnnnnnnnnnnnnnnnnnnnnnnnnnnnnnnnnnnnnnnnngtggctttttttttttttttctttttagagtaaaatacacgttgaagaaataagagaagtcggagacaatgcagtgatgcttgcgggtacaaaatattagatccttctctctaaggagcttcttctaactaattctccgattcggaatcaaacctagaagtgatcataaatctttctgattacttagtgatggattcaacacaagccttcttatttcctacgctttccataatcatccattgacagctgctttcgtttcttcagaagagatgaagggctctcatttgcttgcctacccgaaggtcgttttgatggcgttgcactctttgaaagcttcttctcttttcgggcttgcctctctctctcatcaaattctggattctctttctcaatcaacctgattagtgtgtcacatctccttgcaagttcctgagtgtgggggatttacaaccagtcaacctaacaggggatgncgaacgcggcnttagcccanccagttccaaaccagntaggacagcaacagaacggcgacnctcatggaaagtccctggcngacaatggaactcagtccagcagggtcgaggnncagtcntcccaaggtcagatcactccangactggnccccccaaactg

SEQ ID NO: 132953 - DNA, 592 bp, Arabidopsis thaliana
  unsure (1)..(592): unsure at all n locations
actatagaagagtctatgacgtcacctgcacgcgtacgtaagcttggatcctctagagcggccgcccttttttttttttttttttcttttttttttttttttttctccgaaaaagaaacacgatatttcataaagagaacaaatcgagatagatcttctgtatatctatttgacaaagaattgtctgattctctaattgcaagtagaaaaaaatgaagcctcaaaaccgaatgatcaacaaaagaattgtaccggactttgcaaagcttcttcaagaacaactttcttctgaggagctcttagtagagacccaaaaatttccaccagaaagtcccaactactccccagattatcgcattaatcgtcgccatcacgaatccaatcttgaatacatcaggcagatcaacataacccgctccatagtagacagcggcttgaccgctactgtaatgagtcaaagcaccaaaaagattggtgttgtatgctaaagcaagggcagctagaattccngggaaaccggngggnaatgcctagcaagggaanctggnaaaggggcccacgggncgggtgggttccnaaggngngataaagt

SEQ ID NO: 132954 - DNA, 517 bp, Arabidopsis thaliana
  unsure (1)..(517): unsure at all n locations
ttaggacgnnnnnnnnnnnnnnnnnnnnnnnnnnnnnnnnnnnnnnnnnnnnnnnnnnnnnnnnnnnnnnnnnncttttttttttttttttgtaataagaaatcatgctcatttatgttatatgtatcttcaaatctgtacacagatgttcaatatttaacggcttctacgtgatcatcctcttctcgcaaacaactgcgctttgaggagaaaaatgtggaacaaacttgtagatcaatattttgttaatctttggtgatccatctgcggcccctgacttcaaatccaccataagcttgatcactactgctctctcccccgctctctgcgctagtgtatcccgatttacgcctgtgctttttggttcttgtaactccactatcgctaaaactcccatttagaagcggatcatcaatccctcgaatcactctccgactgggtgatgatgacatgcaactatcgtccttcactcttctcttttccttgtcgtgtttcttaatgttctgggagatcttgt

SEQ ID NO: 132955 - DNA, 522 bp, Arabidopsis thaliana
  unsure (1)..(522): unsure at all n locations
ttaggacnnnnnnnnnnnnnnnnnnnnnnnnnnnnnnnnnnnnnnnnnnnnnnnnnnnnnnnnnnnnnnnnnnnctttttttttttttttcgtccgtcttcgccttatcatccttcccttcttcgcctttggattctccttctcccttttcttcttccttcttctctccttccgctgccgcagccgcctcctcaggtggtggtggaggcggtgggtcgattttcatgatcgcagcatgttttccggttcgcttataaacgtattctacaagcttttgtggttcaaaaactcctttcaccgtcacttgagaactctttaagtcggattcagcagattccactcctttcattctcatgatccgtttcttgatctctgtcgcacaagcttcacagtgcatgtgaaccttaagaaccaccgtcacaaccaccggaggctccactttcttctcttccacaatgggtttatcctcctctgctttcttctccggcggcggaggcggaggaggaatcggagacagaagct

SEQ ID NO: 132956 - DNA, 821 bp, Arabidopsis thaliana
  unsure (1)..(821): unsure at all n locations
nnnnnnnnnnnnnnnnnnnnnnnnnnnnnnnnnnnnnnnnnnnnnnnnnnnnnnnnnnnnnnnnnnnnnnnnnncttttgtttttttttttttttttttggattaaacaaaataattcaacaaactaaaaagagagagagagagaaataggttacaaattaaaatttggagtctaaagaaaacatgatcccataactaaacatgtcatgaagatgaacaacactaaagaatattcaattcggacaccatcgcttggaaatctgccgcctggaactacgggaacttgttgtcctccacctctagtgtttccactacttccgctatccccaccaccatctccaccaccgtcaccatcatcgccaccacgactgcccccaccttttccagccttatttcctccagagccaccgctgccaccacggtttgagcttcctcctccactttttccaccgcctccacttccacgacttcctccaccactgcttcctccacctgaagaaccacctcgagagcctccgcctccccctcctccacctgaagaaccacctccaccggcaagctgcctacgcacaaaatcacccgaaaacggcatcgtttctaccgttaaatgatgacgttttacatcaatagatgacacagaagcttgatcaagtgaaccaacggcttggatttgcgtatgaatcagaagggatagaaatagatgaaacattatgctacgcatttggatttccattttgcggacgcgtggnnnnnnnnnnnnnnnnnnnnnnnnnnnnnnnnnnnnnnnnnnnnnnnnnnnnnnnnnnnnnnnnnnnnnnnnn

SEQ ID NO: 132957 - DNA, 741 bp, Arabidopsis thaliana
  unsure (1)..(741): unsure at all n locations
nnnnnnnnnnnnnnnnnnnnnnnnnnnnnnnnnnnnnnnnnnnnnnnnnnnnnnnnnnnnnnnnnnnnnnnnncttttgttttttttttgataaccaccaaatcacatatcattaaggactgttgttgagttttacaactgccatagacccaccaagaaagatgaaacacaaaaggacaaagacataaacatgtgttttgagctacaaggaatgaaaaaaacaatccttgcaatatctcacaagacccctttttctttaagagaaggaagatctcacaaacactatctttctctatcttcctctctcttttactatatatgatttatatataaattttgaaaagcattgaacttagaggagaaagaggatgagcactttcactcttctttaattttttgaagagtcttcactttgtctcttcacacctttcttcaactcttcttcaaccctcttttttaatattcaccagagaaacccaaaagtaaaaatgaagataaaagactaaaccttttaacgttcttgncgaaccagaggnaanaaccaacgnctttccttccttctcacgnccctataacacaactgggatctccctttgatggttgttggttgttggccngatcaaggccaaaggggtagctggntaccgngncattttgcanggngttggtgagtgaatggtaggcgnactcnnnggggttttccggntggnaatggagtgnatccncggggggaaccggacg

SEQ ID NO: 132958 - DNA, 617 bp, Arabidopsis thaliana
  unsure (1)..(617): unsure at all n locations
gggccaaaacggttatattactttttagttaaatttaaaaagaaaactaaaagggtaacattagtagaattcttgacaaaacaaaaagaggcaactttggttttttttttttagtcattagaatttggatttctcaaaattgtaacggttcacataaccaataactttgggttattaatcaccaaaacaaaaaaacccaaatttgttagcttaaagaaaagccctgatttttaaaaaagcccaaattgtctaaagtcaagacgatgaccttctccggcgagtcgacggcgtcgatttatcaccgacggtagtaactgagccaggactttcagatgtatctgagctactaacatctccaacgccatctttatctttacctgtccaaagcttcgagaaaatccgagacattacaactccttttggctttcggcttctcagaactactcgtcttggtctctcgtcgtagttggcgtctcctccgtgggcggggactggactcacactcttcttctggtgtcggtcctgagccccgtgcgagccgcncgnnggaaaaaagggtcgnggngggacgaantgnccgaganagggttnganacggncgaagggaacccccgttg

SEQ ID NO: 132959 - DNA, 576 bp, Arabidopsis thaliana
  unsure (1)..(576): unsure at all n locations
taggtagcannnnnnnnnnnnnnnnnnnnnnnnnnnnnnnnnnnnnnnnnnnnnnnnnnnnnnnnnnnnnnnnnctttggtttttttttttttttttttttttttgaaccggggacactaataccatacaacaacatttaacattgtacatgtgaatgtgaaccattccacatccatctaggaactgaaactcaactgtctcagaacccttttaacagagactaactcataaaatgacaaaaccttttttttatatcatcgtgaagaaagtaaaaatgaaaggtagaacctaattgatatcaacaagaagcatcacttattcttcctctatttcattttccttcagtttttgcatcaccaccgccatgtctagcggctgagccaccttgcccatcagctccactctggctcatattggtcccatccggtttacctcctccactagcatcgttaggacccgcattgtttgcggcaagagcagtttcatggtggtgcatttgatgttgcagtccgttgttattattcaaacccattggtctaatccccatgtgcccttgcatagcttgttgatgtaac

SEQ ID NO: 132960 - DNA, 513 bp, Arabidopsis thaliana
  unsure (1)..(513): unsure at all n locations
nnnnnnnactatangaagcttatgacgtcgcctgcacgcgtacgtaagcttggatcctctagagcggtcgccctttgctttttttttttatttaaaaaaatctctttctctatgcatatatctaaacaagtatacacgtttacttatatagacataggaatgcgtgtgttacatgtataaaaaatgaaagaacatcttcaaaatgaagattaagcagtgattaggttccttgcaacttcctgagaatcgaatttccggcacaaatccaggctcctgttaatatctgtcctgcatgagctctgatttccatattcgatgcggattgcttcaacgaggtcttctttgcttgatatctttgggtctagaggggaagatttagattcatacacttggcaatttatctttctgctgtgattttctttgactatcctagtttttaaggaatcaatgggcttttttagtgttctggacttagtagcatcattctcttgtacgacatcggttttagcattt

SEQ ID NO: 132961 - DNA, 524 bp, Arabidopsis thaliana
  unsure (1)..(524): unsure at all n locations
nnnnnnnnnnnnnnaatacgactcaccttagggaaagctcgtacgcctgcaggtaccggtccggaattcccgggtcgacccacccgcccgcccgcgcctccggaaaagttagagctcttctctcatctccaatttctctctctctctctccttcgctcttatcctctggcgattttttccagagattctccgattctcgaggaggaggaggaggaggaggaggagggagagaaggagaaggacattttcgattcgattgatgtgaaacgctcctacttgattcccgtcgtctgagatcggagttatcatcgaggattgataatggttcccgaatcatcatcgaggataatgagtttttctggcgatgatttcgaattcgatattgatttcgaattcgatgcaccgaggttctatgatttctctagacctgagctttattccgagactgaagaaatcgaaatctggtttcaatcctctggaaactatcctccttcaccttttagcccaaagttcaatgggaaatt

SEQ ID NO: 132962 - DNA, 771 bp, Arabidopsis thaliana
  unsure (1)..(771): unsure at all n locations
ttaggtcnnnnnnnntgacttcgtatgcacgcgtccgtaagcttggatcctctagagcggccgccctttttttcttttttttttttttttttttttcatcaagttttgtgtcaaattttatttcttttcaattgtgcagagcatctttaccggtacacttgaggctaatttaagacaagatcgaatataaaacattagctcttcttcaacaccacatcatttctcttccaagaacttcaatcaagcgcagtcaaattttgagacatgatctcaaccgcacgttcgatttcctcctctgatataaccaacggaggaacaatcctgacgacatttcctttccccgctgtcaagatcagaagacccgaatctcggcaagcatcaaccagtgagcttgccggcacatcgagctccactcctatgataagcccttcgcctctcacttccttcacgtgcgagtttcctccaagttttttcaccaacaggtctctaaagtatcgacctttatttgagacactggacaagaaagagggtttcgatactttatccataactgccaaggctgcactgcacacaagagggctgcctgcaaatgtacttccatgaatctccgtagattatggtctttgcaaccttttcagtcaccagcaccgctccaaaggtaaaccccccgctaaaggctttgcaacccgcattattgcaggagtcacaccgaaagttttataagcccacatgaaaacccgttcgacccaaaccacattgaaccttattgaa

SEQ ID NO: 132963 - DNA, 518 bp, Arabidopsis thaliana
  unsure (1)..(518): unsure at all n locations
nnnnnnnnnnnnnnnnnnnnnnnnnnnnnnnnnnnnnnnnnnnnnnnnnnnnnnnnnnnnnnnnnnnnnnnnnnctttttgtttttttttgaacgcgaatacgtgaaatacatacatttttgctttttttctcatgacctacaagcaattggggcgttaaccgcagaagctaatgtgttcttaggttacactcattcataatctctctcctttatttgctccccacaaacaataatttcgtactttgccctgctgagacagaacatggagtttcctcattgctgacaagttaccagaagcgatactccattataagctgtcatcaagaatcgtagagctcaatagctctcgaacaaactcactgcgtttcaacttctgcttgtgatcctcagctgaaagagaagtttttttcgcattctgttcgggtaaacactgaatagttgttttcttgacaggacccgtttctgcagatatgcatgactccgtggtgaagaacccatcagcaataggagaaatga

SEQ ID NO: 132964 - DNA, 680 bp, Arabidopsis thaliana
  unsure (1)..(680): unsure at all n locations
nnnnnnnttgtnnnnnnnnnnnnnnnnnnnnnnnnnnnnnnnnnnnnnnnnnnnnnnnnnnnnnnnnnnnnnnnnnnnnnnnnnnctttttttttttttttttttctctggttacttgcaattttattctacaaatatacaagtctagattacaccaaagtcacataggaacccagttacagaaatagacaaataactacaatacctatttgttaattctgtctctctttttcatacaacagagattaggtctcgttatgtatactttattctaaaccagttgcagaaagatcgagagtagcctttcccattcacataatttacagatcaattaccatccatgtttaacaatcaacaccaaactctctttgactcacctctccatagccattttgatgtatcaaatatcttccaggcaaccgtactccaactgagcttcttcatgagtgagtttcatccttctgtaatcctgttgagccttcttagacctgaacatggcttgtactcgcactacagatctctcgagcctctcctctgcttgtctctggcttgacttgtagaaatcttcctgtgcctcaccaggagaatcctcctctgctgaacctggagtcctctaaacccttttctcttttgtctccacctcaaaactgccttctccaatactcctaccgaccacaata

SEQ ID NO: 132965 - DNA, 502 bp, Arabidopsis thaliana
  unsure (1)..(502): unsure at all n locations
nnnnnnnnnnnnnnnnnnnnnnnnnnnnnnnnnnnnnnnnnnnnnnnnnnnnnnnnnnnnnnnnnnnnnnnnnnnnnnnnnnnnnnnnnnnnnnnnnnnnnnnnnnnnnnnnnnnnnnnnnnnnngggcaaacaaaatttgtattcattccatcaaatcccctaagggcaagtttacaaagtcttcaaagatgaaacagattacaaaaattttagaaaagcctaagcttgcaacatagggggataacttaaaaggataggccaatgagagtcggagacagaggcaaagaagccacataccacaaacgacttcaaagggggtcaatgacacttccactagcatgtcggggaaatacaaagtagtcactttcaaacaatgataatgaccttgagaaaaagtcctttgcctcatggttcggcgatgcgaaacgcaaagagggcgttgggacaacaaggggaatatcctgaaagatacagataaattcgggtttgatcttgggttc

SEQ ID NO: 132966 - DNA, 514 bp, Arabidopsis thaliana
  unsure (1)..(514): unsure at all n locations
nnnnnnnnnnnnnnnnnnnnnnnnnnnnnnnnnnnnnnnnnnnnnnnnnnnnnnnnnnnnnnnnnnnnnnnnnnnnnnnnnnnnnnnnnnnnnnnnnnnnnnnnnaaacaaattattttttaaaaaacaaacaggaaaccaatgatttacagaacacgagttaaacgaaccccattgctacccgcaaattcttaagagtcacacaaaactcaaaacagatggcacaaagacaaaaacacaatggttaaaattgactttttgtttttcgggtcttggttggggggtttttcccaataaagaaaacataattatgaaattactaataaggattgtaacggcttcgtcctctaccggtgtcactacttcgtttgctgccgctgctgctgctcgaaccgctgcctcccctatacggtggagaatgccttggggggggttgcggcatagctgctagtccaggctgttgcaagacgtatccgattctcccatcgggtaacatgattggcatcatcgacat

SEQ ID NO: 132967 - DNA, 526 bp, Arabidopsis thaliana
  unsure (1)..(526): unsure at all n locations
nnnnnnnnnnnnnnnnnnnnnnnnnnnnnnnnnnnnnnnnnnnnnnnnnnnnnnnnnnnnnnnnnnntttccgcccttttgttttttttttttacgtgatatacaatcccgagtacattcattacactctagtttgatggactaggaaattgtacaaatttttttacagtcatacatcttgtgagagtactcttatcgatcagttttctttttctttttaccctaaaaaaatcagaaaattgcaacaatctgtacataagactttccctatatattcaaccttgtagcaagaatcacatgcctttgcctcttcttctccctcatatatcggtaaggctttcaatattagtaggaattacttagagttgtaacgccaaatccggatgctgcgatgaacctgcctggtggttagagcctggtgagtttggtgaggaaagcctagcattgagatctggtggcaaccgctgaaattcctgttttatgttgccttgctgcgagccagctgtttccagcatttggtttggtt

SEQ ID NO: 132968 - DNA, 519 bp, Arabidopsis thaliana
  unsure (1)..(519): unsure at all n locations
nnnnnnnnnnnnnnnnnnnnnnnnnnnnnnnnnnnnnnnnnnnnnnnnnnnnnnnnnnnnnnnnnnnnnnnnnctttgggtttttttttttttttcaagtctcaagatacttgatttgtgctttcatgtctgaacatagtccactgagaaaaatgaaaatttagataccagtcaatgatggagagtcttgtacttgttattacagtgaaatgtaaacacgaaacctttggttttctaaggttcttcgcatagatatatgcattaagattatacttttcgaccctgaaagaccttgaaaccaaatgggaaattttgcacaccaagtttttgactatctttagttcatgtttccaacttggctgcagcagatgcatagctgacactgctgtctcgcattgtctggcattggcttgactgctcgtaccgcaggaaattgatcttaatcttgcttgatgaatgttttagcatatggagaaaaatactgatcgggtggcgcccacaaatcgtgttttcaaattc

SEQ ID NO: 132969 - DNA, 516 bp, Arabidopsis thaliana
  unsure (1)..(516): unsure at all n locations
nnnnnnttgtnnnnnnnnnnnnnnnnnnnnnnnnnnnnnnnnnnnnnnnnnnnnnnnnnnnnnnnnnnnnnnncttttttttttctttttttttttttttagtataatcacataatactttgtgaatttcaaacctaaataaaatacattccaaatgggaaattaaatgtgatctcaggaataaaaagaaaaagcgttgctgcttaactgctcgagctgagcatataaaataaggaaggaaaggattcagcaaacaggcaatgtaatgttgttctctaggtagttgcctgaaatctagcaattgatcaagaaagatcgaattttatactacactgagcagagtttacccctgcggtttttgcttcttttccgataactcactggagtctgcggttttgtttctgtcagagaagtccacacaaatcagatctgtgaatacaatgaagtactactaacattatcctaaaacagccaagacacttactggtgaaacatatgtcgttgcaaatcaaatag

SEQ ID NO: 132970 - DNA, 511 bp, Arabidopsis thaliana
  unsure (1)..(511): unsure at all n locations
nnnnnnnnnnnnnnnnnnnnnnnnnnnnnnnnnnnnnnnnnnnnnnnnnnnnnnnnnnnnnnttatttggccgcccttttttttttttttttgtttttgatcacacaagttcagaatttttttttaaaaatagtgtttttacaaacaaaattcctaacgattattttcatacattctgaaaccacaaattagaagaatactactaattgttcatcatatatgaacaaaatcattttctgggatcccttaaagcaaaacagaagaaaaagaaatattgctagtcatttttcctaggggtgatggtgtcatacatactcaccccagcagcattggaagctcatgcgaatacggttcttctccatcgctttcgtaatcagaagcatccgtaagccttgcaatggcagcaataagcgcctgttcatgttccttgagtagcttcttggccttatcaagctcatgtggatcaggaaggtttgaatcaaaaactctctcgacctctttcacaagtgag

SEQ ID NO: 132971 - DNA, 518 bp, Arabidopsis thaliana
ttaggtgcaactatagaagagtcttgacgtcgcatgcacgcgtacgtaagcttggatcctctagagcggccgcccttttgttttttttttttaagctgaaggagtaataactaataagaacctcatcgttttagacaaaacaaaccacagtttgggtaataacaagcctcaataatccttaaccgaatcaaacaaaactggcgggaatcgattacaactaaaccgttaattgaatctttaagaagaagatgttcatcattgttaatcaatgagagagttcaacatctgtctgaatttaggaatcttgtttgcttccacggccatcactaaacccatcagctgataattcttcatttcttgggaagtaacgagctgtgagcgcatagggaatgtgaaggaccaagagctaagctcgagaaagagttcatcttcaggcttaagaaatactgtgtcttcaatgtcttcttcaccatgtcgaggttttctctgcttaggattcttcagcttgtaaatcttgg

SEQ ID NO: 132972 - DNA, 534 bp, Arabidopsis thaliana
  unsure (1)..(534): unsure at all n locations
aggtnnnnnnnnnnnnnnnnnnnnnnnnnnnnnnnnnnnnnnnnnnnnnnnnnnnnnnnnnnnnnnnnnncttttgttttttttttttcagtaattatattagttaaattattgcaactctcattacgaaaacagtcacacatactaaatttgttacgctaatttgttcgttttatcattaaacccacataccatacaaattacatatctgatcaaatttcctacgaactttgtgtgtctccttccttccactgcttgtttgatccaatctcaacctcgggattcggtaccgtcttctcggggttacccttaggcttactcttggaatctctccacctgaaaccactgaaaagctcatccatatcctcaagcatcctcccttgcgtctccggcaagaaagtgtaaaagaaaacccaagccacagtcgcaatccctccaaacaagtaaaacgctccaccagtagtcatcgctttcgacattggaagaaacgatatcgagatcacaccactagtcacttttgtcaccaccacaccc

SEQ ID NO: 132973 - DNA, 937 bp, Arabidopsis thaliana
  unsure (1)..(937): unsure at all n locations
nnnnnnnnnnnnnnnnnnnnnnnnnnnnnnnnnnnnnnnnnnnnnnnnnnnnnnnnnnnnnnnnnnnnnnnnnnnnnnnnnnnnnnnnnnnnnnnnnnnnnnnnnnggcaaaaaataaaattctgataaattttttaatgaaaggaatttggtggaacaagttaaaaattatttacaatgggataatatgcatccatctaaaatctcaatggatgttgaatactactaatattggtaacaacaacatactcagaacacaacatgtcaataaacctgtaaacactctctctaacttggcaatagtctcacaaagtaacgtacaacataacatgctcacggatagccatcgagcacgcctttgagtaggtttaacccttccgcagatatcctccgcctcacccgtgactgcattcggatctctatcctctgtggaggatccggagagaagcacacaacaatcactgtcaaattgtcacatgtattccgtttaagggcctccctcacaagctctctagagcatctctctggatcattatgaatcatcagttccttcctagctattgtcacagcgcactggctgctcatcacatcccacagaccatcacatcccattatcaagaactcgtcgtcttcactcaggtctgtctcttgcaactctggctctgggcttagcggacaagcagagcctttgggacctttcatgtgccagtctccaatggcacgtgcaactgatagttgcccgttgaggtaaccgtcatacacaactccacctaacttttctattcttactttctcggctgtgcagtttggtttgtgatctttggacaactcaattgccctacctcttctccccagtactgctcggcaatcaccagcatttgcaattatcaacctccgtccaaaaataaaagctgtaagcgcngtggtcccagaagag

SEQ ID NO: 132974 - DNA, 327 bp, Arabidopsis thaliana
  unsure (1)..(327): unsure at all n locations
nnnnnnnnnnnnnnnnnnnnnnnnnnnnnnnnnnnnnnnnnnnnnnnnnnnnnnnnnnnnnnnnnnnnnnnnnnctttttttttttttttacttctatcagaaagcctctggataagttggtgacaatcgactgttgtgaccataacggttaagctagccttgcccttccagcatccaatggctattgttgatgaattcactttgaattgttctgacccgagctgagaatcatccacgagaaccataacgcaagatcccaaggctagttctgctgctttctcaccaatctgtggatgtatgaaatctacaaacttgattgatttgtg

SEQ ID NO: 132975 - DNA, 645 bp, Arabidopsis thaliana
  unsure (1)..(645): unsure at all n locations
cgcgtacgtaagcttggatcctctagagcgtctcgccctttttttttttttttttttttttaacaaaacatgtggtttcaagtaaaagaagatagatccagatagatgtacagacctgattagtttccaaaccaaaaatcaaaaacaaacaaaagtgtaataatttcgtatagatatcattatcatttcacaaacaatgcatcgtatctaaaaaaacaaaccagtcttgttttttaccttaacccaaagtctcctgatcaaatgtcgtgggtcatgaacacgtaaagttgtttcctctagacttcctctcgatccaagttgctactcttgaggatgttgtatttgcagagtgggcaagtcgcgttgatgtatagccatttgtctacgcatgaacagtgggaaatgggtgcccacaaggtgagttcccttaagctctgttcccgtcttccatttgccagagagacagaggcaacattctggatcttcctgccaaaggggtaggtcaatgggggaaactgtaccccccccagcattatnccccgggagtcctgggggtcaccananggggttgnngganncccagntgggaactgaattgggggcgccaagnntctttgagnccncccggtagaaagggnaaaatng

SEQ ID NO: 132976 - DNA, 517 bp, Arabidopsis thaliana
  unsure (1)..(517): unsure at all n locations
nnnnnnnnnnnnnnnnnnnnnnnnnnnnnnnnnnnnnnnnnnnnnnnnnnnnnnnnnnnnnnnnnnnnnnnnncttttgtttttttttttttttttttaatctctaacaattcgaggtcgactgagaaagaaagaggtaatacaaactacaaaacattggtttcaagtaaaagaagatagatacagatagatgtacagacctgattagtttccaaaccaaaaatcaaaaacaaacaaaagtgtcaataatttcgtatagatatcattatcatttcacaaacaatgcatcgtatctaaaaaaacaaaccagtcttgttttttaccttaacccaaagtctcctgatcaaatgtcgtgggtcatgaacacgtaaagttgtttcctctagacttcctctcgatccaagttgctactcttgaggatgttgtatttgcagagtgggcaagtcgcgttgatgtatagccatttgtctacgcatgaacagtggaaatggtgtccacaaggtggttcccttagctt

SEQ ID NO: 132977 - DNA, 403 bp, Arabidopsis thaliana
ctgtattgtggccgtcctttttttttttttttttggtagtcacttgaaacaaactacttttcagtttttgaatcgctagtattgtgggcagagatgaaatggcgcaaacctctatgcttacaaaattaacagagagtcgcgctcatttctccgtttctgtttgttactttctacagaagcattaaattgcttagaacacaaatttctttatatctcttctccgtctactcattctgatccaataccaagttcttctgaatccattagtgcaccagatgctttgtgttcttcatcaatcgggagtgtacgttttgagccatccaacgcaacaccaagaacaagattctcctccagtaaagaactagtaccggacccaccaccatctcgagctttcgactctcca

SEQ ID NO: 132978 - DNA, 637 bp, Arabidopsis thaliana
  unsure (1)..(637): unsure at all n locations
ttaggaacacactatagaagagtgatgacgtcgcctgcacgcgtacgtaagcttggatcctctagagcgtgtcgcccttgtgttttttttttttaatgaggaattgaaacttattatggaatgacaaatttaaagacaaaatgcaaaatgaaacatgtttttgaacattaaccgaaacaaacacaagcaccaaacaggttatgtatcttggtctaaaacaaaaaggaacacatgatcccacaaacacacaaaaacacacacataagttctggctgcatgaagacaaactgcagtttcttatccgagtaacccacaaaagcaaacaagacaacccaaattcaccgattgtttgaacattcaaaccatgacccccacccttctaatcctcctctctgtgaccctcctctctgtgatcctcttctctgcgatcctcctctacttgacactcctctctgtgaccctcttctctgtgctactcctcttggtgaaactcgttgagatggtgcagatggtgcagatggtgcaggtggtgcaggtggttcagatggtgcagatggtgtcttttgggnntgntggggacagagacggttgggaagagtggctgngatggtgagatggtnantgntgcntggctgtg

SEQ ID NO: 132979 - DNA, 521 bp, Arabidopsis thaliana
  unsure (1)..(521): unsure at all n locations
nnnnnnnnnnnnnnnnnnnnnnnnnnnnnnnnnnnnnnnnnnnnnnnnnnnnnnnnnnnnnnnnnnnnnnnnnccacaggtccgcggacgcgtgggtttctctgttcgatcgaaatggctaaaactcgtgggggggaagagaagagatccggttcgtcgatcacggagactgagtcaagcatccgccgaatcaaatcctactgaagctgaaccaattttaattccttctgtcgacgaggctaatcgaaagaaaagaaaaaggaagaaggtagcttgaagtagatattgaggaagtatcgtgaggcctgtgagtggcgatgattgtgaggttgttggtgacgaagattgcgaagaggtttgctatgcagacaagagaatcgggaataacgaagaacatggtggagaggaacaatgggacattgacattgtttctgttcagcaagaagacgatagaagtgctgtcggggaagaaggaaacgttgcagctggggttgaggaagaaggaaacgatggaggtggtg

SEQ ID NO: 132980 - DNA, 611 bp, Arabidopsis thaliana
  unsure (1)..(611): unsure at all n locations
tttttgnntntnacttttttggcccctaatttagatttttagctattaaataactttgtgtttaacatttttagtcacccagtgttttcagtatatatagattattcggtgactagttcatatatgattaggaaatttagagtaatgaaactaaccagtacagtactaatctctaaataatctaaaacaaaaactaaccgttactacactagctaaaactttatggaaaagatgacacaaaggtgacaacaaacgcagaaagcctttggttatgggagttgcttctggtggctcagtctttcttactatccacatttgccgtcagccttgcacgctgcaaagttatcgcaaccgcatatcaaattgccattcgcaacatcaaccgcttgcggagctcctccaccatcgcttctcttgtagaaatcgactgctatgaagttaggccatcgctgtcccgcggcttggtaacatgtctttatggattcaagaagagaagctgagttttgcttacatgctactatcacatccgcagcatcagggaaatggttcacaagaacaagagattgtgttccatcgctcattggcgctgattgagctctatttggacacac

SEQ ID NO: 132981 - DNA, 536 bp, Arabidopsis thaliana
taggtcaactatagaagagtcttgacgtcgcctgcacgcgtccgtaagctgggatcctctagagcggccgcccttgggtttgtctttttttttttttttattcgaatatattactcgtgtattagagttaaattgaagaaatcaaatacaaacagaacgacaaaaatcgatgtcacaacactttgaaattggtctactaaacacaatacatgaaccatatgtaatgtgatgatatacactcttcagttcttcttcccacgaccacacttgacttgcacggaaagcatcttcacaacgttcttacatgaatccttcttgtcttgttgaaacgtgctcttgttcaccggaatcacacattcagctttccccaaacagggcttctcgatgacttgctttgaaacaggagcattacaagtaccaagtgtgaagtttccacaaacaccaatagggtttccgaagctagcgaactcaactgctgcgatcttcttagtgcctgagcatttaagagtagccgtgagactcacgttatctgtgat

SEQ ID NO: 132982 - DNA, 586 bp, Arabidopsis thaliana
  unsure (1)..(586): unsure at all n locations
ttaggtacaactatagaagagctatgacgtcgcacgcacgcgtacgtaagcttggatcctctagagcggtcgccctttttttttttttttttgaacgaattcttacttgtgtttattctgtaacaaattggcactatctcagttacatagtgataaactttgtgtgttcgcggttattgcaaaagattataatcaataataactcaagaattaataaatatttcgcaaagtgcaactctctactcttttcttgtaacttcaaaaatgccggcaacaaatatcaataggcactactatctcagtatctcctcctctgatagtatcccatagcttgatacatattgcgcattgtgacagctcccaactcctcggctctatccgcaccttctgacaatattttgtcccaatactctggttccgctattatctcctgataacgggcctggattggactcagatggtcgatcaaagcatctgcaaggagaggcttaaatgtaccccagctcatatctttgcattcctccatcacttcctttttnttcttgcctgaaacaatctgatatattgagaggagattgttgcattc

SEQ ID NO: 132983 - DNA, 512 bp, Arabidopsis thaliana
ctatagaagagctatgacgtcgcacgcacgcgtacgtaagcttggatcctctagagcggtcgccctttttttttttttttagttaattatattgaattaatcaaataatttatggatacgatcgaagccgaattatatgttgcaaatgatgtagtatatcaacctttatgatgtatatatgaatgcttccgatgaaccctaaacattgacaaacgacagttggatttcttctaacgttaatcttcgagtctccggcaccaagcaccatgtgaatacaattgttgctccacagattatagcggatattataaaagtcccgcttgggctccaaaccaacataaaattgaaagcatagttggcgatccaaccagtgaaccaatttgctatggtcactaaactcccagctaatacctttatatccattggaaatatctcagacattataatccatggtaacgctcccattccaattgcgaacatcatcgtaaacgacaatattccaatgaaacaga

SEQ ID NO: 132984 - DNA, 529 bp, Arabidopsis thaliana
ctatagaagagctatgacgtcgcacgcacgcgtacgtaagcttggatcctctagagcggtcgcccttttgttttttttttaaacatcactggtcttttgaatcaacctaaggtcacaacactgcgagcataatctaccaatactctttagcatactcatttttccaaacctatgaagtaccaaagaaaacatcgttatccttctttctgtgtatgaagcaaatacagttgcttttattcacaaatgacgacgtggcaactacattaagtttaagggcttcccttctgctgctactgtgggtgtagtagccccataagagacattcactagttgcgcagcagcaccgagcagctgctgtctgcacgtatcagcgctagctaggcgcagctcgagctatctccattacatcagtctgattccgtctagtatcagggaggagcttgaaaggctgaagtcagcttagatgatggcatgcttttgctcactgggttttgagcttgaagcttttggaatctctgggtggcctctg

SEQ ID NO: 132985 - DNA, 539 bp, Arabidopsis thaliana
ctatagaagagttatgacgtcgcctgcacgcgtacgtaagcttggatcctctagagcggtcgccctttttttttttctttttttttttttattttttttttttttttttttttttttttttttttttttttttttttgggcacaaaaagggacacagcttttacattcatgtttcactaggcagtctcttgggtacattatacatatttcgcatttcctcagttgactccgggtacaaaatttgttttttaaagcaaagatctaggactttcagattacaaatcatcttgtagctgggttagaagcccatcggtctcatgggcatcgatttcactgggggttactggtctggtttcgcccccatcaataagagctagggaagatttgtcttcaagatcccccgactgccttaacaattccaaaacggcctctttactggtaacatccgattcctcttcacagagcttgaagaaaccagacagcttcaaccccttgggcctccaattgctgggcccttcagccgaaaaagcatttctaag

SEQ ID NO: 132986 - DNA, 511 bp, Arabidopsis thaliana
  unsure (1)..(511): unsure at all n locations
nnnnnnnnnnnnnnnnnnnnnnnnnnnnnnnnnnnnnnnnnnnnnnnnnnnnnnnnnnnnnnnnnnnnnnnnnncttttttttttttttttggatccctaactgcaaccaattgtactcaaactttgaaacctaaaatactgaattcacaaacggaattaaatcatcctgacggtagtaaaaaaaaggggtacaagtacaagtatgagttctgcgtttgaaagttattaagcttggctcattttattcaaacaattaattccttcttccatatagtcctctctattgatccagaactctggtgcgtccttcatgattcctgcaagaacagcacctccgaggtataccatgtgtttccttctcggtggatcttcgatccgcaatctgagtttcttcaagccatctttgtttccttttagaactgtgtcgagataccgatcctgtatttctttctcaagacggctaggtaatcctgggtacatggtgctacctccgcttaaaactatgtgttg

SEQ ID NO: 132987 - DNA, 685 bp, Arabidopsis thaliana
cctatagcctagctatgacgacgcatgcacgcgtacgtaagcttggatcctctagagcggccgccctttttttttttttttttttttttttttttttagctgaagaagcttctatagatagatccttttttttttttttttctttttcaccgcaaatatcggaaaattgttttgtgtgcattagcttcattgtctacagtacaaaaatcatatgagatgttttaagttcttcaaatcgatacttagctctaaaacaaaacttggaagacaacatagtctcctgacttctcttaaccttaaaacagcaaaaatttcagacaacaaaaacaggtgcagtgaactccctaacttgagccatggttgatttctgttaaatcatgaccgagactttgactgtttcttctccagtttcattttgaggttggctataatcttatcctgagcctgtatctgatgttccttggcattgagcttctgcttcagttcttcaatttcttttgaatgaccttcgcagctgattgcgaactccatagctttgagtttttccttcagttcttccatttcttttaaatgatcatcctcacaaaggtttgcttttgcctctttggtcttctcagattcatcttgaaccatgttacgaacgtttaaacaagctcctgatcctgaactcaggctaaacccaacc

SEQ ID NO: 132988 - DNA, 727 bp, Arabidopsis thaliana
  unsure (1)..(727): unsure at all n locations
cactatagaattagcttgacgtaccatgcacgcgtacgtaagcttggatcctctatagcggccgccctttttttttttttttaatgacaaaagcacaccgttttgcatcatagacacatgcatcatagagatttgcagacaagaaatctctagatcataagacattgacaaagattgggtaccaaagtggacccttaatgtaaatttgtaatgtatttatttacaatcacagttcctaagaacattacaattccaacatcacatacatctcacattgctaaaccggaaccaatcccggtttactactatgtgatttcacaatgtgtaagtcatgcatgactcatgagccatccaagatctttaagattgagatccctgctcgagtaacccttccatgttgttgctatcactgctactgccccagccactgatatttccataagctctttctttccaaatctgttcaacttccgaaaacgttagcccttgagtctcagggacaaacacaatcacaaagattacagcaagaaccgcaattcccggcaaaattcaagaaagtcattcctcttccagcagtttccggggtttgccaagaatggttggtgcacaatccaaattngtggtccagttaactggaggttggnatgcctccgnttatggccccgggattgttgagggggatccctgngntcaccggccatgggggtgggcccattcccgggggaaa

SEQ ID NO: 132989 - DNA, 778 bp, Arabidopsis thaliana
  unsure (1)..(778): unsure at all n locations
nnnnnnnnnnnnnnnnnnnnnnngccccccctcgaggtcgacggtatcgataagcttgatatcgaattcccggccgcaatcacaatagagaaaactggaattcttgtaggtacagtgtattacagatgcatcacagctaatagttataaatacaaacgtggtgtgttgttctgactcttatctacaaacacttaatctggacccaaccaaccataaacaaacccacactggtccattggtccacatagtctcttaattcggtttctttagcaattcttcataccacaatccatgaacagaacgtgacactgttgccacaagaacaagaatgtctgaaacctctatgaccttgtccgagagagaagctgctccgatctttcttagcattgtttccaccaactgctttctcttcgtgttgtttccggccaaaaccgcggctctaatggctaggtatatggtctgtgatacatgtgtgaacactgcgtctcctgcttgtaagcttttcacaagcatgtttgcgattacttgtttctttgtctctgcatcgntagaatcaagaagctcggagagtgtttccatgatttctgaaagacctgcatcaggttttgcgtctagcatctcgtaaagacggtttatgcaagtccgtgtaatagcctccatgtcaatcgaggatgagttntcgcttactagtgtttgctggaggatcaaaacactgatggagacaagagtgattttctggatttggggatgaacatctctcagcctagataggttaagt

SEQ ID NO: 132990 - DNA, 684 bp, Arabidopsis thaliana
  unsure (1)..(684): unsure at all n locations
gatctgatttaggacgcactatagaagtactatgacgtcccatgcacgcgtacgtaagcttggatcctctagagcggccgccctttttttttttttttttttttttttttttttttttttttttttttttttttttttttaaaaaaaaggcttgcatattattatgtattaaacatcatcctctgtaaccacactgcttccttctaacgacaaataaatgttgtccacaagcattgcttaaattcatttgtgttctcaaatccaacctacaaaatcatttgtctctcccatcgcatcccatgtatgaattccaaagccttcctagtttgttttctcattggctgtctgtgaagtcagcatcgatcacatcatcaccatctcctcctttacttgaagatgaatctcctgatgaagcaccttcgcctcccggggaaggacctgcacctggacctccagctccaggctggttgtatagagactgaccaatctccatcacttccttgggtaagagcacccatggcgtctttggtttcttggggtgacccacttccaatcctggccttaagcccttggagcttgctccacttctctttatttacctggantttnncccaagtcttcagtggtttcggntggaacatgantgctggttngggcgatgggccccnccttgaacttgaantt

SEQ ID NO: 132991 - DNA, 816 bp, Arabidopsis thaliana
  unsure (1)..(816): unsure at all n locations
nnnnnnnnnnnnnnnnnnnnnnnnnnnnnnnnnnnnnnnnnnnnnnnnnnnnnnnnnnnnnnnnnnnncttttttttttttttttttttatcttaagtagttttcatatgatacaaaggactgataaaaaaaccgataacaaaacgctagtttttgtttgccaacaaaccaagggaaaaaaactaattttaaacctgcgaaagtaaatgtctgactttcgtttcatctctaatgagaacaatgataagcagaattcgaactttttgagtttcttcacctgtgcttgcgtttagatggtggcatagttcttcatgctgctactaccacctccaccgctagttccaggtcgcgatttcccaaacgctttcatctttcttctcttcctctcttcctcgctatcagactcaactccatgctctctgtctgcattagtagcttctctctccagttcatcccaagtcttacctttctcttcctctgactcttgctctgagtcctcttcttcatcatccgtctgactccaccagtgactcactctctgaagcctcggcctctgactcagactcaacctctacatctgatggttcatatccttttgtctgactcctcagacccgccagattctgaatcgcttccgtccaggttcagaaactcccatcctccatcatctataaagctctgcggatcatctgtgatcgtctttaggatctgtctccagttnagattcagtttgctctcgtagtactttatatctgtggtgtctagccactcctttatcccctctagggagcttgtgggaactgagtcaaccctgag

SEQ ID NO: 132992 - DNA, 1298 bp, Arabidopsis thaliana
  unsure (1)..(1298): unsure at all n locations
tnnnnnnnnnnnnnnnnnnnnnnnnnnnnnnnnnnnnnnnnnnnnnnnnnnnnnnnnnnnnnnnnnnnnnnnnnnnctttttttttttttttaatgtaattaacttttcgtatattcgtctcacatgacaaatcatacattatattattctaattgattccaaaattttacatgacaataatctgtaaaaatgtcttaaacgggtaaatttctgagtaaccgaagagctttctcccattgtggtcgttgagacataacgatacgtctcaatactggtacagctcctgctcttatgatggctgtgtggttctcactgtccatggttaagttgtacaatactgacaaactcgcttcaacgcaccgctcgttcctttcttcaagaagcttaaccagcggttcgatacctccttgtgaagcaagtgtttggatagattctggaactccctcggagactatcttgttcagttctaaaaccgctgcttctttcgtttctggtgatgaggaaaagctcatttgttccacgaggctcgggatcgttttgtacagagttacctcaagattgatcggattgttgagggattgagagggagaggagagagcggtgagtttgacaagacaagcggcaacccagtctttgtagtgtagagggaggcttgatcttaggatcttccttactaattctatgaagaccgcggtatctattgtttggcgaaaggactcggagtcaagaagttttgtcagtagccttgaagcagcggaaatcgtcaaaccagcttcttctagcttaagcagatgtttctctaactcctcagcttcattctcaggttcttccaggactttctgccggagagcaagatcaagaacagttgtgaaacccttggagaatgaccgtgcccatgttgggattcctgattattccaaacccgatgacagagattccgttccttagcaggttcggagaggctgtttccgcaatctggacgagccgagaaaaaacagcagcgtccagaacttcctttctggagtctgcttttgatccgttcaccggtccttcataaaacttggattccatttccttgctaggatctaagatatgagcaattatatccagaacgtgttctgtaacgtttagtgagatctctggctgcttcagaagattaattagaaaccatactgcaccttcagcttcaatcctctggcaaacagtgcggctaagtgataaatttttcaaggcacggatgacgggtaatttaacacggacgcgtgggtcgacccgggaattccggaccggtaccgca

SEQ ID NO: 132993 - DNA, 641 bp, Arabidopsis thaliana
  unsure (1)..(641): unsure at all n locations
nnnnnnnnnnnnnnnnnnnnnnnnnnnnnnnnnnnnnnnnnnnnnnnnnnnnnnnnnnnnnnnnnnnnnnnnnnnnnnnnnnnnnnnnnnnnnnnnntttttaaacaaagttcaaagtcacatttctaagcatattcaaacaaaaacacaaattttcactgattcttagcgaaaagcttggtagtattgagtacattagcatctaaatactctttggaaggatgattctcaggaaccaatcttctaaactctgcaaatggcttctctgcttcatctttcttcttcatcatggtataaatcaaaccttgacatagatatggtctaaagtctttaggctcatctttcaccaactcttgataaaccctaagggcttcaattggattacctttgataaccctaatctgaccaatcaacaccatgaaatctctaaaatctttcttggttctccttctggcatttctcaaccgctccgtggatcctactctcgatctctgataatttcgattcggattcggagtaagccattactaatccgtgataagcttctacacgaaatggatctttagatagaacctcttcgaatcctttcgtcgctgaatcgaaatcgccgccgtaggtttgtacctgagcttttaggatcc

SEQ ID NO: 132994 - DNA, 703 bp, Arabidopsis thaliana
cactatagactagctatgacgacccatgcacgcgtacgtaagcttggatcctctatagcggccgcccttttttttttcaacatggtaacaacaccttattgatttgttgaagctaaactttatttagtacaatatcaagattacaacacaaggtcgctaatgatgaccagtaacttcatatctaccaagaaacaaaggaacaaagaaataatccagaaacgatccacacagcatttactgttcttgtcttgagtgctaaacgtttcttctttttgtttttttactttggtatttgctttctcagagccgcggagacagcttctgtgtagcttcacggtaatcataaactcctactcctcgttttcttcctaatctcccagcatcaacgtattgaacaagaagagggcaaggtgcgtactttgagtccccaagtccctcgtgcaacactttcattacggacaagcacacgtctagaccgattaagtccgccaactccaaaggacccatcgggtggtttgtgccgtggttcattccgctgtcaatgtcttcctttgtagctacccctgtgtaaagtgtgtggaacgcttcattgatcataggcatgaggatccggttacttacaaatccgctagtcttgtgagcaaactggtgcttgccaaacctgtcaaccagacctttggaacaagaaacgtttcttctgagg

SEQ ID NO: 132995 - DNA, 548 bp, Arabidopsis thaliana
gccacgcccccccccgaggtcggagggaatcgatagcctggttatcgattccggggccggcgatggttaagcatttcattgctctgggattttcaaataaacatggcagacaaaactgaagtcaggaacccaaattgccttatcgaaaggaccatgtgacacttctcttcatgtaatgacagtgggcttctccctccctgggaagtccttcagcttggatacagacaatgcaagatcgattaaaggtttaagagctatttgtgcatccacatcatgttttgaaacgtctggctcaaattgttcaatgtatattcgcactgtagctccagctgagccagttccggataaacgaaatatgattctggatccatccgtgaccacaaaccgaacaccttgcttggatgcaacacttccatcaacagggtctgtgtatgagaagtcatctgcaaactggaggacatagtttccataaacgtcaccggccttgctcttggacaagatttctctaagatactcgatcattttatgggctccttcagattcacatt

SEQ ID NO: 132996 - DNA, 822 bp, Arabidopsis thaliana
  unsure (1)..(822): unsure at all n locations
tnnnnnnnnnnnnnnnnnnnnnnnnnnnnnnnnnnnnnnnnnnnnnnnnnnnnnnnnnnnnnnnnnnnnnnnnnnncttttttttttttttttgattcaaacctgatagtaaattagtaagaaataaaacaaaaagatagaaacaaatacagtaatttgaagtctcaagacgaaagtagaaataaaacaatttggtttatcaatcgatttttgttgcgagtttttgttgcctctcttgctcaacttggacaagcaaagttaagagcgcttcacaaacttgagcagcatcagcttctaaaggaacctcgttcaaggaagagtacaccatccaggcatggtctagtttacgtttgggtctaacaaccacagaaccaggaacctctgcgtcacagcaagtcactagcccgtcactcttttcaccgtatctgacttgaagtagctgagcgcaagcagccattgcagcaccaagtggcattaccactggcagttttgcggcttggtttgtcagaggaagttcagcgtgtgctaagcgtgtgataaaggggatagaaccgctgggctaatgctagcttctgtgcggaatgaaaccgtggggagttctcggggaagcggatgattcttcaagaattcttttcttctcttgtatggtaatcttccaatgcttgaatgtcaccctttatgactttgagttagaatctccatcatctttctcaaattgacgtaatcacctagttgtccttcacggaggatatctgtagctattgggcttccaccatatggactctgcgccagtaccaacccagcgaccttatcctttagttc

SEQ ID NO: 132997 - DNA, 748 bp, Arabidopsis thaliana
  unsure (1)..(748): unsure at all n locations
gattgagctgnnnnnnnnnnnnnnnnnnnnnnnnnnnnnnnnnnnnnnnnnnnnnnnnnnnnnnnnnnnnnnnnnnnctttttttttttttttttagagaatagaaagctgtatattttggtctcattgtatcagatacaggagttagcttcaaagaacacagcctaagagtcaaacaatttatctatcaaatcgtggaaacgtcatgctctcaaaaacttttaaggagttaaaaccctgtttttcaatcttcttccaagttactaggactactttccttgaagcttttagacaaccatatcgcggtttctcttggcgatacctttcccggaccaaatggttttagtaacacgttcagctcatcgtacctctcgtctataagtaatcttgcactgaattcaagtagtccttcaagtgcctcagctcgttgtcgatatgagctagggtcgaatctttgtcttcttgatgcacctgaggaagctctacttgatgctccagcagttgcattttgatcagacaaatcacttttggtttctcggtctgggtcagggtgaatttgtcttttgtattgagcaagctagtggtggctctggaggcgggctggatgatcctctggacgatcctttcttcttgcgaacaacggggatgaaaggctttcttcatatgaagctaccgggaacttgatcctgcgattcttggcgagttactggaccatcggagaaattagctgggggagataccgatgtta

SEQ ID NO: 132998 - DNA, 892 bp, Arabidopsis thaliana
  unsure (1)..(892): unsure at all n locations
ggcnnnnnnnnnnnnnnnnnnnnnnnnnnnnnnnnnnnnnnnnnnnnnnnnnnnnnnnnnnnnnnnnnnnnncttttttttttttttttaaaccaattctgcatatgcatttatgtcactcctgcctcaaacaatagagagatttgtttttacagaaacagagtaataaataatgaacacatacaataatctcagtggaaccaaaagaaaactattttacaaaaacctcattcatgtcaagaagctttctctgtaatgttatttacattccctgaattccaccaatacgtcctttgatttccaatcttattaccattattatcattaccgacatctcttctctctgactgaacttcttgttgctcggttgatccagggttctctgtcaaacattgttcccaaaagtcatcgttaacgcctgtttttggagcaggcgcagtaacggtaacgggcggctctgagttcatatcaatcttcgatgatttgggtcgtgtatcgccaatacttagacttgactcagctgcatcatgatccatgcttgatgactgcaacccgctcttctcgcatgattccgatacaagattctcccaaaacgttagcgaagattctaacttttcgacctgttctatgtgtgaactgcttggaggaagagagttctctagaaatcttctttttcttctctcatggttttcgaggttagtgaaagccctggttttccaaaacctgtgaacatatgccatattgtttctgatgtggtccatatgtggaaccgactttaatgtcgtacttgagctaaatttttccgtcttgctttggtttggtaactccgcaagaaggccttctttctnatttttcagtctttctatntgatcctccatgctccgtctttctg

SEQ ID NO: 132999 - DNA, 668 bp, Arabidopsis thaliana
  unsure (1)..(668): unsure at all n locations
nnnnnnnnnnnnnnnnnnnnnnnnnnnnnnnnnnnnnnnnnnnnnnnnnnnnnnnnnnnnnnnnnnnnnnnnnnnnnnnnnnnnnnnnnnnnnnnnnnnnnnnnnagacaacgatttttttcccaccaaagtccccaaatacactcgtttgcgtttaaacctttcacttgaaactctgttttagactcttttatttgttagacttttttgtttgtttcgtcgttgttgtcggccgcccaaaccaccatgcgattcgtcgcgccaccgcctcgttccggcgataactcaccgtcaccttcaccatcttccggtatatccgaagagattctctcccgttcttcggatcctcctttagagtttagtcctccattgatcgccatggtggtggttctagccgccgcttttctattcgtaacttactctcgtctcatctcccgccgttttctttcacctctattccgtcgttttagaaggtggcgatgccgtcgacgccgtctccttcacttatcttcagcttcctctgcttcaacttcatcctccgatctccgatcattttcacctttccctttcgactcttttcattactcttcttactcaccttacggattagacgattccgttatcaaaactttaccgctgtttctctactccgccgctgcttgcaccgg

SEQ ID NO: 133000 - DNA, 692 bp, Arabidopsis thaliana
  unsure (1)..(692): unsure at all n locations
nnnnnnnnnnnnnnnnnnnnnnnnnnnnnnnnnnnnnnnnnnnnnnnnnnnnnnnnnnnnnnnnnnnnnnnnnnnnnnnnnctttttttgggtttttataccaaaaaatatacagagaaggggttattgttttacaagtttacaacatctacaaagatttcactacatcctgaaaccaaacccttcgtcctaatttcacaaaccagaccagacaacgacaataataacaaacaatcaaatgtcgtagtgtctttgtttcgtgaatagtagtagtattatcaaagaatcagactttgaagggaaaatgttaaaacatgtgatagatatatatatataagatagatatgagcacattactcatgtttttgggctgagaaatagtgggttttgttgattttccgttagctatcctcaatgttttttatgtcgttatcatcagttgcagcggctgttttacgcacaaattggcctcgcactcgagggcgttgttctgctagttttttccggctttggtatcgtaccttctttcggaagcacctctcttttctcttctgacggaactttgtcaaagcagcttccctttgagagatcttattttcatccgccaagtttccgctaccacttccacttccgcttccactaccatcgccatttccatttttgccagcaccattatcacttcccatattcat

SEQ ID NO: 133001 - DNA, 723 bp, Arabidopsis thaliana
  unsure (1)..(723): unsure at all n locations
nnnnnnnnnnnnnnnnnnnnnnnnnnnnnnnnnnnnnnnggggannnnnnnnnnnnnnnnnnnnnnnnnnctttttttttttttttttttggcaaaaataacattcaaaaattgaattataaactcacaaacaaaatgctattatcacaaaatacaacattacaagcacaatgcaaaaagatttccaaagaccctcaatacatatgtagaacaaaaccctaacacacatcagacaacaaaagagattaacatttgttttgaaataaaccaaagataaacatacaaaatgaggatttgaacaaaaccaaagatgcaataattaatatcatcagttcttgcctttacccttatggtctgatgagtttctgcatccattttcatagtaaagctgaaactggtgattgtggtggtgattctctgcaggcagtgcaccgaataagaactgtggacctcctccactttctgatgttggaaacctctgtagattagcgaggaatgactgatgctgatttgttgaattggactgaagggtccccctgttgaaaccactgaacccaccaccggatgcggcggagacggcagctccggcgccggagggtgtcgacatattaaaatcaagattgaatgctccgccgttggattctgccggggatatcaaatggtcgggaacgaatgaaaactcttggtgctgatgatgaggatgatgatgatccgagattgatg

SEQ ID NO: 133002 - DNA, 554 bp, Arabidopsis thaliana
  unsure (1)..(554): unsure at all n locations
nnnnnnnnnnnnnnnnnnnnnnnnnnnnnnnnnnnnnnnnnnnnnnnnnnnnnnnaaaggcaaggcagctcttttttcgttttttataacaacttggggttttacatttgattcttcgatctacaaatagaattcaaaagacgggtatgtttgataaattggaaaattcggaaaaccgaagacagcgatcaaacgaaaggtaaaaactagggtataatggttactggctcaaccagctttagaagttcttactacttttggcagctcaacagaatcaagggcaccagggtaaggggtccagagcccaaagccgcctcggctttccttcaaactctctcccttccctttgagttcctgaagactcttgacccactcaatcttcgaggaatgctctcgaatgtgagggtgcagttcgaagagagagttatactcacagttctggaacatgaacaccttgaaggctccttttagtctgtccactacatacccaaagcttagctggtccctcggtgttaacaggtgtacctcattgaaccacaggcagctgaacagat

SEQ ID NO: 133003 - DNA, 603 bp, Arabidopsis thaliana
  unsure (1)..(603): unsure at all n locations
nnnnnnnnnnnnnnnnnnnnnnnnnnnnnnnnnnnnnnnnnnnnnnnnnnnnnnnnnnnnnnnnnnnnnnctttttttgtgtttttttttttggacattcagtaaattaacccgaaagaataagtcatgaacatttaaaagaataagtgaggaacacttcaaaaagaatatatggcttccgttggtgtgtgtgtattgtagagacaaaaaagaatcactcagagactggcaataagaagctaaatccagaattctcccggattaaaggtggcggttcgatatccgctatttcaaatttctccatcgactttgataaatcatcaaccgagaaagggatgctcgagtcgtcatccaaaaggaatgagttgctaacagcattgttcgaatcttctgtcattagcaccctcatatttgctattacgtctggagagacgctatgggtgccgtatttgtcgtcccagtacatggtactgattctgtataactgttgtatgcttagtaccgggcaaagatcatgactgatctcatcaagagttttcttgggtttttgatgtacaaccagaaacccaatggcctgtctaatatgcttaagctcatcccacg

SEQ ID NO: 133004 - DNA, 787 bp, Arabidopsis thaliana
  unsure (1)..(787): unsure at all n locations
nnnnnnnnnnnnnnnnnnnnnnnnnnnnnnnnnnnnnnnnnnnnnnntaggacannnnnnnnnnnnnnnnnnnnnnnnnnnnnnnnnnnnnnnnnnnnnnnnnnnnnnnnnnnnnnnnnctttttttttttttttttttttcaagagatcaaagaagcatatatttcattagagaaaacaaagatacatataacattgcaacaagagaaacatatagtataaagccgtaaactctcttcaacgaaagcgagagagtgtgactccattccctcaaaacctaactttggctaaaatatttttcttggaagaaaagttattgaaactgaacaaacacaaaccacgtagaaaaatcccggaatatagaaataatatcttcaagctcttcacttggcactaccgagctgggagcggataagcttagccgcgtcaaccatggctttaagtgctggtttaacctcagtgtacttccttgtcttcagaccacagtcagggttaacccacaagatgttctgctcaagaaccgcaagcatcttgttgatcctgtctgcaatttcatctgtggatggtattctcggagagtgaatgtcgtaaacaccaggaccgattcctgcaccgtacttcactccttcacggaacactgagagaagcttctcgtctgaacgagagttctcaatggtgatgacatcagcgtccatgtcaatgattgagtggatgattgcgttgaagtttgagtaacacatgtgagtgtgaatctgagggctgtcttggacgcacagttggtgattct

SEQ ID NO: 133005 - DNA, 773 bp, Arabidopsis thaliana
  unsure (1)..(773): unsure at all n locations
nnnnnnnnnnnnnnnnnnnnnnnnnnnnnnnnnnnnnnnnnnnnnnnnnnnnnnnnnnnnnnnnnnnnnnnncttttttttgttttttttttagtggaaaaaagttttctattaaaaattgttaactatttacactcttcaaagaaaaagtctcagcttaatgcaaaaacaaatagcggattatgtggaagaaagaggatgacggtatgggatgttccagaaacaaacgaaattttttggctttgttcaagccaaaatgtatagtaaggtaacctaaataaagactcttcaaaatcttaatatctcagagactatacaaaaaaaaaatctatcaacgggcttcttcacattgttgtgcgaaacagagggtaaaacccgaaaaaaggaaagaaaaaaagagagtaacaagtgagtgaaacctcttggtgttttcaggatgaggttgagcagtccggggggattgtttcggacttgatcacccgggtattgtaagaaccacagctaccacatttatggtacaaccaatggaaccgtgtagttcctttgcgttcacaatcattacatagaatgtcctgacagcgatttttgtattcctctggaagttcttctgcagctaacagggcatcaagcataccaaaataaacagccatatctcctaatgattttccacagattgggcatgggtagtgactgccaagtgtaagcctggaagcaactgagtgcatttaagngccccatggnaagggcccaaacgggtncnccngnggngaaaa

SEQ ID NO: 133006 - DNA, 519 bp, Arabidopsis thaliana
acttgatcacccgggtattgtaagaaccacagctaccacatttatggtacaaccaatggaaccgtgtagttcctttgcgttcacaatcattacatagaatgtcctgacagcgatttttgtattcctctggaagttcttctgcttccttaggtaacttttgctgagccgcaatccatcgactggtcctccaattctgtacgagataatcttttctcctcggatcaagtgtggagtcctgatagaccttcctgatctcagcctctagtttcattctgggtcatgcggaaaatatcccccccccctggcttaaatagttccccactttggtccaagatttcttgaatgatcattatctttctgtgcactaggtttggatgtttctgttgaggatgagtcgggtgatcctttccagcattcattaagccattcatcgtgcacgcgtggctccacccgggaattccggcccggtacctgcaggcgtaccagctttccatatagtaaagtcgtattagagctccc

SEQ ID NO: 133007 - DNA, 616 bp, Arabidopsis thaliana
  unsure (1)..(616): unsure at all n locations
nnnnnnnnnnnnnnnnnnnnnnnnnnnnnnnnnnnnnnnnnnnnnnnnnnnnnnnnnnnnnnnnnnnggtgaactatactaagagctatgacgtcgcatgcacgcgtacgtaagcttggatcctctagagcggccacacaaatcacattcatttcatgttttttcaaatatatatgaaaaagccaattcaaaaggagaatggcttttttcttggttatgtttttcagattcagacattaacaataagagggggctctgaatctccaacggttaaaaaatactttcctttttcaagaaccattactccaaattcattagctctgctcaaatgctcacaaagaccaatctcaaactccatctctgctttctctccattgcttaacacaatgctcttaaacccaacaagctgtttctctgctcgtttaccggcttctcctcctcgctcgtgcctcgcaaacatcagcaccggatgtttccctgccatctccccttgattttccacctctacagtgaccttagtcttggctacatcgcaaccttctttccccatttccgaaaccagagtgtatcgaacagagtccgagttggtttgagctttagattggttcaagtagag

SEQ ID NO: 133008 - DNA, 553 bp, Arabidopsis thaliana
  unsure (1)..(553): unsure at all n locations
ggannnnnnnnnnnnnnnnnnnnnnnnnnnnnnnnnnnnnnnnnnnnnnnnnnnnnnnnnnnnnnnnnctttttttgtttttttggctcaaaattggaagttttcacttctgaagcaaaagtagtataaatagttagttattaattaggagttgaaattagagatagagttgaataagctcatcgctaactacagagggagagagaacaccaaggtcagtgaagaggagtgttaggtactgaggcggagtatagtctcgagctgacctctctacttccacctttgtcggaatctttacaccaaattcgattggtctcaacgccggtgccatgtccttttggtctaatgggtaaagcctagcgaacttgtaactctcagcagcaacatagaccggtttgttcatgctgtgtgccacaagtgcgatttggtatgttcccatcatgttgataataccgccactttctacaactccatccgccccgacaaacaccatgtctacctcgtccatactatacgccacagctgaatcaagcagtagtttcactgggatatc

SEQ ID NO: 133009 - DNA, 1072 bp, Arabidopsis thaliana
  unsure (1)..(1072): unsure at all n locations
gattttacatgtagaagcacagaagaaactgaggcatggtttatcgactcctttgaggaatggcgtaaagcccagaatctcagtaactttattctattaggacattcttttggaggctatgttgctgctaaatacgcgcttaagcatcctgaacatgttcaacacttaattctggtgggatctgctgggttctcagcagaagcagatgccaaatcagaatggctcactaaatttagagcaacatggaaaggtgcagtcctaaatcatttatgggggtcaaatttcactcctcagaagctgggttagagggtttaggtccttggggtccaggtcttgtaaatcggtatacaactgcaagatttggtgcacattcggagggaactgggctaacagaagaggaagccaaattgctaaccgattatgtgtaccatactttggctgcaaaggctagtggagagttatgcttgaaatacatcttctcatttggagcatttgctaggaagcccctcttacaaagtgcatcagagtggaaagtgccaacaacgtttatctatggaatgaatgattggatgaactatcaaggtgcggtggaagcgaggaaatccatgaaggtcccttgcgaaatcattcgggttccacagggtggtcattttgtgttcatagacaacccaattggttttcattctgcagtgctttatgcttgccgcaagtttatatctcaagactcctctcatgatcaacaactcctagatggtctacgattggtttagtcatagtatcttgttccttttaccttccaaatttattctatatgtgtatacaagtatatatgaaaaagaacataaaaaagaattactttctttatttgaatattcggttgtgtattggagtttcaagtcctctttccatgtctaaaagttctatttgtaacgttcttgatttcactctaaaacctcttaaagtgtttcaaatgtgatctcattataaacaaaaaaaaaaaaaaagnnnnnnnnnnnnnnnnnnnnnnnnnnnnnnnnnnnnnnnnnnnnnnnnnnnnnnnnnnnnnnnnnnn

SEQ ID NO: 133010 - DNA, 516 bp, Arabidopsis thaliana
  unsure (1)..(516): unsure at all n locations
nnnnnnnnnnnnnnnnnnnnnnnnnnnnnnnnnnnnnnnnnnnnnnnnnnnnnnnnnnnnnnnnnnnnnnnnnnnnnnnnnnnnnnnnnnnnnnnnnattggaagaaagaatagagccaaaagtaagtaataaaagaatttctccaatacaaaatttagtcataaaaactcaccgaaaaggtttacatgaacggaaaagtttatagaagtgaaagaaaacacaagtaatttggatccattaatggtggcataaacaatatatatagaaggaaaaaaaaactgatattatgtgattgttttatattaagatgttacggtcataagacaaaatgggtaaaaattatcgtcattagacgacctgaatccattctccagtgctgggaacacctttgtagatggcaaagataagatagtaacccggtggagcgatgtttccatttggtggtgcaacggcctggatatcgtaaccggcaccagcaggtttgacattattgacacccaagatgagcatcctca

SEQ ID NO: 133011 - DNA, 498 bp, Arabidopsis thaliana
  unsure (1)..(498): unsure at all n locations
aatgnnnnnnnggannnnnnnnnnnnnnnnnnnnnnnnnnnnnnnnnnnnnnnnnnnnnnnnnnnnnnnnnnnnnnnncctttgtttttttttttttttttaataaaagaatttctccaatacaaaatttagtcataaaaactcaccgaaaaggtttacatgaacggaaaagtttatagaagtgaaagaaaacacaagtaatttggatccattaatggtggcataaacaatatatatagaaggaagggaaaactgattttatgtgattgttttatattaagatgttacggtcataagacaaaatgggtaaaaattatcgtcattagacgacctgaatccattctccagtgctgggaacacctttgtagatggcaaagataagatagtaacccggtggagcgatgtttccatttggtggggcaacggcctggatatccgaaccggcaccagcgggtttgacatttttgacccccaagatgagcatcctcatgttcattg

SEQ ID NO: 133012 - DNA, 578 bp, Arabidopsis thaliana
  unsure (1)..(578): unsure at all n locations
nnnnnnnnnnnnnnnnnnnnnnnnnnnnnnnnnnnnnnnnnnnnnnnnnnnnnnnnnnnnnnnnnnnnnnnncttttttttttttttttgaagaaagatctggatatatggatatgcctgtaattcactacaaaaatggcacttactaaaagaaacaacaagagagacactagttcacagttagtaacctcctcactagctctaaagccataataaagctgacaaatcctccaactgatagaaaacattacatttagaaagaaaaagaaaacaagttctatagagaaaaggaaaaatgttacaacagacacgtaagacaacaaaagggagaaaagctactgagccactgtagaagcagtagctcctgattcatgtgaagacttatattccaacatctcaattctgtatctctccacatccttaactcctttgtcttgataaacctgtttctcagattcagtgagattgctccacatgtgtcctatttccttagtgatggatcgtcctggtccatgggactcaggtttagctcgcgtactgctcagcaaaaagnagttgagcnccctgggattggggta

SEQ ID NO: 133013 - DNA, 600 bp, Arabidopsis thaliana
  unsure (1)..(600): unsure at all n locations
aannnnnnnnnnnnnnnnnnnnnnnnnnnntgannnnnnnnnnnnnctaagaaatttaatatatttgattagtaattttatattttaagtacatttaataaaagtaaaattccataaactttactaaaaattattacatataatataccatcattaaacattttaacataacttcacatatggtaacgaggcaaatgcagattttatttctagcattttttgtattattcgctttatagataaaagattctacagaggttgtggccttgactgaacaatgtaaacatcttcaccaaccaaacaaccttcaacgtcttgagcacagccaaagtttctttccaagaagaaaccaaccgaaccgagtctctgaccgagctgctgtctaaacaccgagtcaacagttaaacgttttttgctatagtccacggtcaaccgaacgtattttccatcagcaggacctgttcctgacacaagaagctcttcgctgaagtttgcgaaagctaaggtttgtacaatcccgtcgagcttacccgaagcgagtctccatggtgttcctcttgttcctgaagctaaagtctcacctaaaccaggagcgatctc

SEQ ID NO: 133014 - DNA, 545 bp, Arabidopsis thaliana
  unsure (1)..(545): unsure at all n locations
nnnnnnnnnnnnnnnnnnnnnnnnnnnnnnnnnnnnnnnnnnnnnnnnnnnnnnnnnnnnnnnnnnnnnnctttttttttttttttttttgcaatcaatcattttccttcaaaaggtgggtgaatgagacaagaatgaccaatgtttgtcttttatctgcacgacaaagcagaagaataatgcctacttaacctcaaaaatttaattgggtgtatcttgtacttaaatatgggggtggagcctcagaatgcctagcgtgtagataggcatcagcaacaccatcttggtcgttgctcacaccaatcacatcagccaccgcctttgtttttttctgcaccgttgctcagagcaactcccaacgaggccagttgcagcatctctatgtcattttctccatctccaatcgccattatctcatccggtgaaacgcccaaatgattgagtagcatttttacaccattccctttggaggttccgggtgggacgatttctagcatgtctgattgagcttgaacaacattagcacggtctcctgtagcttctga

SEQ ID NO: 133015 - DNA, 881 bp, Arabidopsis thaliana
  unsure (1)..(881): unsure at all n locations
nnctatacaagactatgacgtcgcatcgcacgcgtacgtaagcttggatcctctagagcggccgccctttttttttttttttaaaaccaaataaagcaaaagaacttgtaaatcatatcaatatcaccattaaacaccaccaccaattttaaatatgggtaggcttcagatatctgactataataatatagagcatatgagcgtatattaataatacaaggcaaaaacaaaacatataagccaaaaggatttacggaccgaagacttttttccccaggctacttaggtacccgtttctttgcataaccatttacctgtttgctgcgttaagcgagccagaaaggcgtgtatctttcaagcacccggaagtcaccagatgtttgtttggagccgtgaacagcatggaaccaagccggtgaatttgcaaaagagtttataaacccgttgcatccaagttttgtctttctcaccctcagccattgtaaggatgttttgggttttgtgagctctggttaggttgagattgctgtgggcctgaaaggttagtggctgtgtgttgtagtgtgcgaatggctgcgagtagagcgaatttgggagaccctgagactgaagatttggattgtcacaccataaggattctgctgtaatcatcctgggatgagtcgataaagccagcttgggtgaaaagaccttgacctccatgtgccatatactcctgagacatgaaatcattaattccgctgaaacgagaataaccgccttgagaaattctgatcataaagattccaggaaacgccccatgtgctccttgtgtggcataatcaacagcaaatccacccggtgaggcctgtgtagcaaagtcggccatgttgtaaggatca

SEQ ID NO: 133016 - DNA, 875 bp, Arabidopsis thaliana
  unsure (1)..(875): unsure at all n locations
nnnnnnnnnnnnnnnnnnnnnnnnnnnnnnnnnnnnnnnnnnnnnnnnnnnnnnnnnnnnnnnnnnngtggagcttttttttttttttttcttataaaaactgaattatgtctctccattaaaccccaatctcagaacacaaaacgaaaacaaaaataactctaaagaagaaacaacacatttttcgaatttttaaaacttgcttaccataaaattctggattttatttatccagtctaaaatctacaggctgatcatagtagcctgcttagggatttgatgagtagtttaaggttttttcttgtggcttcatctcctgtgaatcccagaatatctgagcttatactctcgacgttcttcaaagtataaaccagagtgtagattgacttctgtatgagttctgtattctcaggagtcataattgacgaattaacctttctcaaatcgtcagaagcttgggtaaggcttcgagtaagacactcaacttccttgagcaagccgctatcacgaaactcagagagcaaaggttgagcatcttcagccatggcttggaatcttttgagcaatggccttgcttcctcaataaccgaagcagctctctcagcaagcgaatacgtattggcaacaccaatggcctcaacttcgcgtccaatacgagtgaaaattccaactaattcatctaaactaactccttgcactccttttattgtctgcctatcacaaacgatcagaccttccttaccacatttaggatgcagaggtcctactgaaggttctggtatcggattcctaggcataatgtcgatcatagtttccattagaagaccagactgattcacctcaacaatgaattcctcgggataatatcttataat

SEQ ID NO: 133017 - DNA, 745 bp, Arabidopsis thaliana
  unsure (1)..(745): unsure at all n locations
nnnnnnnnnnnnnnnnnnnnnnnnnnnnnnnnnnnnnnnnnnnnnnnnnnnnnnnnnnnnnnnnnnnnnnnnnnnnnnnnnggccgcccttttttttttttttttacattgtaatttgacaatttgtataaccagaacccaaaaatccttggatataaactacatacctatacaagcttcttttctctttacctccaagactttcaaaaagagatataagtcttgagatggggaaaacaaagtacaactttacatcaactaaaggtaataaagacatgactcaacactggtaaactgagaagctcttacttttccatagaaagctgaatgctcttcccattttctttctcgaggctgatttacactgcggttttgtctctgttacagcggctgaagcaacagagaatccgtcctcggggcttgtgacttctgtatgctgcggttctgtgagatgggtttgatccctttgcctcagttccctgaatagtgtcagtagcttctgtgccctttctcttccacgttgagtaccgtttacggagatagatcccaaggggggtctccccccttcttgtaaaaccatctcgctacagatctcactgtgattgcataatatcagaagcaaagaaacagcttggtcttgctcatttggttcacccgtgtcatgaatggtgcagagattgctcacaaggctaggtgctgaaaccatctgtcttttcctggcctcgtcataccaattaagtagaca

SEQ ID NO: 133018 - DNA, 845 bp, Arabidopsis thaliana
  unsure (1)..(845): unsure at all n locations
ttaggagcactatagaagagtctatgacgtcgcctgcacgcgtacgtaagcttggatcctctagagcggccgccctttttttttttttttttgattctaaacaatattattatcatcttagagatttttagatgaagttatacagagagtaaataggtttaaacatttttctttcttttactctacgatacctaaataacaattttgttttaacagtttttgtcgcttgagtttctgttgatggacaagagcttgctaaacatcttcttaggacggccagggattgcacaaaaagccttaaaccgagacggagttcttcctccgtccccattcatgaacctttcgtctacctcttcatcttcagctagcttgcttctcagtgtacctgatagctttgatttaggtgatttgagacccgagacgctccatcgatcttctggtgcagcgatacttgttgtcgtgctgaaagcggctgcatttggattagaagggtcgatgttgtgtgctgctaggagtgctttgatgttgctaggaagttcagtcgtgttcttttcaccgttgttcgtagctgcagcggctcgtgcttgctcgtaaaagaggacttggaccactactctaagcggaagcatctcgttttgcgctgcgtgcatacactgcttcattgatagtttcttgcagccaatactctacaaactctcttcctttctgatttattcaaattcttatgagccttgagatatatgtcaatggctctatagagatcatcatgatcaagtcttgaanattcagggacactttcacgtaaagaacanactttgagagcggaaattcacatctctagcatc

SEQ ID NO: 133019 - DNA, 799 bp, Arabidopsis thaliana
  unsure (1)..(799): unsure at all n locations
nnnnnnnnnnactatagaagagttatgacgtcgcctgcacgcgtacgtaagcttggatcctctagagcggccgcccttttttttttttttttttttttttttttttttttcctctcctacagggtttttatagatgacatggtaaattttatagatttaagacaaatggtaattctcagggtcctcttgagtggatcaaaactcggaaaactgaagatatggagattaaatgcttctcaatgcaaggtcagtatcttgcatcatgatctctatccagaaaagagcttcaattatcagtatataaggctctcccttagcttcatgtccttgttgggggagcggaagaatcagatttctccgccaaatagtgctcaagcatgtcttcttcgtcatcttcaaagtcttcgtcttcaaagtcgatgtcttcctcatcttcctcctcatcttcctcatcagcaatgaccaccgttcctctccctctcccactttcgaaccactgtcttcctgtaagcttcttctccttaggcgctgaaagagcagactccggcatcaacttggctcgctcaaggcaagctctgcctatatctctctctcacgccaaaatgcctagcgaacaggttctcatgaggacaatacctatccttttggcgttctactcgaaattagctgatatcttgcctagtgtcaacaccagtctttctgatagacaggttagacatgccatcctaatttcaatgcctctgtcagctntcttcagatgggaggcctacatgattctcgatctttaactcaaagcgag

SEQ ID NO: 133020 - DNA, 818 bp, Arabidopsis thaliana
  unsure (1)..(818): unsure at all n locations
attatnnnnnnnnnnnnnnnnnnnnnnnnnnnnnnnnnnnnnnnnnnnnnnnnnnnnnnnnnnnnnnnnnnnnnnnnnnnncttttttttttttttttagttcatcaacagtgcgcaagtaagcatttcaaaaggatactgtaatgttccggttacaacttctaacccaatatacacatcaaaaccacctaccggtcaatattaaaccgaatttctataaaaaaaaacaccggttttctatggtgtttaacagtgatccattgaagcacatttgatggtttttaaggttccaccaagttccattggaaccaaaggtataagagaatgcaagacgtctgtaatcaacggtctataactcggttctggctgcacgcacaaaatcgccactggcgctacctggtaaaggtgtttcaagtccatcgtatctttaatcgcaggatctatgacgcttggtaacttggttctatcagtgagataaggcattgcccaagtgatgatggattggcattcaccgggagctagtttctccacaggttttttcccgagtaaaagctctaataacactactccaaaagcatacacgtcgctcttttctgtaattgggcgttgagaaatactctggtgcaacgagccactgtcccggaaagttatggttcttgttctttgggccatcaacaacagctagaccaaaatctgaaatcttagcatggaaattgctatctaataagatgttggatgatttcaagtccctgtgaatgattgctggatgacaaatgtcatgcaaatattctaatccccttgtacataagagcatctta

SEQ ID NO: 133021 - DNA, 741 bp, Arabidopsis thaliana
  unsure (1)..(741): unsure at all n locations
cactatagattgagctatgacgtccgcatgcacgcgtacgtaagcttggatcctctagagcggccgcgctttttttttttttttttttttcataggaaaaaggattttgattagcttaatctgttctgacttcgtataagattttccacagatacaaatattgttgatcccttgctaacatgtttcatcttgaaactttgattctctgagactcaagagtcaagattcgtcttcgcaggcctctgcggctgaaatctctgaatcaagtttgctcatcagagtctctgtcacatgcttggcaacagagatcatgtcaaggatgacgcttgggtctaagccagaacccgcttcgtttggttaacccacatatatggcctgtccgattcacagatatagatacagctgagcttatctgagactcctcttctggtgttcatcaactatgaaatgcgttcnccactttggtaacgtactatgaccggacactggaagtgtcaattgaaaatattctcgtcgctagtgcaatctctggtgctcatcatctgctacttagctagaacatgacttttgaatggccgtgtggttaaagcagccttatgggcgccccaggcatccaatagattcccatccgactatgacaaacctcaatttaaggtccacccgactctcctttttgataaagcgaaataattattcagctctggtcatttgccaccaaagctttttgaaagccaagcagct

SEQ ID NO: 133022 - DNA, 624 bp, Arabidopsis thaliana
atttaggcgacctatagagtagcttgacgtcgcatgcacgcgtacgtaagcttggatcctctagagcggccgcgctttttttttttttttgtgaaaacaaatgacatgaatcacttgattcgatagcaaacacaaaagcaggactaatctctctcacacacacaatgtctcaacttaaacagagaaaactagtcaatgtcccaaaatgaaaatatagtagagtactagctaaaagagaggtagagagatcattcattcaatagggtttcttttgttgttgatggtgggcatgtcgtcaggaggtatgacagcaatcctgagaccaccaaattctgcatcccaagcgatgggggttgttcgaaattaaagcgggaaaaaggactttggacgcttccgaggtaggtccgaccgctctcatcgggttcatacacgtccttgatctcagctttgaatctgatttccttttcataagcatacacttccacatcatccggactaacacctggcttgtccactgcaaagtgagcccctcctcccgcttttgtcaccccaattagtgctcccttgcgaccagacaccaaacacggatgatcctccaagcgtattccggatggaccttaataa

SEQ ID NO: 133023 - DNA, 709 bp, Arabidopsis thaliana
  unsure (1)..(709): unsure at all n locations
cgatttatnnnnnnnnnnnnnnnnnnnnnnnnnnnnnnnnnnnnnnnnnnnnnnnnnnnnnnnnnnnnnnnnnnnnnnnnnnnncttttttttttttttttttaacatagaaccatacattcattatagaggaaaataaaccctattatttcggataaacaaaagtaatcacaaatttcattccaaaatggatttttaaaattaataaataccaaagacaaaacaaaaaatcacgaattgtatgaaccttgatacccacctcaatgatcagaattacttaattagtcctattccaaaatccaaattcatattatgaactgcattatcatcataatcgtaactctctcaatctcaaagcccatcatcaaccatcaccacacgtgtgaaaccatctcaagtaaaaatcgaacttgcgaattccttatgaaaaaataaaaacaaccctttacgttggccgccacgcactagcccaaaccaccggctgatctctccaacaaaggaatattccggcggcatcaggacactgtaccattgaccaaacaccttctttatattctcctaacaaaagctctgacatcatccgccacctcatcacttataccccaccgttccaaacccactattcctcatcctcctcgaccacttcctcgctgtctctcgcctctccgtggaatccgacggcttacaagccacaagatcaacgatcgca

SEQ ID NO: 133024 - DNA, 687 bp, Arabidopsis thaliana
  unsure (1)..(687): unsure at all n locations
cactatagactagctatgacgacgcatgcacgcgtacgtaagcttggatcctctagagcggccgccctttttttttttttttttcatgtgcaaatgctcataccattgatccggattccataataagaacagaatgcaacacaatacatatcaaatcaaaaagtaactgcactaaataaattgtcttgcgagccaagactttcaagcgggttgagaagtcattagttcgtaccacccccttgtttttttcttatctctgtagaggatatatccatccggaatatatctgctggaattgaaataaacatgtcgattatttcctctggaatatcaacatcttcaagaaccttaaatacaccatctacattgcggccaccaacaaggaaagtgcaacctgtccgtttgcaatcaccaagtatctccaacatccttttgatgcttccttcatagtactttggattgacaagcctcgttgcagggtcagcgcccaatttcaaaaactgcttcctggggagaggtcaggtttcttgtaggaggattggctgttttgaaactattatcggtttccaacttctttaaattgcttncacggnctttaacttgncaattnnaangggggggttccgggatttttcggggnttnaaaacatgggngnggcccnaaaattntggnctttncagtttngc

SEQ ID NO: 133025 - DNA, 829 bp, Arabidopsis thaliana
  unsure (1)..(829): unsure at all n locations
nnnnnnnnnnnnnnnnnnnnnnnnnnnnnnnnnnnnnnnnnnnnnnnnnnnnnnnnnnnnnnnnnnnnctttttttttttttttttaatccaatgaaattgatatacaatataaatgtaagttataaatattacattaaattatcataatatatatatgtgagaatacttcaacgcacaataagagaaatggaggagaagagactgacataatatagaagcatcataagaagaaattatacaaaaaaaaaaaaaaaacctcacttcgtcatctcaaacccaaatcccaatatccgttaatttaaatcgtagtatttatttgcttattttcaactattcgtagaaattagaaaaccagtgaagcccaaaagcagaatccatttgtttcaatcgaaaatggcggtaaggtgatgctccaaaaccgccataaggttacgagtctggcttacttccacaactgcaacagcacagccttgaagctgtctcactgcttctacaagctgtcctcttagcctctgagacagtaaccgaccgtccgctttcatgcactctctgtacagcggcatgtacgctattgctactcttagcggtgcaggaaggtctcttaaggatatcgctgactccccttttttcaaaactctcatgaaattcatgaaatcgtcatggctttctctcattcctttcttaaaagctgactccgaccagtgtctgggggaaacgatttaggnntgaagggacggatcggcttngangacctggngagnnggntgcactgngatnaaccggggatcccnaagaagctggttggagaaccancctgggggccccnc

SEQ ID NO: 133026 - DNA, 660 bp, Arabidopsis thaliana
ctacaaattgctgtggcaaaaacgttgtccatctgttctttaaactgatacaacaatgtgcctcaaactttgtggtaatatataataatatcaaattccatttgagcagaaactgtctactaaacgttaatctgatgaccaaacttcctctggcgtagtgctatagttggcttacgcgggtcattccgtgccacaatcttaagcggatgggcttctgtgttgaaaacccacctcgtctaatgaaataacagatgaaggcgaaaagagaagatatagatacttaagagtctcagctaagaagaagctttgcatcttgttgtctttagcacctgtattgacatccttcaagcctacatatccagattctacgcgagagttcttctcaaatgcttgaaatatattccatccccactcttgatatgtcttgttcccagttaatcgccagaggtaaaacagtgattcaacggtttctggtcttaaaatgttccaagatgtgccaacactcatgtcctgccctgcagtgaagaaatagttctctccagcaagtttcgttggtgtcgattggtaaaagttataacaagtccaggcaagctctccagccagtgaaagaaactttttcggacgcgtgggtcgacccgggaattccggaccggtactgca

SEQ ID NO: 133027 - DNA, 763 bp, Arabidopsis thaliana
  unsure (1)..(763): unsure at all n locations
cactatagcttgactatgacgtcgcatgcacgcgtacgtaagcttggatcctctagagcggccgcccttttttttttttttttaagataatactcttaatttataatctaaggagtttggatacaaaacacaaggtgtaaactgtggtgaacctgtttgggttctgatcccaactagtacaacaatagtctatatcttgaaatctttccaaaaatggtttcttaaataaaagggtctttgaatagccaagctaaatccaattgctctgttaagatatatccatagagcccctcctacgaatcacactgtgacctctccagggagttttacttctttgttatccgaccataatgcctctggcgtattctaaatgccggttttcgtagcagtactttgttggattgtttgagatttacctgatcgtttcgagacttaatcttaagtggatgagcttcggtgttgaatacccactcgtctaaaggaatgactgttgtcggcgagaagagtagatagagatacttgagtgtctctgcaaggaagaaactttgcatcttgttgtccttaacgcctgtattaacatccttcaaaccaacatatccagactctatgcgcgagttcttctcaaatgcttcaaatatattccatccccactcttgatatgtcttgtttccagttaaccgncagaggtaaaacagtgattcgacagtttctggtctcaagatgttccacgacgttcccacactcatgtcactcccagagttga

SEQ ID NO: 133028 - DNA, 932 bp, Arabidopsis thaliana
gcatgcacgcgtacgtaagcttggatcctctagagcggccgccctttctttttttttttttaaaatgaaatgtaaacaagattaaaccaaaaaggaaccaatcaatgtacaaatttttttggcagctctcttctcccctatgatctacatttatttatggacaaacccaacactagacttttttctatacaaaactcaaaaaacttttcaaactgcaaaacacaaatgaacatccaaatgctatcctttccgtccagaaacaaacgggggaactaatctcaggttctcgtgttagatacatcagcttcaattgtgttaaaaaatctcccccaagaataaagcctaggaaatcctctctgactcgctctcgctctgtgcgaatgcgatgtggccaaagaatttaaagacttagcgacacatgcaaataaaagatgcccaagaagaatccaataaaagattggtccaaggggtcaatcgtggtgtttttttttcctgcacatactatcacgactaggatatatgcaatcgggtcacttgaatcgtttaaacttaaaccccttggagtctatatgggaactaatattttggaatggcccgaggaaagcttggaattgcaacttgggagttggaaagaaaccacttaacttggcttagctgagtgaacccgatttcaaaagccatccaataataacctgataacccctgaaggatagaaggagagggctccttgtggtgggacaaagccgattggggggatattcgggtagattattggtgaattctgcgatcaatgagcaaaggaggcggtttactagaataagcttcgctagtggcggattgtatattggggtgcgagcgcgttggctttttgtcgtagtggcaatgacctggtgtgggtttatcggagcgcactgtgaggtcagctgcgtggg

SEQ ID NO: 133029 - DNA, 982 bp, Arabidopsis thaliana
atttaggcgacctatagagtactatgacgtcgcatgcacgcgtacgtaagcttggatcctctagagcggccgccctttttttttttttttactccatccttatttacatatataatccgacttagaagtgcaacaatgagtttagaaatgacatcgatgataattcttttgtgtgctttttttttgttttggtttgtgaaacaaatattacaaaatgtgtggatttgtatgaacagtttacaacgagaagttgttgtgtaaattgggctcttttcttcagaattcttgccacccaaggaatcgttagtcacttttttgtcgccggttttgtgagttatcaaatatgtataaaaacatacaaaaacgctactactcgtgaatcttctgcaatgctatttcttggcctttttaagatacttcttgtgaagtttcattgcaccagtacaggcttttttagcatccaagtttccggttatgtcgtttaagatctttacaacgtcatcaagtcctcgagcttcggtcattaacttagaactcttgtctttcaaaaccctagcccctaagaaaacagagataggcaaaggaccttccgcgcttttccctccattcctcatggtctctctctcgtacctcccgcattggtttatcgactttggtttacctttggaggaaccttcgattctctctccctcgaattgaggctcctcatatagagaatacatttcagggttggactttaatggccacatcatcttcccaagggtcaaggagtcccaaaaggaggattcttttcggaactgaaacaaaaacatttggataacaaagagatagttcccccccccccatttcttttaattatggttaagtttggggtccattattttagtgattggagcccaaagaggtaactgtgtttgcctccacttttggaaggctggcggagcgtgccgccgcgtggtcaacccggaattcgggccgggtc

SEQ ID NO: 133030 - DNA, 725 bp, Arabidopsis thaliana
  unsure (1)..(725): unsure at all n locations
nnnnnnnnnnnnnnnnnnnnnnnnnnnnnnnnnnnnnnnnnnnnnnnnnnnnnnnnnnnnnnnnnnnnctttttttttttttttcagcaaatatatcttatataattaattgttctcatattgtttaatataacgttagtataaacaatgactacatcaacttcgcattcgcactatagaaacaggatactatttggatatatcaactaaactttggggatattttctctcatctactaagatatactagtataacttttttcctaagggggtatatgaagataagataattactttttcttcttcttagctacatgggtcgaaactggtcttggaatgttgagtaaccagaatctcagaagcagcccataatttggtagcttcgctggagttggttccgagtccagacggtgtcgtttcattacaatccgtaaaatactttcccgatacgttcaccagtcttggatttgttgccacgtaacacgtcgttgctgctgcttgagggacggtcttaacgagcttggaagccaggaagaagacgagatctgtcaatagaccttctcggtctctagttaaccgngttctaacaactcctgggtgtacgcaatttaccgtaacattcgctccaattttctggagtctagaagagagctccttggtatgcaaaacgttggcaagcttcgagagagcatacgcacgtgtcgcatcgaaatgacacttgggtt

SEQ ID NO: 133031 - DNA, 859 bp, Arabidopsis thaliana
cactatagaattactatgacgtcgcatgcacgcgtacgtaagcttggatcctctatagcggccgccctttttttttttttttggcaggttctttgattatcatatacaacttgcaaccaaattaaataaattcaaataccaattagagtacttttggtaacacttgggaatggtttgttacacacaaaagaccagcaaaaaaaggatttaaaatagggaaaaaagagaattaaagacagaaataaaattaggttcaaaacaaaggccactgcttattcctcaatatgcttcaagttcaagcgaagatgctgagcggaccagtcttcgtagaagcgtctataccattttcaccagtcctgattccggttatccacgtctttctcacgttgtcgccaccaatatccatcttgattgttagccgtttagttgctttcatgaaatcactgaaaggttcgtctccaatacgtttgataacaccatttgcctcccggtacacaacatgagtcaccaaatccgacctctcttctatatgaaacatctcagccaatttcccggacaattcttggtacgagccaataaccgagagatcgagtgtgcgtccaacatcctcagattccatgaaaactttacaatgacccgtctcaagtccttgcaaactataattccatgttaacccacgagccactaaacctttctcctcctccgcttccgcctcttcttccaaaaaccgttttcggttcataacttgctgttcggttaaaatcggttgaccgatcaacacgaaatgatgagtcttaaccgaaccaacagacttcttcttatcatgagccataggtacgcttgggttaatccgcaaatg

SEQ ID NO: 133032 - DNA, 652 bp, Arabidopsis thaliana
atgcacgcgtacgtaagcttggatcctcttgagcggccgcccttttcctttttttttttctttttttctttcttccttaacagttgggatcaatagaatcaaaattcacctaataatataatccatataaggagttgatcattatgtttaaacatcaatgaaccttttgaagaaacatgtctatttgccggaaaaaaacatacaaaaatatgtgtccgactcagaaaccaacgaaactcaagtttccaagagtagagccgtaagagaagaatgggttggtacaaaaagataactacgggattgaaccaaaagaacaagttatttgccggtgattcttctaaacccgggataagtagacgaactaatgaaaatgacagagacaaaaaggagaagatttagtccgcattttcggattcaacgtttgacccattggaagcttttttttgccttgggttttccaggtttctttttttccacaactcgagagtcttttgtcaagaaaccagcagctcgaagtgatgtccgcatttctggttcccagttttgcagtgccctgctgatacccaattgaatagctccgacttgacctgtagtaccaccgcctttaacagggcccttaatatcccaacgccccaaggttttggtgtcagca

SEQ ID NO: 133033 - DNA, 836 bp, Arabidopsis thaliana
  unsure (1)..(836): unsure at all n locations
gaatgaannnnnnnnnnnnnnnnnnnnnnnnnnnnnnnnnnnnnnnnnnnnnnnnnnnnnnnnnnnnnnnnnnnnnnnnnctttttttttttttttgatggtgatagtagttataattcacatgatgattaaatgttttagtcacaatacctcataaatatgccatgttccttgttgtaagtcgtaacttacaccttccatgacatcaattaattaagttgttacaaaaaaatatcaaaatactgtaataggaaaataattattatgaaaacattatttttttccctttcaaaatcttctgcatgacaaagatcgagtctttcgtacaggagttggagtaggtgttgtaacacaaaaatctggcgtacagacatatcctttctccgaaataccctttccgctaaacagctccgacaagtggtttccaatatcttcagggttatatcggacattccactggccttccgttcccgctaacataacggcatttctatgagcgttgtaaaaatcgcggtaaaccggtaacagttttctcccgatcgaaattctcatctcgtccaacagcttcggatctagtacgatgcactcactctgtgcctcgcacgtgctctcgaaagtctcgttgaactttntgaattgcatcatcgcttcttcgggcgacatctccaccagctccgaagtactaatcgccggacacatggacgccaatggaccccatgccaaccgctcgtagcttcttgcgaactgtctaactgtctctgagttnttcgctatccaatcgttgccgagaacatgctncacgttcgtggatcgagcacgtgagacaacgtgttgga

SEQ ID NO: 133034 - DNA, 818 bp, Arabidopsis thaliana
  unsure (1)..(818): unsure at all n locations
accctatagatgagctatgacgccgcatgcacgcgtacgtaagcttggatcctctagagcggccgcccttttttttttttttttttttttttttttttccaaaggaatcaactgattgagattaaaaacaaaagctagactgaggggcatcggctaaatacaaaaaaaaagaagggaaaaagctaacctgagccgccgagtcatttgcactttctcatcttcttcaaggcccatttgaagcccacatactacatagctcggatctgtcctccatagccgtagtacttgagaagcccctcgtcttgtctccagttctctttcactttcacttccacctggaggaagactttcttctgaaggaaatcttcaatgtcgagccgagcagccgttgctagtgttttcagagcctttccttcttttcctataaggatgatcttctgagaatttttatccactactacttccacttgaataaaatcttttgcagctggtctagttttgtagctcagcacgttcacctgacatgcataaggaacttcatttcggtactgcataaatattttctctctaacaatctcagaaacaaaaaatctctctggatgctcgctcacaatatcctttggataataaggtggcccgaagggaagtttggataatatccactctttgacatcctctattccatgtccatactttgcacttacaggtataacttcatcaacatccgtaaatnttcataccactacagtttcttggcaatctcaccagggtggatcagatctttcttattcataacaagcaacatggggtgggttttt

SEQ ID NO: 133035 - DNA, 681 bp, Arabidopsis thaliana
  unsure (1)..(681): unsure at all n locations
nnnnnnnnnnnnnnnnnnnnnnnnnnnnnnnnnnnnnnnnnnnnnnnnnnnnnnnnnnnnnnnnnnnnnnnnnnnnnnnnnnnnnnnnnnnnnnnnnnnnnnnnnnnnnnnnnnnnngggggggaaaatgttttcattttttaaaaagatcaggaagttttaccttagaaatcatgttttgatgttggacacttggtataagtcttcgaatgatcccactttcaagaatacaaaaaaataggggattcattcatcccttccttcctcaatattctcattctactctgggggggcaagacatgattggtagatttcatctcttctttgctcaaggatgcttcaacaataagctcttgtactctgtttccagctcaagcaagcagtttgtattggttctcaaacattggagccatgtaaacctgaaacgttggagcaagacccggactcaaaaaaaaacgactttttgagactgattggattccttcaaccatttccagctctttgatcaaagattccacgtaaggccactcagcgtcgagctctgctgcttgtaatcgcccccccacctgatctttttcaccaccaactacagattctaaagccttattaagaggatcaggcgtaatttcttttaagacaaaaaaaaccgtccaagaacaaaatctacctggggccctttcg

SEQ ID NO: 133036 - DNA, 860 bp, Arabidopsis thaliana
  unsure (1)..(860): unsure at all n locations
acactatagaattactatgacgtaccatgcacgcgtacgtaagcttggatcctctagagcggccgccctttttttttttttttttttagctatcaaaatttccttcgcatttttgaaagatacatggtcaagaagacagagcaatttagatacaacgaaccttcttcatcacaattacagaaaaaatgattatgtagatatcatgtttagagcctaaacggctaaccagttccatcattaatgtcttaaacaagcttttatgaacagacaatggaaccttcactgcgcaactggagcgtataaaagccagaaaacgtgcaccgaataacctctggataggctctggaattttctaaattctttcaaagcttcagggatggaatgaagcaggcattgtgggttgcacttttccttctccgttggcaggtccaaaacacaccaaggtaatctaggaatggaccagaagcagcatttccgacatggaacccaccttggttttgcatttngctgctctatggcctttggagtggaaggaacctaattcttgggacaaaatgaaccttcactaagtagccttagtcttatcatctccaacaccagaaagtttggcgcaactattcaagatttcatcaagtccttaaagaacccaatcccttcatattattacctccctgtacttccgacccatggcttgattccccacttgccaaccaggttctccacttattcaaacccaattaaaccacctcccaagtttagcgctgtcccattgttcagaatatactcctggttaacatacccagtgagaccacagcgagattgaacattgaaccgggatgcaccctcgaactttacattga

SEQ ID NO: 133037 - DNA, 799 bp, Arabidopsis thaliana
  unsure (1)..(799): unsure at all n locations
cactatagacttactatgacgtcgcctgcacgcgtacgtaagcttggatcctctagagcggccgccctttttttttttttttatggggaaaaaggtatagactattaattacatcataatgatgtttacaatgagaaagagtaatatcatctccaatctccaatggttacatctcgaatttttggatactataatatgtttgccatgttctttttttggcaacattgtcatgttcactataagacttttctagtttccagtctcatttggctttttcacttgggtcactaactatgcacaaaagcttcatataaaaccacattcacatgcatgttgttatatctctggaccagatgcgaacagaggtataaggccacgcaatacttgggctgataattggtgagcctcaaagatctctccgtccaaattccacacactctcttccccaaattgatgtaaacgtgaaagctcgcgtcttgtgatattccacaaactcgaagttcaaaggttctccacctctttttgcaagctcggttaggggccctaagtccttgggacgagaacaatcttttatgagtatgaaatgaaggaaaccgtcggagaggtgtgcatccacaacaagcccatcagggggctctttcatttcggtttgacatcactgcagcaccctatcctaaaaaccggtcctttcgttctacaccatncttgttttttctggacaggaggtaaagggttgggcttgcacttgttcaaccaaccttactgttacaatcttgcattttcacgacatagtattttc

SEQ ID NO: 133038 - DNA, 730 bp, Arabidopsis thaliana
  unsure (1)..(730): unsure at all n locations
gacctatagattagcttgacgtcgcatgcacgcgtacgtaagcttggatcctctagagcggccgccctttgttttttttttttttttttttttcatgaagaaagattctttcaaaaggttttcgctttgccactcacaaacaagaagttgggccacagctttgtgaaatttacaccaaaaacaaacgaaaaaagagagagactgtatcttggtttcctcttaaacacattacaaaatgcagtattgagtcagatgcggcttgaatccctcccgaatatgtacctccttgtccagtccgacaccaccagagccctcgttcgccagctaacttgcttgctggcataaacagaataccagagccactgggcgctttttccagctgaaacccagtctccaggtagttcagctgctgcttggtcccctcctagtggagcaaattgtccaaagtgcttgtactggaaggggcgaaactgatgatgcccgccagttctgagcccttaggaccttcaggtagctctttacactgctccatcctgttgaagcattttgcaagataagcaccttgctgggcagcgacctgagcagttgcaggcagggttttcatctgtgaatcagcctccgagagagccaatttgaatgcctcaatggctacttctttccttgcattnccttcaaatctgccagcagatcgttaatatgccaatatgcttgttttcaggagagctcacct

SEQ ID NO: 133039 - DNA, 961 bp, Arabidopsis thaliana
aggtgcaactactagaaaatctatgacgtcgcacgcacgcgtacgtaagcttggatcctctagagcggccgccctttgttttttttttttttttttttttaaccaacaacaactttgtgctgtttctttaacgaaaacatacactgttctataaataaataaaaacgtctgaaaaatctttacaaggaatgacaaagtttataaagcaaagaactaaatgcgttttaagtttcaaatatccacaccacacgttccatgtttaaactatatctacattccttgagacacccttttgcgattcttgatcagatccattgacacttccttttcttctgaacgatctctgactgaatatccgcgaaatgatcttaaccggagctggcggttctgttatcgattcgtccttagccgaattgttgtctttcaagtccaaatcttccgatagtttcttcactaatgccacaaaatgtcgacgaaatgttggatatcttgataccgttttcgttagcccttgcatcctgcgagcaaaggcatcgagttcggctcttttacgttcgggtgagaggaggagaccccggaaatggcattcgagctctttagcctctctggatctccacaatagcaaaacttaatcttccgaggtactcttccttcttcctcagacaagtttgtagctttcatttgctcctttagtatcaaaaacggattcagaaaccaatcaaagaaagaccgctttttgggcggttcatggtagttatttcagttacaccgtcacttagtaacaagccggaagaattggctttgactgagcgaagaatctcgtaaagaagtccataagccggtaaaccaacgctgatcacttggctgcctttactagatctcgcttcttcgatatctttcgagtttatcagtccttttgtcgctaaaacttctccatatcttctacattccacaaagagct

SEQ ID NO: 133040 - DNA, 831 bp, Arabidopsis thaliana
cccaccgtctggtcgacggtatcgataagcttgatgtcgaattcgcggccgctctgtgttagcagaagaaatactgaagcgtttagatctggagaatctctgttccgtcgcatgcgtttccaccactctccgctccgccgttgtttccggcgttcttccttctcttacctccctcgatctctctgttttctctccggacgatgaaactctgaatcacgtgctgcgtggttgtatcggactcagcagcttaactctgaattgtctccgccttaacgctgcttctgtgcgtggagttctcgggccacatctccgagaacttcacttgctcaggtgttcacttttatcctccaccgtcctcacttacattggcaccctctgcccaaaatctccgggttcttactctggaaatggcagacctggattctcccgatgtttttcagtctaacttgacggcagatgcttaacgggtgtccttatctggagtctctgcaacttaatatccgaggtatcctagtagatgccaccgctttccagtctgttagattctccttgccagaaactctcaaagctctaaggttacagccacttcttgagtctgaggcaattcttctcatgaacagattcaaagtgactggaacttatttatctcagcctgattataatagtgccttgctatctccttcaccttcttttactttgcaaagcctgtctcttgtcctggacttgatatctgacaggcttatcatagctatcacaggttctcttcctcaacttgtcaaactggaccttgaagatcgtcctgaaaaagagccatttcccgacaatgacttg

SEQ ID NO: 133041 - DNA, 770 bp, Arabidopsis thaliana
cactatagacttactatgacgtcgcatgcacgcgtacgtaagcttggatcctctagagcggccgccctttttttttttttttttttttttggaaaaacgagagtttaacaattgggtttgcttcttacaagtgatcatctatcgccatatttcggggaaacaaaaattttgatttcaatctgacctcaaaactcccaaaaaaaataaaaataaacaaatcatttcattaatttatttattgcttcaaaagcggctcacggctctcttcccactggtccaatctgctcgaagctttctcaacctctttgtcccaatcagttcgtaaagtgacaatcactaagattattgtttgcattaaagtaccaccaatcatcccagtccatattcccttagctcccatatcataggtgaagccaagaacgaatcccactggattccccacaccgtagtaccatccaatggttaccgtacccaccaaatgcttgccttccacatccaacagccacccgggccaaaacaggctgatttccattgaggacaattgtgatggctaaaaaggaagataattcggcaccggcctaacccctggtggactatcagtaaacgcatagctgatgacgtgacgccacaataggaccacaatggcttcgaaaaccgatggaaaattgatcctcccgttggcacgactgtggaaaacgcggctgctctcgggtttccggctccatactcgttgcttactctcacacttgcagctgcgttgaatccaacga

SEQ ID NO: 133042 - DNA, 602 bp, Arabidopsis thaliana
  unsure (1)..(602): unsure at all n locations
cgnnnnnnnnnnnnnnnnacctatagattactatgacgtcacatgcacgcgtacgtaagcttggatcctctagagcggccgccctttttttttttttttttgtaacaaataatgtcccacacttatcattatccaaatatccaaatccaaaaaaaacattcaaaccaacccatttctttctatccaaaaaagtcaaaaacaatcatctcctcaaataaaataaaaaaaaaaaaacaattttacatcaaatttgattgatgaatccaagaattaaaccaaacacaaaagtgtttcttgtcttttagcctgaaaatccgaaaatcagtttcttggagtcagcatccatggagcttcaacaatctgtaaacagagagacaaacataaactatgaagaagtgatgttttaactctcacaaatctccttgcctcatttcctctctctctcactttctccacataactctccactttaccatttgctctctcaatcaacacttttaacaacgatctaaccgtctcaaacgttacccgcccggttaaatccaccacatatttccggttactcggtaccgataacgacgacgacacccgatcgatccacg

SEQ ID NO: 133043 - DNA, 689 bp, Arabidopsis thaliana
  unsure (1)..(689): unsure at all n locations
nnnnnnnnnnnnnnnnnnnnnnnnnnnnnnnnnnnnnnnnnnnnnnnnnnnnnnnnnnnnnnnnnnnnnnnnnnnnnttcctttttgataatttccccccaccccccacttggggccgaacatggtcttctggattgggccccttatctaaactcgggatgtttcttttcgaagatgtataaaaagacacagcacattgatacatggggaccgctgaaaccaattacagaagaggcaattcaaaacatgactagtctgctttggtatcactatccccttcactctaatgcttttttcacagctctcctgtgcaatatgcaatatatcaggatgaaagaaaccatcccatgttcctatctacaatgtttcacttcacaggacgcaccccgactgtcttaacacggaatctgtactgagggggcgactcatcactggcatcgctggcttcatcggcttcttcttcactggaatcatcttcaactgtattccaacgggcgtaatcgagtgttgaatgacccttaggcttaggtatggcttgccatgcattagattgctttccagacattggcacttccttgctgggctgntctctaacctctggtgttttaggtgcaacaacttcccccttgtttatcgcatcttctcctggagtctctagatctcttctaagggaaactaccgactcaaac

SEQ ID NO: 133044 - DNA, 838 bp, Arabidopsis thaliana
  unsure (1)..(838): unsure at all n locations
nnnnnnnnnnnnnnnnnnnnnnnnnnnnnnnnnnnnnnnnnnnnnnnnnnnnnnnnnnnnnnnnnnnnnnnnnnngcctttttttttttttttttgataggagaaagacgaaaactaagttcaaagcatgaaagaaagatcatcgtatacacgtggcggtacacaacgaatctgccaagtgtctgcaaaaacaacatttcttttaaaacattacaactgattttgaagtgtaatcatatttgacacccatcaagattcatatcaaagcatattttcatcaaagaagcacaaaaaaactcaattcaaaatccattttatatagattcgtttcgacacacttggcaggttagaagaaccaccacttcctttgccggcttcccttttgagctttcttctgtgactttaacaagatgggttgtggaagaacagccatgcttgagtcttggatgtaaggtctcactttctgctccaacatttcctccaccttctcttgacgccatttagcttcccattgtgcatccaagattttgtctgcgatttctctttgagcattgagaagaactgtcttctcgtacagttttgccgggtttttgagatcctcttcactccaagaggaaatattcaatgggagattcagttcaccccaattctgaggacggggaggtggattgagtttcgtgacttcagcctccagagatttcttagccttgtataagggacattcttcactatgacggggtcttcccgagcacggacaggatcaatggagaccaaggcttcctgcaaatattcccagccaggattgcgtgtagccccaagtcccgaagttgatcatatc

SEQ ID NO: 133045 - DNA, 708 bp, Arabidopsis thaliana
  unsure (1)..(708): unsure at all n locations
actatagatgagctatgacgccgcatgcacgcgtacgtaagcttggatcctctagagcggccgccctttttttttttttttatagaaaatggtttttcatagataataagaccgataattacaagaccttgaggaatttgttgatggagctcctcccactcccctagattactcactaaatactcataaaactctcctaactctcttagacttcttatatagataagactcatgagcacaacataagcttaaccatagttacttgccattacccacaccaaaccatggttaatctataatacgtgcaattctaatagagcctttgagccttgaagcccactgactgtatcactttctgcattggtctcaatcagaggtgatctttcttgcctttcttcagcagctttgacatatgattcacctgctcatgactttccttagcccctcccttcagccattgtatagcttcagctgccgcatccttctcagcactcttcttgttgctgcaaggctgtcccatgatctgtgtctcgttaaactctactgttgtttggaacttgttgttcttcaactgcttagtcttatacattcggactgtataaccagncctcgtgagtattgtttggagctgacttttggaattgtcaccccccggcccactttcggtccttagaaacaatgacggttttgttgacaacgccgatattt

SEQ ID NO: 133046 - DNA, 754 bp, Arabidopsis thaliana
  unsure (1)..(754): unsure at all n locations
ggcnnnnnnnnnnnnnnnnnnnnnnnnnnnnnnnnnnnnnnnnnnnnnnnnnnnnnnnnnnnnnnnnnnnnctttttttttttttttacagatcaaagtatgcggttctaattatttaatcagtacataccatttttagttacactgacagaatgagattctaaggaagtagaatgtgttgcaaaattcaatcgaaagggtcgatacgaggatcatgctcactggccatagccattcctgtgcacagacatgtcgggcacatcacctttccggcacctgaacagtttgaacatctttcggttttgggcggtgatagagaatgattcccaccagcaatagctgagactggttcagttaaaacaagagcacctgtgctagagcaacgagcacatgctagatacccagttcctagacagtatttgcatctcttgtgctcttgctgctttacgttgttaacttctactaccatcaaagccgaaatcacaccaaccgctcctccagaaaacgacgctactatcgggtccacttgactcaattgcataggtagatgaaggctttgaatganatctgcatacgatgtacctcctatacctaacttcagctctagagtaggagctagtagaccaccgaataggataatccccgcgatgagtgagaaacaagttgcgtaatagactttcaaattggcagcagtcaatggaggtagaatggggataaagatgggaaataggtaattcatgttcttggtcttcgt

SEQ ID NO: 133047 - DNA, 737 bp, Arabidopsis thaliana
  unsure (1)..(737): unsure at all n locations
ggcgaactatagaattactatgacgtcgcatgcacgcgtacgtaagcttggatcctctagagcggccgccctttttttttttttttaagaaaaaaaaaacatatagagaaaatcttgcaaaccataagtcaccacagaatcaatatcacaatatggtgtgtgctacacaacatgaacaagtaattaagcaaatacacggtttacaaaacaccaaaccatacgacttagtgagacaaaaacataaacgtttaaatcaaaggatggagcaccagccatgagggagtttagacgcagcagcttggtcaaggaaccaaaccacttcaacatccgcggttagtctaccagctggtaagtctttggtatgattaagagcagccgcaaccgaatcagcctgctctttatcacatacggccataacattataggaagcacaattgataaccggtaaagtcaatgtgatcctttttgacggtggcttaggtgaatcggttatagatgggaccatttcaccttctcattgatctgagcatgtacagggatagagacgccatgtgaccgtccggtcccatacctagaagctgaagatcgaactggggaaaacagaagattgtacgtcggattatgttnagttcactttttgttgaaggactcccgaacctttagctggtagtcggggttgccttctgccccatccgtatcatagcgaaatgtttcagtgaatggaaccttgaagaaac

SEQ ID NO: 133048 - DNA, 702 bp, Arabidopsis thaliana
  unsure (1)..(702): unsure at all n locations
nnnnnnnnnnnnnnnnnnnnnnnnnnnnnnnnnnnnnnnnnnnnnncccctcgagtacgacggtatccataagcttgctttcgttttcgcggccgataagaacacaacaccattcagataactcttttaaatcccaaatttggtttatgatgatggatcatctgagttttatttatttattaaaagttaaaaccagagtcttgctgaaactgaaactttcctcagttcatcaatgcttctgctaatggaaatgtcggagatatatccaccggtaccttaacgcgttcgagattctccagagcggttttcaatggtccggtgatagtgcagtacttatttagaagcaatgttgctgcgtttttgtcaccttttccttgaatagttagtatctcatggctcaggctctcaactgcaccttcgatcttagcgaaatcaaccgagaatgtagagtcctcgtggaacacgaaggctcctttttcatataaataggttgaattgcaaggcttgccctttcccatgagcttctgtgagaccaaaccggatcgatctaaagcaaccagctaggaacgaaacatacatactctccaccatactctttgaaagcaaccccttagtgatgagactcttcagtgcccaaagaccaactatatctgcctttgcttcttccattgcaaatggacttcttggagtcctttctcactg

SEQ ID NO: 133049 - DNA, 709 bp, Arabidopsis thaliana
  unsure (1)..(709): unsure at all n locations
nnnnnnnnnnnnnnnnnnnnnnnnnnnnnnnnnnnnnnnnnnnnnnnnnnnnnnnnnnnnnnnnnnncttttttttttttttttttgacgagtaaaatccattacttagggaacaagtttatatttgcatagaacatacaaaaatgttaacaatctatgagtgaagtttatgtaaattttcctagactgaccttttgagtgaaactactctatgcccgttacaaactaacagtacggggttacattagccttgtcgacacacgaaggcctcttcgctttatagtagaaatgcgcaatcatatgaaccaattcatccgccgtgcgaaagtctttctccctgtacagaatccggtttccgcgtaagaagagaatctgtgggcattccttagctttaagagcatatgccaaatctgtctcgatgttcaggtcaatcttaaccgcccgtggaggtaatcgatctttcgcatcccaataaactttgatagctttctcaagctccttcaatgtcttccagttatcactagctcttttgtatcgctcgaatacaaggacaacgagtggactaggatgaaaagcaaagctttnccattccaaacaattgatctccttgacccaactatcatcaatctcaccttccaatcattctcactcccatcatctccaaaccacgttttgattggatgtgtatcgaaatactccgaagctttga

SEQ ID NO: 133050 - DNA, 824 bp, Arabidopsis thaliana
  unsure (1)..(824): unsure at all n locations
gattgaggcgannnnnnnnnnnnnnnnnnnnnnnnnnnnnnnnnnnnnnnnnnnnnnnggccgcccttttttttttcttttttttttttttttgggtaaaatgtggacttccatcattctgactataaaattgaataggtgtgtacaacaaagaggaaactgatatgactggaacaacagttagaagaacacaagaccaatgctcccagaaataccagagagttttggaataaactgtcatgtaggaataactgaaataaccgccacaatgagatcaatcatcactcttctctgcttagcctctcccttttgcatataggatcaagccaatgatgcatcaaaagggtctattgtaaagaccaagcaatggtttttctctatcttcaactcgtttcctagcagcttctcttgccttcaatgcagctttctcttctgcagatactttcttcggtttctcatcttgcctctttctcttgttgttgccaagatcaacagatgaagccgctcctttcacagctcttttaggatttaaagaagctgtgacaagacggccaggtggtttccccacacttggtccagctcctgaagaagatacaggctttttcacgagaggtactttggttcctgatgatgttttaaccgcagcgtaggcctcgtcttgtgtcacccaatgtcctattgagtcactgtaatagaatccagactgtgaatcatagtgcagaccattggtctgggttgaataatagcctgaagcactgtcgagcttncatcggatgtccatcctctggtgaccggttgcttagctacttgctgacagttgaata

SEQ ID NO: 133051 - DNA, 913 bp, Arabidopsis thaliana
  unsure (1)..(913): unsure at all n locations
nnnnnnnnnnnnnnnnnnnnnnnnnnnnnnnnnnnnnnnnnnnnnnnnnnnnnnnnnnnnnnnnnnnnnnnnnnnnncttttttttttttttttttgggattaaatgggtgagtcatgcgtattaacattttgaatccaatcgttacatgtttaacaacgaatctaaacaagagtgcgaggccttctcaaaagtggaaagaagtcacatctatactacataaagagatatagcaacggtctaaaccactagaaaagaactaaaaaaaccaaccagatattacatgttacaacaactctcgattccaaagagaggccatttcactttgttcagccaccatttttaagcattcagtgccgttttttctatgtgacatagtgcatggttttacgtctgtggcgactatagtcagatacaaacctaaacgacaatccacatccatcgaccttgcatatgtatggtcgctctcccgtgtgcagacgcaaatgttctgtcctcgcccattgccatttgaaagtcattgaacatcctttccaagagcactcgaaaggtctttcatccttatgcacacgttgatgaagcaccagatatttgtgagccctgaatttctttccacacccttcgtgagtgcaacggtttctcttgtgagtttggaatttcgctttactctcaaaagtcatcttgcatccctctaggtaacaacggttggggtgagttgtcgtggggacttcttgctgacgactccctgagcaagcctttggtgttttcttcagccttttcgcaatgggtttcttctcttcatcactcgtttcagtgtgctttaatgaagtttcacatgttgctttcctcttgccccttgacctcaacccttcacaaggactccttatgaaaccagtgctactctctggattatc

SEQ ID NO: 133052 - DNA, 633 bp, Arabidopsis thaliana
  unsure (1)..(633): unsure at all n locations
gagaagccaaaaccaccggtttctgtcacacccgcttcaaggggccatncntttgtccncnccattttaaggatcaggcccgttttccaanggacatagggcagggtttacgcctgnggggctatngccagntcaaaccctaaacggcaatccacatccaatggccttgcatatggnatggccggtctcccgtgtcagccgcaaatgttctggnctcgcccattgccatttgaaagtcattgaacatcctttccaagagcactcgaaaggtctttcatccttatgcacacgttgatgaagcaccagatatttgtgagccctgaatttctttccacacccttcgtgagtgcaacggtttctcttgtgagtttgtaatttcgctttactctcaaaagtcatcttgcatccctctaggtaacaacggttggggtgagttgtcgtggggacttcttgctgacgactccctgagcaagcctttggtgttttcttcagccttttcgcaatgggtttcttctcttcatcactcgtttcagtgtgctttaatgaagtttcacatgttgctttcctcttgccccttgacctcaacccttcacaaggactccttatgaaaccaatgctactctctggattatc

SEQ ID NO: 133053 - DNA, 771 bp, Arabidopsis thaliana
  unsure (1)..(771): unsure at all n locations
gnnnnnnnnnnnnnnnnnnnnnnnnnnnnnnnnnnnnnnnnnnnnnnnnnnnnnnnnnnnnnnnnngctttttttttttttttggattaatctcactagttcagcataaagattttacgaatgtggtttttaagtaaacataatttcaaagaagatgcttcaccatgtaaggaccttccaattcataacccaactttctgtagtattgtctggttcctacaccagaaatcacaccgattttgttagatcgatgttctcttctagcaatcctctctgcttcttccatcagaagtgtaccatagccctgatgttgcaacttatcagcatctcgaccatgaactggtacagctgttccgcatacatgaagctcaccgacaacagaacactttcccatgggttctggacacgttacattcttcccgcattttcgcaaacgtagcaatccaacaagaatggcctggcgtgtatcttcttaagaaaggaacgtctcccaaccttcattggcagtgtaatcacgacgcacaagctctactggctctggcttattttatgatgaatggcctgaatctcagtttcacgagtacggacatcacggcattttagggccaagtcttncattctggctagagccaggtcacgaagatttcctttttctacccttgccgaaccagaggcataggattatcacctgactttatatcacgtggccatggaggtccataggaagagatcctgcacttttccacagctggtaggtggatatttcggcct

SEQ ID NO: 133054 - DNA, 846 bp, Arabidopsis thaliana
  unsure (1)..(846): unsure at all n locations
gcagtaccggtttcggattcccgggtcgacccacgcgtccggtttatggactcaagccctgattcttctgtggagtttcatgaggagagaagtaagaatcctaaaaggaaaaaggaagtgcaagagtctcctccagtgaaggtaaccaaagttacgagagagggaaggattgttcgttgtggcagatgtggtgtaattggacacaatacgaggaagtgtggtaatgttggggtggagtatataagaccgaagaatcggaacacatcagatgaaggatttgagttcatggatctagactacaacgaagagccaagtcaatcttcggttaatttgtagttttcgaaggtttattttagatgatgtgaacatcttttgcttacaagtggaagtgatgaatgatgattttagttcaggcgtttttggatgcaaaattctgtaaaacttagcaacatgtgtacgcattacagattaatcttacaaaatcgccatagttcgtgaaggaattagccgttttctcaactttttgactatgaaaatttaaagagcaaaatgataccacaagggattaatctcactagttcaacataaagattttacgaatttggtttttaagtaaacataatttcaaagaagangcttcaccatgtaaggaccttccaattcataacccaactttctgtagtaatggctgggttcctacaccagaaatcacaccggattttggtaagatcgaggtccccttctagnaanccccccngggttcttcccaccggagggggaaccagngccccggntnngggaaatttnnggacccggcccnnaaggggggaaacnggtncccggana

SEQ ID NO: 133055 - DNA, 597 bp, Arabidopsis thaliana
  unsure (1)..(597): unsure at all n locations
attaggcgcactatagaatagctatgacgtcccatgcacgcgtacgtaagcttggatcctctagagcggccggcctttttttttttttttttttaaagtttctacacattggtgtatataagaagttgaattaaagaaatacaaaaatcgtatggtaatattactccgaaaaaatgctatgctacatggtcatttatctcctttaccagtgggaccagagttggtgatatgaggatttccctggggtcgttgagaagctaaacgccgttccaagggagtcttcctcttgctgacaacaaacctattcactcctttcctcatcggcattatcgacgggaaatcttcgtctgggatctcactcagctctgatatgttctttatctcagcccactctcttaaaccatctttctgcttttgcttcctctacatgtccaacaagtctgactcctttattaacgaaccctccaagctctttccatttctgatcttcactgccactgtatcanatttgttgattgaaggttctcttggttcttggtggactacctggaaaacgttttctgtcgccggagctggaagagtatctatngattcctt

SEQ ID NO: 133056 - DNA, 747 bp, Arabidopsis thaliana
  unsure (1)..(747): unsure at all n locations
tnnnnnnnnnnnnnnnnnnnnnnnnnnnnnnnnnnnnnnnnnnnnnnnnnnnnnnnnnnnnnnnnnnnnnnnnnngctcttttttttttttttcgaccaaaaaaacgcatttcggatttcaaaaggaatgttacaaatgtaacatcatcgctgatctatttacaacacaaagttttactttaaaatcgtcatggcatgatgatgttgtgatagagatgacgatgaagaagaatggaggaagaggcagacgactgacatatcatccatggagtatcctcgtctctttttcttccaagcccgaaccgcttgctctactaatcgcttagccgccttaggccgctcagccgttgaggagacaatctctatagcctcttggttagagatcacatcccatatcccatcactggccaagattatgaagtggtctttagtagagatgtgtctttgagtgacttcagggactgagaccaatccatactctttaatacagtagtctccgaaggctcttgacattgcgagccccggtgttnctgggtctggctgcccacacgatgggctcccggctatcatctagacagaaaacccgccctttgcagccaattatccgctccttctcctgtggtagattcggttagaatcgagggtgagctgaaccgcaccaagcttcctcatccgactccatggtagaccgtcctgagatcgctacatngctacataataacttaccctgtctacataggtagagct

SEQ ID NO: 133057 - DNA, 1017 bp, Arabidopsis thaliana
  unsure (1)..(1017): unsure at all n locations
nnnnnnnnnnnnnnnnnnnnnnnnnnnnnnnnnnnnnnnnnnnnnnnnnnnnnnnnnnnnnnnnnnnnnnnnnnnnnnnnnnnctttgggtttttttttttgatacttttttttttttttttataaaaacacatttgtttatatttattgtaacagcaacatacatttttagatgacattgcagaacacaaaatcacaaacaaacctaagaggctaaacatctaaacacatgtctatatttcaaatgagacttttctttcttatattttcacccaataagggtttctttcttcaagtttgcacactgaagtacacattgtatgtttcatctcttaagctaaacaatggcgataacacaaagttcctctgtgttccgctcatcacgaaactcattggattgtattgatgcattcctgtctttaaactaaagcttgctgcctctttaaacttctcatcagtcgcatccgaaccacattctagccttagttttgtcccttgctttagggtttgatcgctgtacacaaaacaaccttttttgctctctagtcttaacgaaacgcttcctagcttcccgtcaagtccagatactaaccgaaagctagaagctcctttgtcactaggagaagaagcttgaactgtgagggagctatcagttgcttgctttacaatcatgccagggaaatcaaacggctcaagcatgaccagccttccaattagtccttctggacccgaaatccgtggtttagaattatcagtcacgagcctgaaggtcgctgcaacggcatcttgtgcccctggctcgggtgatactctcattgtgatggtttggttgctattttgaaaactccgtaagatacgtttccagattgttgtgagagtgtggcaaggtaactgttttgagtttcaggtataggggttatccattttccaggtttagcctgagttgtgatgctccagtccctgctcgtgtgtccggctaacaagtagggcccatagagtatggcgtgaagagatgcg

SEQ ID NO: 133058 - DNA, 520 bp, Arabidopsis thaliana
  unsure (1)..(520): unsure at all n locations
nnnnnnnnnnnnnnnnnnnnnnnnnnnnnnnnnnnnnnnnnnnnnnnnnnnnnnnnnnnnnnnnnnnnnnnnnnnnnnnnnnnnnnnnnnnnnnnnnnnnnaaaaacacatcttgtttatatttattgtaacatcaacatacatatttagatgatattgcaaattaaacacagagtcacaaaccacctaagaggctgaacatctgaacacatgtctatattccaaaggagttttaaaagggtttatttcttcaagcttgcacactgaagtacacattgtatgtttcatctcttaggctaaacaatggcgatagcacaaagttcctctgtgttccgctcatcacgaaactcattggattgtattgattcattcctgtctttaaactaaagcttgctgcctgtttaaacttctcatcagtcgcagccgaaccacattcaagccttagtttcgtcccttgctttaatgtttgatcgctggacacaaaacaaccctttttgctctctaggcttaacgacacgct

SEQ ID NO: 133059 - DNA, 792 bp, Arabidopsis thaliana
  unsure (1)..(792): unsure at all n locations
ggcnnnnnnnnnnnnnnnnnnnnnnnnnnnnnnnnnnnnnnnnnnnnnnnnnnnnnnnnnnnnnnnnnnnncttttttttttttttttttaagcaaaccaaatccttgttgacttattatataataccacaatacatattcacagagatgatacacccgattcaaacaagttcagggtatttagtcaatatacgaattagactagactgtatatatattagtgtgatcagtaggagccaagagtagtggagaggtctaagcgtgaacgagatcgccactctcgtatagccgatctgagagtgtggttcggtgtaagatcagaatgtttgagccgatgcttagtaacaggagacacatcttgatgtttttgaatccattcttttatcgcttttcgttcgtatgtgaatccatctgctgctatttgtggatcttccattatttccttaagaattggacagtaatagtgagttggtgctcgtgcgttagcttgttctgtcttgagtctactatttgcagattcaagaatacgtttgagagcaggcaagacttgtgtgctaagatctgggctgtctctgcatttgagctgggaacacctgattgcaatgcgagctagttctttcgcttcggctatgggccagtctttgactgatccatctaacatatcttcaaaacagcctctctttactgcatcttcaacgcagaaaagaagaccgttggggatgtcgagcgggtaaaagctggagaattatgattccaaatgcgtaaagatctgatttcggtctgattgggccg

SEQ ID NO: 133060 - DNA, 799 bp, Arabidopsis thaliana
  unsure (1)..(799): unsure at all n locations
tgnnnnnnnnnnnnnnnnnnnnnnnnnnnnnnnnnnnnnnnnnnnnnnnnnnnnnnnnnnnnnnnnnnnnnnnnnnnnctttttttttttttttagtgtttaaaccacatactaatatatctatatattaaaaatataattaaaaaatatataatatcaatctataccgtgaaatacccaagaaattaaagagaacaaaaaaaggagattgtttatagagctatatcttggactcaaaggactagatccttctctctgtagtgtgcatcacaggagatgataaacactatgatacaggtggtctcatcaagaggtttggtttgacgaaaaccatagctttttctggcaaaccagaatcttctcacttttgactgcatactcagtctcctctctccggcaactccaccttatccctttcgctaacgttgtgattgcgtccatgaaataactcgattctcggattataacatatccactcggccgcaagatcctgtccatctctagcaaaatgtacttcatctcacacctgtgactctccaaggtaaaaagactgtcgaggtgaagaagatcatatgttcttggatacgttgagaaagcttcgcaccagtcgtggtaagtcccgatgagaccgcgatcaaagacaacaggaagcgaatttgcgctgtacgatgattcaacgttcatgacccnaatgggatcctcaatganggccgcagagaaccncataaacagtgttatatccataacattcttatcttggctgtcaaagagctggtaaactttcttgaatgctaactct

SEQ ID NO: 133061 - DNA, 917 bp, Arabidopsis thaliana
  unsure (1)..(917): unsure at all n locations
ggcgacnnnnnnnnnnnnnnnnnnnnnnnnnnnnnnnnnnnnnngaaattagcaacaaaaaacttatttgccttttcttgtcttctaagatgaagtgattttcttcttcaattaatctataaaagtacaacaaggttgatttcgggtgaagaaaaactacggagattgaagtagaataccaaaaatatataagtttccagatcagacagagttcttgtcttgtagctgctgttgcttggtttcttcttcattggtctcaatctcagtgatgtcttcatcattacctcctttgtatctataccatctagccatcaacaagaagtaagccatgttaacaaccatgagtcctgtgagcatgaagtagaagtaatccaatttcgcttttgttcagatcctcaggctaaccaattccctgagggtgaatgcccggttgttcgatgaacagttggtttcaaggaagctagcggggtagctcgaaccccctgcaccggcataaaaggtaggacccgcgaagctcttcatgttttcagggaaactggcttggtagtaaaactccatttggccaatggcagcaaaagcttctgctatgcctgcaagtgtaagctgcggaatcagccacaacgctgacattgatgagatttctcctgtccgaggcgccatcccgagtgtcggtttggtcaatgcaaagtttcttctcctttcctctataaacccggaaactaataaactcattatcgcaaatgtaaacccagctccgattctttgtaagagtgatataccggtttctaacccggtcactcttctgagcgacgggacaagtacacggtcgtagaatatgatgaaaactgtcatgccagtcatcaagaacactacataggtggccgcaggaatcctgaagccaccagaacctaatcgtc

SEQ ID NO: 133062 - DNA, 650 bp, Arabidopsis thaliana
  unsure (1)..(650): unsure at all n locations
nnnnnnnnnnnnnnnnnnnnnnnnnnnnnnnnnnnnnnnnnnnnnnnnnnnnnnnnnnnnnnnnnnnnnnnnnnnnnnnnnnnnnnnnnnnnnnnnnnnnnnnnnnnnnnnnnnnnnnttttttttttaaaactggctattatttataacaaaacaatccaactatactgaataatacagaatcaaactgggatccaaaaacaatttaaaacaaagttggaaactcaaccgaaacaagaacaaatcgaatccgacatgaaacaagtctcacaagtgttcttaagctgacagaaagatggtcaaaaccaaacttaaaaccgtagtaatcgacataacggtcataccattcgccgacgattttttctgccctggagctccagccggcgtagagatatcaccagcggctgatggaccatctcctgaaggacccatcgccgagcctgacggagaatctgacggtgaagaaaaagtaaagcctcccggacccaacgatggagaaacggggggtgagtttgaaacaggggatgaagatttaggggcccttgatccaggtggtgaagccctcggagcagaacacggaagaatagttgaaaatgatttaggggccattggggccggcggggaattcatcagaacagagggtggggaaa

SEQ ID NO: 133063 - DNA, 682 bp, Arabidopsis thaliana
  unsure (1)..(682): unsure at all n locations
gacnnnnnnnnnnnnnnnnnnnnnnnnnnnnnnnnnnnnnnnnnnnnnnnnnnnnnnnnnnnnnnngcttttttttttttttttttaacaaataaatctgtgtttaatatataaaagaactaagtctataggtctatacaaaggacttcagcagtatcaccaagatcttatcaatggagttgttgcataagaagcgcctaactgtgtctaccacacattcaatagaatttcaaagaatagtttatcttgaccttttgatccttgcttggtctttcatggaataattgaaattgctttgggaagccgcgagatggttaaaccgacatgttccaagaagatattctgggagctcctctccggtattcgcctgtattaggaaggccatttcaatcacgagtttgttgaggtacccaggaacaagactcccaactcctcttgcaacagttgatgacccattatcaacgcccagctcaatatagtcctttcccctgaagtagttgatctccagggcttgaccaataaggcatgctttctttcccacacttggcttaactatcccagagcccttggatatgtagggaatgagcttgacccttgatttcctatatgcgtcatcaccattaacaaagctaactagcaaaggatgctcttcatagggagtgctccatcatgaatatagcac

SEQ ID NO: 133064 - DNA, 477 bp, Arabidopsis thaliana
cgtagcttggatcctctagagcggccgccctttttttttttttttgaaagaatctttcttcatgaagctgacatttacaaaagataacaaaaactcacaatcttaatgggtatttagaaaagacattaagcattccaacaaagattcttgctctgcgagccgaaaaacaaaatcaaaaccaaacaaattcacaatcaagtaaccacaacaagagttggggattttactcaaattgataagcggatcattcattcttcaaacttcagaagctggcaaaaagtgaagttacgatccttggcttgtaattctgcaactctcttagcagcacctgaatcacgagggctccctcccacacgacgaagcgttctgatcttaggtagctccttaactataggagactcgtcaccgttctcaccactgctatacagatcaacttcacttggaatctcccatctcttcttcactctcccttcactc

SEQ ID NO: 133065 - DNA, 568 bp, Arabidopsis thaliana
  unsure (1)..(568): unsure at all n locations
cnnnnnnnnnnnnnnnnnnnnnnnnnnnnnnnnnnnnnnnnnnnnnnnnnnnnnnnnnnnnnnnncttgtggtttttttttttttatccaataccaaaccaaaccaactatttattaagtcaaaggtaatccaatcagcaatttcaaatctaacaaagcaacaacacacagtgaaaaaaatccaatgagatagaatcaacagctttatccatggctgagttctaatatctaaatgatgctcaacactactttacaagaatctcttgagtcttggagtcttcaggatcagttttgagggatgtttgatcattgtacaataccgtggtcacgaaggatctagaaattttcttgccactgcaaacttttcagtcatccacaggatgttctcgacttcacaacattccaactttgtcaaaagattggagattctcagcgaattttttgaagtgcgtcttcactcatctcaactttttcggactacacccggaaagatcttgttcttctcggaagcagcagtgggagaaacttgaccacagagctttgatttcatctctaagcaagatttgag

SEQ ID NO: 133066 - DNA, 544 bp, Arabidopsis thaliana
  unsure (1)..(544): unsure at all n locations
actatagaagattatgacgtcgcctgcacgcgtacgtaagcttggatcctctagagcggccgcccttttttttttttttttaatgataaatagtttttgataagagtctcacttttgagttaattaagacaaaaaaaagtttacaagtaacaaaaaacaaaattttgcatgtgtaaccaaattactcagcagaatctgactcgtcttcttcatcattttctgacactgcgtcctcatctgcgtcagagtcactttccactccatcttccgacaccgcgtcctcatcttcttcagcatcagttccgttttcggcgtctgtttcagttgactcttttgctttcttatcatccttgaggtctttctcgtcatagaagtccctttggacaggaacatctttctgttgttgggtagacatgattccagcaatggctttcaatgcagcagctgcctgactggtatcagctatcggcttccttatccatggcctggcactattactcctgattctggaggccnaattggctanctaaggaggtggggcaaa

SEQ ID NO: 133067 - DNA, 563 bp, Arabidopsis thaliana
actatagaagattttgacgtcgcctgcacgcgtacgtaagcttggatcctctagagcggccgccctttttttttttttttgaatgacttcaaatgtaactaaaaagcttacccgaggatgatggttacaaattattcgagtcataacggtagattttttggcttaaaagtgaaccgtaaccggatcaaacaatagaaatcacataacatttcgtaacttatttgaaagaaaagtctaaatgcgaaattgaaccatatcaaaccgaaattcggagaacatgcaaagaaccaaaacgaagaaaagtctaaagcttagaggatggtggtttcagcaatcatggaggtaactaggtaaggatccatattagacgaaggccttcgatcttcaaaataccctttaccttctttctccggatctcttcctactctcaccgatgctccacgatccgccactccccatgagaaagtgttgatgtctgcaggttcatgcttcccagtgagacgcctctcgttgcgttcaccataagtagcaatgtgttgtgtgtgtttcactccaagcttctt

SEQ ID NO: 133068 - DNA, 677 bp, Arabidopsis thaliana
  unsure (1)..(677): unsure at all n locations
aattatttgggacgactatagaagagttatgaggtcgactgcacgcgtacgtaagcttggatcctctagagcgtgccgcccttttttttttcttttcaatacataaatacgtatccaggacgtgtacctactaatacatggtctctagtacaaaactatacgcagtgtcacatgcatactttactcatgtaggtcacaagttgcttctaaaaggtagacccctcacataaatctctgacacaaccgcgtgtgaccaagaattaacaatatcaggacattatacgattgtaatacattcagatgcattgtcacgaacacaaaaaagtatatatcatctggttggtgtcttagggacagacagatgagggctggagagcaagtgacagtacctacaagatggagaagagcttcttcttttcttcttcttttggggcttcagtgggagtttgatggcaatttccagagagattgggttgcgataagaatcttctctcttccatggaattcaggttctctctcgtgagtgggaaaagaccatttacagcatgaagccatctggcaacttatctaacgccttaggagagtctgggtcacaacctctcctttggacgaaaagtgtgtgcatttgtaccgttagtctactacgtacacctgattcgttggagtctgncgtttat

SEQ ID NO: 133069 - DNA, 805 bp, Arabidopsis thaliana
tttatagaacagctatgacttcgtatgcacccgtacgtaagcttggatcctctagagcggccgcccttttttttttttttttttgatcacaaaaggagacgattctcaggccctgatccattcaaatatgtatgtgcacaacagtgtacgtgtatatatagtctatagacatttaattcaatcttaaagaggaaccatcatcacccgcatagccacagaaatactcctcaaagatgctaatctcagactatataaaccagcattgtgtgacacagtatcccgcaaacaaaaacactgaatttcattcatgaatgtaacctacctgcgatggctgcaacctgaacctccatttgtgccgccctgactttagaacccgtggctcggtggaagaactgttctctcgacaacaacctcacattcctcaaatactgatcaaagggaacaacaccatcttgaaacgacttatccaaggaataaatagcatcttcaatggctaaatccaaagcagtacactctaacatctgcttagagagtgtgtcaccacattcaaaagcattatccacatccaaatcaactaaattcttggttttgccttggtttcttttaacccacgagtctagaatatcagtgttcatggagaaaatctgtaattgttggttcaaggtgtttcttttttccctcaacccattttttttttaaaccccttattattaaagcttcaataccttttttttttttttttttaagcgcccaatcttttggcaaaggcttacaaacaaggcttcccttttgtgttttaaaaact

SEQ ID NO: 133070 - DNA, 804 bp, Arabidopsis thaliana
cgctggatgcacgcgttcctacgcttggatcctctatagcggacgcccttcttccttttttttgtttattgcattcaacattcctgataaatataaagcattccatcatgaaaattcaaacatttcataagtatctactatatttgtaggaaaaagacatgcacctttaatatactctcacaaaattaaaataaacagagtattaattacgaaccaagaaaaggaaaaagataagaggagttaaccggcgattttgtaactcgggttagcgaggttctctaaaccggagacaacttgaatgggattcgataacatcaccaactttaagatcagctggaaaatcttcggtatcagtaacgctagccaaagacagcgtaacgaccatccaagatgttggaattgcttggggggcagctcactctcttttagcagccaaaacacttggcttgatcctgagtcattctcaaactcttctcttgccattgccattgtcccaaaagcgttgaaaggaatcacaacctgagccttgtaaagaccaagttcttcaagagttgagccgtaaaaaggcgttttctctccagtcaccataatctctagaggaaccgtcctcgttttctctgtgcttggatcgataaatccttccgcaggaccctctggatctcccgtttgtaccacaaatccatcagatctctggatctccatgccatcgtagaaatgcctctctaccaagtccacaaagtttccggcggtaacaggggcgttataaccatcaagaacaatgcggaacacacagtcctcgatcgg

SEQ ID NO: 133071 - DNA, 566 bp, Arabidopsis thaliana
  unsure (1)..(566): unsure at all n locations
tatagaagatctatgacgtcacatgcacgcgtacgtaagcttggatcctctagagcggccgcccttttttttttttttttaaaataaaataaacacacttttattggttgatttttgctaaatatagcattttatttcaatatattcgcgcattacactcgtagtcttggttacacaacataatgtaacaatttttccattgaaaaatacaaaaacataactaaactttcgtgtaggccgggagcttattcattatgggtcgagtcttacacaaggctcgtaacggcaccatcatacgcatagccatccccggaccctcactcatatcaatctctttttcgttcacctttttccaatcaaagcattgaattaacgatcctaacgctaatgtcacaatcttgtgcgctagtccaacaccgggacatattctccgtccgcttccaaacgctatcagcatacggacatcatctttttctccttctccaccggtgaactctcaggggtaaaccnctccgggtcnggtccaaagatctnggtcnctanggatcgnccacgggtcaccatta

SEQ ID NO: 133072 - DNA, 508 bp, Arabidopsis thaliana
  unsure (1)..(508): unsure at all n locations
nnnnnnnnnnnctatagaagagtcttgacgtcgcatgcacgcgtacgtaagcttggatcctctagagcggccgccctttgttttttttttttttttttttttttttttttttttttttttttttttttttaaacagaaaaaaaaaatcctacaatccccccaaaaaattttccttttttttctgtttcgccttcaaaaaaacgttcaacaacattaccgaaaaaaaaagaaggggcccatgatattgataatcctaatatagaaagaatctctgacctcttaaggaaatgcaaagattagggagtttgggttctctgtctctcaaggggggggctttagaactcgttaaaaaccgttcccaaacccatcaaaaaaaccaaagccttccctttcttttttttagaatgtgaccccaatcggggtttttctcattttccatcaaggaaaaaagactcgacttttttttttaaattttaaagcccgggtttagccttagggggcctttgga

SEQ ID NO: 133073 - DNA, 526 bp, Arabidopsis thaliana
  unsure (1)..(526): unsure at all n locations
cactatagaagtttcttgacgtcacatgcacgcgtacgtaagcttggatcctctagagcggccgcccttttttttttatttgtttgtatccaaaatgattctattttccattttcccggtaactgagaacagctaacaaaacagataaacctactaatagtgtatagtaacattactagatgacagaattttgataatatgactaatgtatttcccctagtgaatttaacttgtgaaggagcttgccatcttgcgttatctcacaagtcacacctatggctcaaaattgtcaatcatgtgttgtataacatctgctccagctgaattgatcatctttgttttcacctgaatggtattgtgagcgagaaatctttgcagcgttcctctgaaactaacatcaactcgttcccagctcactgttgcgaatgctcttatcatctcctcttccatatctaagtcctaagaaccttggctgcttgggcctgangtngccccaagtactgcagaccgggntcaaatccanggt

SEQ ID NO: 133074 - DNA, 799 bp, Arabidopsis thaliana
ctatccacgtcgcatgcacgcgtacgtaagcttggatcctctagagcggccgccctttttttttttttttttaagtaactttcttccttttgcttattcaatatagccatgtatgatttggagcacattcttccacttacaaggattggacaaatttgggtatgacgcgaaactatttcatgatatacaaagaagaaaagaaaaaaagagactaaaggtaaaggtcctgtaacgtgaaatggcgagtaaagaataatgagatgaaaaaggaagaaaaataatagaagaaacgaaaacgtaattagaaaggaagataggaggaatttaatacttcgtgattcaagaatcgatgtgaatggtaatttcgttttactctatcatttgttgatcggaatcgatgtggccgaagatgtctggacagtctacccatgatccatcctctcgggcttcccagtaaccccctttgtatcggtaagactcgcttcctttctccttcatgaaccacctcggcgtccatcctctctcctgcatcttccccgcctgacgttgtcgctgttccagccgcaacttttttgtgttggccatttcaaactctccgttctcgagatacctttgggtccggtcgcaagcctttaaatcccgtgggggcagcctctcctttaaccccaagtgtaagcttaattcaatgtgaattggaaaaaccgggtaagaaatataactttggttgcgttttcccggaaggttttggttccttttcccgagaaaatttgagcttcctggccctatgtttcccttaaaa

SEQ ID NO: 133075 - DNA, 978 bp, Arabidopsis thaliana
  unsure (1)..(978): unsure at all n locations
nnnnnnnnnnnnnnnnnnnnnnnnnnnnnnnnnnnnnnnnnnnnnnnnnnnnnnnnnnnnnnnnnnnnctttgtttttttttttttgggtagccacatctctttcacataagtaactttcttccttttgcttattcaatatagccatgtatgatttggagcacattcttccacttacaaggattggacaaatttgggtatgacgcgaaactatttcatgatatacaaagaagagaagaaaaaaagagactaaaggtaaaggtcctgtaacgtgaaatggcgcgttttgttttttgtgttgaaaaaggaagaaaaataatagaagaaacgaaaacgtaattagaaaggaagataggaggaatttaatacttcgtgattcaagaatcgatgtgaatggtaatttcgttttactctatcatttggtgatcggaatcgatgtggccgaagatgtctggacagtctacccatgatccatcctctcgggcttcccagtaacctcctttgtatcggtaagactcgcttcctttctccttcatgaaccacctcggcttccatcctctctcctgcatcttcctcgcctgacgttgtcgctgttccagccgcaacttttctgtgttggccatttcaaactctccgttctcgagatacctctggtccggtcgcagccttgaatccgttggtggcagcctctccttaagcccaggtgtaagctcattcaatgtgattgcaaaacgtgttagattatactttgttgcgtttccaggaggtttgctccgtttccagagaagttgagctcctgacatatcttcactcaatttcccttttccagaacaatcacccgtcacaaagtgtatgctctcatcccatttcccaaacatagttgccactgtcttcccactcttgtttgaactataccatgaacctgatgaggatttcggtctatgatggactgctccttgaatttaaggttacatgagta

SEQ ID NO: 133076 - DNA, 518 bp, Arabidopsis thaliana
  unsure (1)..(518): unsure at all n locations
tnnnnnnnnnnnnnnnnnnnnnnnnnnnnnnnnnnnnnnnnnnnnnnnnnnnnnnnnnnnnnnnnnnnnnnnnnnnnctttgtttttttttttttttggtttcaaactttcactgtctgttgtttgtataatacatacacttatcaaagatgttgaacacattgtacaaacggagatagctttgatgcgatttcacacaaattaacaagaaaagacaaccaaacaaagcatacaaacaaaggtagagtatcaaccttttgtgtacccaatatgatatttcttcaaccttcttcatcatttttcttggtcttctcaagttcaagcaaatatatcttctcagcttctggcacagccatggttaaagctcgaagcctatggttcaagtcgtcaagctttttcatcaccctatcgtttgtgaacattcccatacaaacactcttgatcgtgtcccaactttccaccaatggcaaaccaatgatcacgatggatcctatagttccccaagctattgccacaat

SEQ ID NO: 133077 - DNA, 656 bp, Arabidopsis thaliana
gtcgcatttacgcgtacgtaagcttggatcctctagagcggccgccctttttttttttttttttttttttttttttttttttttaaaaaagggagatgtaaaaaagtgaaacttgttcataattcaacttgatatccagacccccaaagacaaaacagattaaaaaaaccaaaatcttttgactaaaatatggaaagggttccaaagcagacgagattattactggctagcaccgagccatttggtgaagttatcaaactcggtgtaatcactgtcggagatcatagtcttgtaccacgacttgcctgctgctttgattgccaacgcctcctccttggtaacggttttcctcttcttggcgagcttctccttcttagccttaactctctggcgcttcagctaacaggggacatccctttcgggggcctagcataaggggtccaacttcaacatcacattgagattcttcaatggatttttcttaaaaacagcccttttcgcatcctttttgatcggattcacaacactttgaatctcatctgaattgataatcctggcaagatcagcattcaccatctttgcccgaggaagcccatacccctttttcttttctgatggctttttaaacgaaccatagattgactcaagcttttaaa

SEQ ID NO: 133078 - DNA, 607 bp, Arabidopsis thaliana
actatagaagatttatgacgtcgcctgcacgcgtacgtaagcttggatcctctagagcggccgccctttttttttttttttttttggaaaggaaaaagtcatgaaatctcttagtccaagagggacgtttcagaaaacaacaacaacatgcgaggtcaaaatctcatacaaacaacgacctcaaaacaatcagcgaacgttcaattcttgacccgtaacaagacagcattaaaaaaagatgaaataaaattttccaatcgggagagaaaacaggcaaagagtgatcactttgggtaagcgggaggaggaggataagccccaggagggtattgagaataagctgagggaggagggttttgaggatagccagaaggtggataaccttgtggagggtgttgaggataaccagaaggtggataaccttgttgtggaggataaccgactgcgggtggggtggcttgatcaaaccgtgacatttgctgagccggaggcactgccattggctgtggcccgaacttaccgtccctcttgtccatttccatcttgtgttgtgtctgcatacatgcgcaaaccgtgcagtacaccatgtcagagcaacatgtgagta

SEQ ID NO: 133079 - DNA, 847 bp, Arabidopsis thaliana
  unsure (1)..(847): unsure at all n locations
actatagaagatctatgacgtcgcatgcacgcgtacgtaagcttggatcctctagagcgtncgccctttgtttttttttttttttaattgaaatctctggttaagtatcttatattaagattaatatgtatatatgtgtatacaatgataaagaagaatcataagctctaagtaaggcttacactaagacaagaacagagacataacaagaccaatcccatgagcgactgtgtttcgaccttactactcgaatatattgcaagaacctacagagcaatatgttagagagctgtgaagtaacttcttggctgggttcttgattcttcaactgagccaagaactcgaataaatcatctgcaaatctgaaaaattcaaccaaaatccaccaagccctctcaactcagtatttcgtctgtaaaacctcccgactcttttttttgtgcaacctcccgactctttctgacaacacaacctgagagagttatgaggttggtaataatccataccatcgcaggttcacttttcgctttgggtatctcctatgaaccgttaaccccatttagttgatgccttggcgagggttttactcttgtgtctctttaaaagcatccacatgtgggtaaaacaattcgatctgacttgactaccttgaaccacacaaaactcatacccgacacttctctcatttaatgctacacaggctttcctgaaaagaacctagaaggaacagagcgcatgtgagataactgtgttcatcccaggcagtcggcggtcggaagaagagaatcagacgactcatcccgccgggcaaacggagtatcagtgtaataaaaggtgatcgcgccta

SEQ ID NO: 133080 - DNA, 863 bp, Arabidopsis thaliana
  unsure (1)..(863): unsure at all n locations
nnnnnnnnnnnnnnnnnnnnnnnnnnnnnnnnnnnnnnnnnnnnnnnnnnnnnnnnnnnnnnnnnnnnnnnnnnnctttttttttttttttttttattgaaatctctggttaagtatcttatattaagattaatatgtatatatgtgtatacaatgataaagaagaatcataagctctaagtaaggcttacactaagacaagaacagagacataacaagaccaatcccacgagcgactctctttcgaccttactactcgaatatattgcaagaacctacagagcaatatgttagagagctgtgaagtaacttcttggctgggttcttgattcttcaactgagccaagaactcgaataaatcatctgcaaatctgaaaaattcaaccaaaatccaccaagccctctcaactcagtatttcgtctgtaagaacctcccgactcttttttttgtgcaacctcccgactctttctgacaacaaacctgagagattatgaggttggtaataatccataccatcgcaggttcacttttcgctttggttatctcctatgaaccgttaaccccatttagttgatgccttggcgtggttttacttttgtcttctttagagcattgactgtggtaagatcattaaacttgacttggactcgcttgaaccacacaaagcctatgagctgatccttctctgatttttctactaccacatggctttccatgaatccaaccattgaaggaccataagcggactggtgtcttaactgcttgcttgcacagtgaccggtctgctggcagtatgctgaagtgtttgtgttcacacgtgtctgactaccctacatttacttttgtgtgaggctaagctcgc

SEQ ID NO: 133081 - DNA, 639 bp, Arabidopsis thaliana
taggtgcaactatagaagagttatgacgtcgcacgcacgcgtacgtaagcttggatcctctagagcggtcgccctttttttttcttcttttcttccatccttttctttataaatttgatcagtatataaattttatttttccatcctgaacaataatatcatcccccattgtgcaatagacaacaatttcgaagctgaaactaagaaagaaaaaagtaaccatttgtctgccttctctgttttaatcagaatcagctttgattaggattaacacagctttctttcaatccaagaagcacttgatcccagacttggtgagctctaaatgaaagcttatccatatatatatataaaatcaattggggtattagtgtctcacttggcagtcttttagctcttctggttcagactctaacttgcatgggagaacgatgatggaactctcactgttggcttaaaaccattaaatagactggtcctaagtgtcctgaaacaacctcctaatctgatcaacgctggctggaatcaatgtcaccggacatcgcttgtactttgaaacataccttaatacgcaggatagcagaaaacaatccagagacagtgacaactgatggatttgcacgtttttgcaagcataaa

SEQ ID NO: 133082 - DNA, 994 bp, Arabidopsis thaliana
ccactatagaagagttatgacgtcgactgcacgcgtacgtaagcttggatcctctagagcgtccgccctttgttttttcctttttttttttttttttttttttttttttttttggagacaaatacaatgatgttcaaaataactttttcttcacgtcatgcaaatgaatagaatagacaacaaacatacattgccaaatgccaaaaacgttcaaattaccctattaataccaataagaattcacaaaaacgtctttttcatttcaaagaagccaattaacactaatgttaccaagccatatcaaaagtgggaactggaccaaggctaaaaacagaagaaggtagggatgtttgctcaaatcgtaacttcttacttcagcaaacagaacacgtttcatcgtcttcaccaagaaaatcccagtgcatagacaagtccatggcattaacgcgtattacgagtattcccacattattttggcaaaccccgcagaaacaaaccagcaaaagcttaccctccctttgccacaatatttataaatggcgcctctccactaccaagtgaaaaaagggtactttgaggagcattacttggaaaaacaaccaaccattcctttcacaaaagccaattaaaagcttccggtgaaactttccattagtcccaatgaaggaccacgaaaaaacggaggtccaaaggcataaagggaaggccaaattggagcattattcatttttgggggctggtgagacccacccaactggtcaaatcttgagcagtgcccgggaaggaagaacacaacacctcgttattccacattaggcattctcggatagttggggacaaaaccccgtttttgtctgaatccaagggaccaaatgtcgcctcctccacccgggaaaccagcccggggaagtaccagacgccaggggcggtggtggcggggggcctgtttgtgggaaagggagcacgaaaaaggaggcggggagggcgctggggg

SEQ ID NO: 133083 - DNA, 774 bp, Arabidopsis thaliana
  unsure (1)..(774): unsure at all n locations
nnnnnnnnnnnnnnnnnnnnnnnnnnnnnnnnnnnnnnnnnnnnnnnnnnnnnnnnnnnnnnnnnnnnnnnnctttttttttttttttgttttgaacttgatcctgtatgatttatgaaatggtaatctaccgcaacatgtttcatctgtgaatgtaactgatcgatcgaaatcaataatacggtaagtgtggttcattattaagtatatacacgttattgtactttagtttttgagaccaaaaatagagaagctaagctattaaatccaaaagatgatggtttttattgaatccagtagaagaactcttgcctgagccaattatagcctcaaagttcaccatcaaactcaaagagtcaccgaactaaggtgtttgtatttagaaaagattcaccaatattctcctccacctacaaacgacgacaagctcgagtcatcctcaatctccaaatatgcatcttcatcttcgtcttcttcttgttcgtcttcgctttcaccttcactttcaccttcagcttcaccttcacctttaactggccaggggtggtgagactggttggcatgaaaaactatgaaattgatagtcatttatcactttagtcttgggctaatcttagtcatgttctagtccattatgaattaggataaaattacagttggaaaatgttagaaagtacctggccaggagaagtaagtatcaagctcactttgagatagaactctgggagaaacatccanaattnttaccacatccttttatcctttggactgagc

SEQ ID NO: 133084 - DNA, 768 bp, Arabidopsis thaliana
actatagaagagttatgacgtcgcctgcacgcgtacgtaagcttggatcctctagagcggtcgccctttttttttttcttttttgcaagtaacaagtaaacatgatgaatatatcacaatttataatttaacaatccaaaaaactaacaaatcgaaatttagcaaaagctttttgattttgattacattgatttcattcatagtttgagtacttcactaagtaaggatctaaatttatattataaaagccttaaataaagatttgttcttttcaagacgattccaaaataagatcagcaacggcggctccggcgagatcagcggcggagagagaatgattatgatctccttcataagtaacaatcaacatggacgaatcatcagctgctctctcaacatgtttacgtgctggacaacctcttacgctactacacttataatatcctcttggatgtggagatcctttaattggtttttgtccgtatttcctccatgaataatcgtccggtggtacatcgaacattgttgcacttatcgccggaaccctaatattctcctctgtttatctttctttcttcgagcaatgacacgaccggaggaagaagcggaggcgcattttccggtgagaagatctcagagttacattttctctttgttgattttgagaacacgagactgtcgtggagaggctttgagttgagacgcaacggcgccgtttagagggacgttgatgagatgaatcttctctggttgttgattccgtgtaca

SEQ ID NO: 133085 - DNA, 746 bp, Arabidopsis thaliana
acgcccgtacgtctaggctatgcttttataatgggaccggcccctcttcttttttgtttttttttaaaatgtttttatccataaaaaatctttatttaccattttaagaatggggttataaactaggacggttatccttatcaaaattcctttacttgccaaactacaaagctgtggtggaggccatattacgcttttaaattagcctacaatagccttgcaggaaaaccattgcaaaaccgattcaatagtttgaggtacacgaaacgttcattcagaataatcatcctcattaccatcactatattgattggcatcttgttccggctcgtgtttccaagatctaccaaggccgccttcgtcctctaatcttctcatcttggagctcgaagcaccaaccctagaagagtaaacccctgaatctttatgttctatcactgatacagttgatctccgccttacagttacccttgaaggtactggaaagtgttcaatctcatcagaagatcttccttccctggcccttttcttcctcaagttcaacctcatgggtaggggcagatagctagcgggcccattgtcaaatgataccaggtatgtgccaagatcgtttgcattgggttgtacattccagaggtattttcgaaccccagtgtaagaaaatttttgtcgaaaagatacatgggatttcccttaaaaaaacttattccaagggaaggaacccatgttccgccaaaaaaattttt

SEQ ID NO: 133086 - DNA, 554 bp, Arabidopsis thaliana
  unsure (1)..(554): unsure at all n locations
cgnaaatggccaattcattaattatggacgtgtacatgtaaaatcgtttttcaacttcgccagctatccaaatcaaaatttctttacttgccaaactacgaagctgtggtggaggccatattacgcttttaaattagcctacaatagccttgcaggaaaaccattgcaaaaccgattcaatattttgaggtacacgaaacgttcattcagaataatcatcctcattaccatcactatattgattggcatcttgttccggctcgtgtttccaagatctaccaaggccgccttcggtcctcctaatccttctcatcttgggagctcgaagcaccaacccttggaagggtaaaccccctggaatctttaggggtccaatcacngatacagttgatccccgccctaaagttacccctggaagggactgggaaggcgttcaatctcatcagaagacttccttcccgggcccttttttcccaaggtcaacncatgggaggggggaaannangggcccatgncaaaggancaggatgggcaggacggttgatggggggaat

SEQ ID NO: 133087 - DNA, 748 bp, Arabidopsis thaliana
  unsure (1)..(748): unsure at all n locations
actatagaagagctatgacgtcgcctgcacgcgtacgtaagcttggatcctctagagcggtcgccctttgtttttttttttttttataaggaacttccagagacattaattattatacaaaacgaccatttttgttctttacaattgaatagacaatactgttttaagcttttcacacttgtgatctccccgaatgtgaacagatcaaagagttattcgtcgtgggtaaatacattctctaccttaagagctaaaaacaggaaagagaagagtgaaacacagaccataaccagcatcactatgagcattgcttgcagtgatatgtacgggcttaggaagaacactatcgctattgctgcgctctgccatacttttagctgcgcaaatgctccttccgtgtcatgtttgaagagtaatgcgagaagagcactgatttgagtatttaatattccatcaccaattcctaatatggccgccattataagtgggtaagctgngccaagtactccgctagtttgcctgtacccgagaagatgccagagaaacacagaagcttgagcacagctccaccagaaactatgaaggggatcgatgacanaccagaggtaaaccttccagcagtcatttgacaaactgcatcaagagctccgtagactggcatcgccccaccaacacctgagacaccaatcgccggcgtatcaatttcctttgaaactcagcccaacaaatgcttgttgcattcctgata

SEQ ID NO: 133088 - DNA, 759 bp, Arabidopsis thaliana
  unsure (1)..(759): unsure at all n locations
nnnnnnnnnnnnnnnnnnnnnnnnnnnnnnnnnnnnnnnnnnnnnnnnnnnnnnnnnnnnnnnnnnnnnnnnnnnnnnnnnnnnnnnnnnnnnnnnnnnnnnnnnnnnnnnnnnnnnnnngggccaccaaaaaggagaaatccctgaatgttcattccctgtatttgatgtcttgggggttagattttgtaaaaatctttactgatgagaacatgatcaacttgcaagaaaactatgggtctgggctcaaacacagagggtaaatactttatgaggccttgggttcagtaacaatggttccaacaggtttgacagcatctctaatcacattggagtaatactaagaagaaggctgcttctcctgcaacattctggaatgttgttctaagtattctttgctgttcatctccgttaatctgctaatggggcggtctttagcaaaaccaagctcgttgtccacgcaaaggtcgggatcatcactcttccttgatcttgaagaggttctaggtgctatttgctgtgcatcagagattgtcactattctctccagcagttctagagggctaccttctgccgtgcatagaaacctggccttgttctcatacattacatcaaccagtgtcacaaagcggtaagctgcagtcctattatggagcccgaagaagggtacaccttccagagccaaaggttgaaatttcttgaataatccagataatcggctgcgcctaggggtctttacacagctcttcaaaagaaggt

SEQ ID NO: 133089 - DNA, 796 bp, Arabidopsis thaliana
  unsure (1)..(796): unsure at all n locations
taggacacactatagaagagtcttgacgtcgcatgcacgcgtacgtaagcttggatcctctagagcgtgcgccctttttttttttttttttttttttttttaccaataatttcattttggtttaagaaatttcaaaggacaaaagcacctttaagattcacttctctttgacttttgacagtacagaagtactagtacaatatttaatctagggatcttcatgaatgatgactaatgagtagtatgatagtcgatgatgataacaatgtttgataatttgctttgtcaattttctcccaaaaagtctttgggaataaatcagtcaactcaagctcaaaatctaacacgcgcgagacaaaaacccgacccgtgacccgaccaagtcataagcgacccggaaaccttgttgctgtatgtttccaatgattgacaaactccccatagttccggcaaacgcaaaacagaaccgtccttcagtgttaaccgggatcagataattactcgccggaagcgaaacctctccgcctccgaaatgaaacacaaccgtcggaaccttcacagtcgtcattcccgagagatcaaaacacgtgtcgaacaaagaatacgatggagcacgtttcagcttcgtagcaccaagtctaaaagcgtctctaagcgctacgtaagcaggttgcgtcagccgagtaaccgaagtanccggatctataatgacaccgccgtttccggtggcgtcaagcttgaactgcgactccgaaacgccgggaacgcgcgaccaccaacgctgattcaagaagct

SEQ ID NO: 133090 - DNA, 730 bp, Arabidopsis thaliana
cacactatagaagagctatgacgtcgcctgcacgcgtacgtaagcttggatcctctagagcgtgtcgcctttttttttttttttgaaaccaaaactttagacagttgcacagcaatactaaaaccaagagttcaaaatcacaaatacaatgctcaatcttgcaataaacaatattataagaaatgtgcagaactaccaaaaatcataaaaacttcttctgagttctgaccatcaaaggctccaaagtgctaaaaaagggttccatagtgaactacaatcacccagaatgggccgagcaaccaataataggagttatgagttcagcaccagtctcatgatgatgttatttcatttaccaacctttctagaaataggataagcaaaatatagtacaagaccagctggaactgcgaaaagtattgtgaggaggaagtaaagggcaagacttatgaggctaccaggtatagcaaagaatacgatcagaaggaagatgatcacaaacggaaacttggaggtgaaagagatgaaaaaatcaagagatttgtgaaaggagatgagttgtctgcttggttggttactgtggtcatgatgtggcaaaaggtctgtagactggttacgcaataaaggcctcgcaaccagattgttgttgctgatgtgggttcccagagacatgctacacctcggagtcggacgcattgctggttatagtgccaaggaacatgacttgcct

SEQ ID NO: 133091 - DNA, 543 bp, Arabidopsis thaliana
  unsure (1)..(543): unsure at all n locations
nnnnnnnnnnnnnnnnnnnnnnnnnnnnnnnnnnnnnnnnnnnnnnnnnnnnnnnnnnnnnnnnnnnnnnnncttttgttttttttttttgaacaaaagcaatgtttatgagtaaacgccaagaggacaaaatgtagaacacattgaaatggtatcaaatactaaaacacactgttccatatattaatgcacaatatcactaagagctgccatttataccagtggaccttcacggaccatgtgactgcaccgcttcttgaaggctcttcacagcgctttcataagtcacaaaccccataaaccagaactcgtggttgtcgatggaaatcacttgtatgtatttatcagatgtgttcactctacttgttgatgggttcactgccttcagctgattcgccggaagtaccaccttgtaatagctccacagggtctgctcaccctctttgtaagagagaggattgtcactagagaacgcaagcttgtgagtcgaaagatacataactcccaggacaggaccagcagatgtagacaagtagcaagcat

SEQ ID NO: 133092 - DNA, 572 bp, Arabidopsis thaliana
  unsure (1)..(572): unsure at all n locations
atagaagagctatgacgtcgcacgcacgcgtacgtaagcttggatcctctagagcggtcgccctttgttttttttttttacaaaatgaacactgctgcatttaaaattctttcaagtaatctcagctttcaaagtcacaaactcaaattgtagttttgacattggctcctctgtcgagtttggtccaaacaaaactagaaacaagccatacataggattaaaaatcgatgcacgacataaaaagagtaattggaatagtaaaagaccagaaaaaaacgattacaccttaatatatattctcagagagctaagattgcagagacccaaacggtacggaggctttttggaagacaagtcacactctccagaatcagcatagcctgaataacaaatcattcttccatgcgatctccagcgccggatcctttgacatcaacagagaacgagttctcttggtcacaccccaagtaagagtcccacatggaggatagggggggaattctttnnccccgggttanccngggngggggaaaccggttcacnttaacttccgngggantggaaccnttgnt

SEQ ID NO: 133093 - DNA, 479 bp, Arabidopsis thaliana
  unsure (1)..(479): unsure at all n locations
ggtgnnnnnnnnnnnnnnnnnnnnnnnnnnnnnnnnnnnnnnnnnnnnnnnnnnnnnnnnnnnnnnnnnnctttgtttttttttttttaaataagaacagtccatgcatttataattcgctgggaaataatatcccacacacaggccatgcattaaacaaataatatcgtattcgtaccacacacacattaatatagaaagagagagatgagaggatgaatactcataatttataaactctcacatgttacctccttgctgatcatgaccattgtgccaaggaagaaaagtcccatacgaccctccggtgccacgtggcatctgattcatcaccggacttgcccccgaaagcctataaaccgggttcaagggaggcagttgctgcgacggaagcggctgaggctgaaaaaccaagtccacgacgttgccaggtgctccggcggctgatgtggacaaaccataatgtgccaagtcagcat

SEQ ID NO: 133094 - DNA, 526 bp, Arabidopsis thaliana
  unsure (1)..(526): unsure at all n locations
nnnnnnnnnnnnnnnnnnnnnnnnnnnnnnnnnnnnnnnnnnnnnnnnnnnnnnnnnnnnnnnnnnnnnnnnnnnnnnnnnnnnnnnnnnnnnnnnnnnnnnnnnnnnnnnnnncccattaaaaaggaaattttatgtaaaagcactcaaatgaagttgtcctaaagaagcataaacaccatttttgatattaataaaagcctaatgctttccccttctccacgatgactccattcttaaccactgcaattacatgggggttcttgattgttgataaccgatgtgccaccaccacgggggttgggttaaccataacccggtccaatgcatcctgaaccacacgctttgactcagggtttagagcacttggggcttcatcaagtagcaacactttagggtctttaacaattgctctggctatggctactctttgtttttgcccacctgataattgaactcctttttcacccaccattggttcatagccctgttggggtccactgatgaagccatgaccgttagatag

SEQ ID NO: 133095 - DNA, 491 bp, Arabidopsis thaliana
tatagaagactatgacgtcgcctgcacgcgtacgtaagcttggatcctctagagcggccgccctttttttttttttttaatatgattttagataggaaaaattagcactaatggtttcaaaagaaacaaacttacttcatttattttattattttaatttatattatcatgaggttctaaatctttacccataaatattctttcacaatggaatattttattgtaacataaaacaaaaataaaatatcactaaatcttagtgacactaactttgagaccatgttgcatgcgaagaagaacggaaggaactggttttggtttgtgcccttcaacgaccttaatgtcatagtttctaatgatttcgaccgctactgtcttcatctgcaagaatgttaatcttttccccaagcaagttcttggaccagcgttaaacgccaaaaacttatatgaagactcttgtctcaacattccactgtctgaaatccatctct

SEQ ID NO: 133096 - DNA, 616 bp, Arabidopsis thaliana
  unsure (1)..(616): unsure at all n locations
gtgnnnnnnnnnnnnnnnnnnnnnnnnnnnnnnnnnnnnnnnnnnnnnnnnnnnnnnnnnnnnnnnnnncttttttttttttttttgatgaaatggtttgcctatttgaagggttatttacaacccgcgtgtttatccgtttccagaggcaagataatgacgattttttacaaaacaatgtcaatggcattactctgtaactttttacaaaacaatgtcagattttgttataaacttctaaattaatagtagggattagtgcagaatagtagagatgaacttctcaggcttggataagaggttaccagagacgaagaagataacaagacagaatatcattaatggtgatgcaaaaaaaatcaaatgacggaatgtaattttgccaaaaaatttttgctattagtcggtaaactccgtggttcctttaggagggttcatgaagctgggctggtttgtagatgacaacattcgcgcccacattctatctgtaatcacaactttgttctgtctttcggttattcggttaaagggaatgtaggtgtgccttccattaacaagaccagngncaaagccggtatagccagccattgcaccatggactgcgctttgggcaagg

SEQ ID NO: 133097 - DNA, 516 bp, Arabidopsis thaliana
  unsure (1)..(516): unsure at all n locations
nnnnnnnnnnnnnnnnnnnnnnnnnnnnnnnnnnnnnnnnnnnnnnnnnnnnnnnnnnnnnnnnnnnnnnnnnnnnnnnnnnnnnnnnnnnnnnnnnnnnnnnnnnacgagtagagagacattcatataagaagcacatttacaaagtcttaaaagttcattataaccatagaccaaaaggctagttagacaacttagcttattcatttccacccatcgaccaaaaggcttgttagacaaagctaattctcacacgagaatccaaagtcctaaaagttcattagagtagatagaaagatgaagcctaagatagataacaaaataaggcattacatcttcattaaacccgagattaaacggataaacatatacaatccaatagcttcctcttcttcttcttagttggtttgagtaagcactgaagtcacctccttcaaaacatccatgttcgccaacaacaactcacatttcttagcatccacaagcttcatcttctcttgaatcctcttcttagtc

SEQ ID NO: 133098 - DNA, 504 bp, Arabidopsis thaliana
atagaagagctatgacgtcgaacgcacgcgtacgtaagcttggatcctctagagcggccgcccttttgtttttttttttgatgaaagagttttctacttcttggttaaaggttttcatttgtaaaccaagaaaatcgattcaaatacaaccttattctgaatgaagattcaaatacaaccttacacatgtccaacgagtgaaattacttaaaataataacgccttctcttctcttcacgagtgaaatattttctcaaagcaagagagtacatattccacgtcgacgtctgagatttggtggtgtagaacaatcctgattctgaatgtagcttggggtatgacaagcacaccgacatcttccaagctcttacatgcctcttctgctccaaattttggatcttctggtatgtctacgtatatgatgttggtttccacagctgcaacgttcactcttaaccgttcaatccggttcagtccttctgccaaaaccctggctttcttatg

SEQ ID NO: 133099 - DNA, 513 bp, Arabidopsis thaliana
  unsure (1)..(513): unsure at all n locations
nnnnnnnnnnnnnnnnnnnnnnnnnnnnnnnnnnnnnnnnnnnnnnnnnnnnnnnnnnnnnnnnnnnnnntgtcttttttttttttttttttaatcccccctcaatactaatttggtgaaatctcaagtggtgtaaaatgaacccaattagtatccacaatgtgtttctctgatcaatccttaaaatttgccacgaatccatacaattccaaaatcaagcttcttggttgttctcgatgagtatcttcttgcaagcttcataacacatgaaggagattccagcagcaggaaccaacttcaagcaactcggtccaagccctttgtaccaaccgagaataccttcatgctcaagtatggtcaccagagcgtgcaacatgttcttgtacacaaccctcccgctaacagctcccacctgcatatgcttccgggccacttcaagagggaaagttgcagtgctcgatagtgcacctgctaaagaacctatcaaaagagtctcaatgtttccaatcttct

SEQ ID NO: 133100 - DNA, 526 bp, Arabidopsis thaliana
atagaagagctatgacgtcgcacgcacgcgtacgtaagcttggatcctctagagcggccgccctttgggtttttttttaaataacgaggttttttttattaggcgacatcactgatactttaatttgagtggacgtctacaatatatcaatccctggtgttcatcatcttcaccttcagaatcagaacgaatgtcctcagcgactttgcctttggcacgtttttggcttatgagcacacgatatatcaagatccaccagtagatggggcagaatctgtaagcaataaagaagtgtgttgaagacatagtacaaaacgttaaggggtggtccggtttccatcaaacgctgcttgtcccagtactccgttgtcactcttatagacttgtactggggcttcattaggatccaggcacggttattttctgagtctcgtacggggtccactccaagaaaaattaggccaaccgagcctcttgtcatagcgtccgggcgccctcggctgcgcccaccgagggcatgtctaaa

SEQ ID NO: 133101 - DNA, 657 bp, Arabidopsis thaliana
  unsure (1)..(657): unsure at all n locations
ttagaagagctttgacgtcgcccgcacgcgtacgtaagcttggatcctctagagcggccgcccttttttttttttttttttttttggcaggtaattgaggcaaaacctctttgcactggaaaattcaaaggctacacaacatgtttcttccaagtcccaatagtaaaagaaaaagaaaaaaaaaacagcagaatacgtatgtacacattacgattcccaaaactgacaagagtttgacctctctctatatggtaaattccttttgatgagtgttgttattattattaccaccttctctcagaccttgaagacatagatgcaatgttctctggacactatctgcaaccaacttgagttttccctgagtcaaatctcctgcagcagaaccgttgacttccactgtacggctcactctctgtttacatttctcccaatcgtccactcgctgccaacaagctcgacctccatgacttccttccattccaagaaacgtcacgcaggggttttcggccaaatggggnnctaaaccaaacnggtncncggaaggggaccagggggnccncagcggggttattggggggntgncccngggnnaaganaggggtngggaaggaccgggtttggggggcgnatggattggttnggggcaatggntgc

SEQ ID NO: 133102 - DNA, 523 bp, Arabidopsis thaliana
gcacgcgtcgtaagcttggatcctctagagcggtcgccctttgtttttttttttaattactacatgaaattgcataaaacttattcattaaattaattattgaaccaaaagatgacacacaaagaaactgaacaaagatgaataaaaaactcaatcccacttgctctttaacttatcaacatgcgtaaactcatatgtcaacaccaaactcccatccattctcttcaattcgaagctctctatcaataccaaacatcgataactcttccaatgcgatgacccgccttcaaatctctctgatctcttaatgttagatctttcaccgttgtttaaccatccgaacctttcctcttcccatttcatcctctccacgacaacagacccaagacctatcttcttgtcttgtctctcatcccctaaaacactaaaccaaacaaatccaccaccacttgtctctctagaaatagtttcttgtccctcaagctttaccacttgtgtttctacgtcaacatcaactacaacc

SEQ ID NO: 133103 - DNA, 543 bp, Arabidopsis thaliana
  unsure (1)..(543): unsure at all n locations
ggtgnnnnnnnnnnnnnnnnnnnnnnnnnnnnnnnnnnnnnnnnnnnnnnnnnnnnnnnnnnnnnnnnnncttttttttttttttttatataacatactctttatataagccatcttacatttttaaaataacagtttcattggtactctctattatctactcccttaaaagaacctttctcacaaccggtctcaaaattcacaaccgaggaaccatgcttatgctccgtagcttcattcgccaagcgccgccactctacggccttctctcgcattttctttcccttctctctatccattagctctctaaccactgtctcgacctcctccctcttaacatctccaccaatctcgacaccaactccccactcatcacaacaaaacttacaattcgtttgctgctcggcaaaaaacggccagcatattatcggaacaccaccagagatactttcgagtgtcgagttccacccgcaatgcgtcaagaaccctccaaccatagggtgggaaataactttttcttgagaacaccaactcaccagcatt

SEQ ID NO: 133104 - DNA, 655 bp, Arabidopsis thaliana
  unsure (1)..(655): unsure at all n locations
atgatttgccnnnnnnnnnnnnnnnnnnnnnnnnnnnnnnnnnnnnnnnnnnnnnnnncgtgcgnaagcttggatcctctagagcggcctgcccaagcgggggacctctctttttgcttaactatagataaaagataggataaaatctcattaggaataagaaaaacacagaacataattaagattataaataaaagccaactaactcaaaattctacagttattgctacaccacataaagggtttacgatcatgagtcatgaccgcatgatcatcccaaacccgacccggaatcacaacgtatccatttgggtcaccacgatggggctccgaaccacgtgtttcccaccatcaaaccacgtgactgacccaaacacagcacctgtttctcccaacacaacattccttgtattaaccgtcactgtaaccgcatagctccgtctcttaacggccgaagtaaacacaagcctaggtgggtttcactgtcaccgtcactcctctcggcgactctatcctcgcccgataaaccgcctcagcctgcccgcccttcgtcgccgtcctcccncgcgtccgcggncgcgtgggcggncgcgtgggcggncgcggcctcgcccgcgtgggtcaacccgggaattccggnccggtacctgcaggc

SEQ ID NO: 133105 - DNA, 524 bp, Arabidopsis thaliana
  unsure (1)..(524): unsure at all n locations
nnnnnnnnnnnnnnnnnnnnnnnnnnnnnnnnnnnnnnnnnnnnnnnnnnnnnnnnnnnnnnnnnnnnnnnnncttttgttttttttttctttcaacttctatttttttgccttcataattgcggttttataatgaatacaagtatgaaacattgtttcctctcattttgcttaactatagataaaagataggataaaatctcattaggaataagaaaaacacagaacataattaagattataaataaaagccaactaactcaaaattctacagttattgctacaccacataaagggttcacgatcatgagtcatgaccgcatgatcatcccaaacccgacccggaatcacaacgtatccatttgggtcaccacgatggggctccgaaccacgtgtttcccaccatcaaaccacgtgactgacccaaacacagcacctggttctcccaacacaacattccttgtattaaccgtcactgtaaccgcatagctccgtctcttaacggccgaagtaaacacaagcct

SEQ ID NO: 133106 - DNA, 529 bp, Arabidopsis thaliana
  unsure (1)..(529): unsure at all n locations
nnnnnnnnnnnnnnnnnnnnnnnnnnnnnnnnnnnnnnnnnnnnnnnnnnnnnnnnnnnnnnnnnnnnnnnnnctttgggtttttttttgtttttttttttttttaatggagtcaccgtagctgcgtaagctatggcaagaaagtaaattttatcttccttaaatataaaaagcattcgttcataatctttatttttctctaggaataatttcgactgtggaaagtagaaacatattatatgaaaccaaccgcttgcaccatggaatatgaaaagtagaacttggttatgtagtgcattcacgtttgcgtgtgatcggtgatggagttttagttcttgtggactccgagccttagcctgaagtcttcttccataagtggaaggccttcacgaagcttcacctttggttcccatcccaacacttctttagcctttgtggatggccggcttcctctggcttggatcatccgggtgtggtctcaaccatctttatctctatgctgcgggttaatcagctctttcactgtctc

SEQ ID NO: 133107 - DNA, 765 bp, Arabidopsis thaliana
  unsure (1)..(765): unsure at all n locations
nnnnnnnnnnnnnnnnnnnnnnnnnnnnnnnnnnnnnnnnnnnnnnnnnnnnnnnnnnnnnnnnnnnnnnnnnncttttttttttttttttgcgtgaaacattgattttttatacacactcaagcggtcaaatctcgtcgacaaaacaatacaaacgttaaaaagattaaaaaaaacctttccgctttcttttatctcacaaaggcctctccgattaagtaacagagattttttttagtatttggcctattggtaaaacattatcagcaaaattttagggcaagctagagtaaaatgaccctttttaaatgatatcttcaactattcttttctttctgcacaacatccgattctcttaggcttctgtttctccagctttggacaaaatgtgattccgcaaataagtggtacagcaaagaagagtatataattcaagaccgtaaactccatccacgtgcagccaattcacgccgtattctcgtagctgcctctgctgtgtcattcaatggcggataactccaactttccgacatatcttcgaaacctgtaaatgagcggacaactcctcgctccctcaaagacttttggaattctgcaatcttccatttacagtgatcggctccaacaacgtacactggtttcccggtgctaacaagcttcgcttatcagactgactgaatctgctgtcaccaaaaaagcatcaccccaagctagatgccccatgtaaggatttggttcttggccattccatatgtnaactttggg

SEQ ID NO: 133108 - DNA, 524 bp, Arabidopsis thaliana
  unsure (1)..(524): unsure at all n locations
nnnnnnnnnnnnnnnnnnnnnnnnnnnnnnnnnnnnnnnnnnnnnnnnnnnnnnnnnnnnnnnnnnnnnnttctttggtttttttttttttttgccattcctgtcgaacataaactgataaacatggaaacataatccataaaaagaaaaaaaccttttccacacacaaagaaatcataatatgacgagctatttccgaaaactccaatctcaacaaactacaaacaaatttatagacacaaacacattttagacccaaccttgtttgtattcgcggaagagatcctcagtctgagcattcctaaacgcgcttcaagcaataacataaacccatatgagaacaacgactgggatgataagtttgagatttgctttacgccattcttttctaaggtttcccaataaaccagctttgcatgagttgcaatggtaacaaagctggctttggtcattgctccattagaacaggctgggtctgcagccatattggttggatttagccacagggttgggttcacaaagtt

SEQ ID NO: 133109 - DNA, 565 bp, Arabidopsis thaliana
  unsure (1)..(565): unsure at all n locations
nnnnnnnnnnnnnnnnnnnnnnnnnnnnnnnnnnnnnnnnnnnnnnnnnnnnnnnnnnnnnnnnnnnnnnnnctttgggtttttttttttttttttttttttaggtcccatgagaaacccttattgatatttgtttaaacatgacattaagattcactatgagagagatgatcacaacatatatggttcacaacttcacaagaaaaaaagatcagagatcgaactaaatgtacttgttaggagatcatatgcattgaagatctgataagtccatgaaaagtatcagtcgtttctgcaagaaatgtagctagcaagagctaccagaggcgccgccttgtcagactcaaaccctagaagctgctcctcggcttctctgctcagtttctccgcaacttccctggatctctccaaacctatcagccttggatacgtcagctttccagccattacgtcttttcctgcagtctttcccaattcctctgtagattttggtacgtcaagaatatcatcaacaacctgaaacaatagtccaatacacctagcatactttctaagcttttcgatc

SEQ ID NO: 133110 - DNA, 782 bp, Arabidopsis thaliana
  unsure (1)..(782): unsure at all n locations
nnnnnnnnnnnnnnnnnnnnnnnnnnnnnnnnnnnnnnnnnnnnnnnnnnnnnnnnnnnnnnnnnnnnnnnnnnnnnnnnnnnnnnnnnnnnnnnnnnnnnnnncttttttttttttttgggttggcatagacaatgctttgtttactttcctcaaaatcatatacataccaaaaagaaaagttatatgttatatgtttattttcacaaacaaaaataaaaaccattattttattattttattctaaaatgatgattgatgaagactaattggcatgatcatcttcgttggaagttgagtttgcccacgaagaatgcaaacatagaagctaaggcaatgggaaaagcgatttgaacaaccgcggtaaccgccaaaaggtcatgatgaaatccaaaatagtctttcaagaatcttgcaaccgtcgtggattgtccaaagacattgatctcttcatgaatatcgccgtattgggacgagataaacccgttgagtgtccaagacgttggtgttagataatataaccaaatccaccaccctggtacttgctgcaattttcacaaaccaaaagaatacattacaaaacattttcttcttggtaaagattcttgttcaagaaactaaaggatgggtgatcttaccgtttgggggatcaaaaaccccgaaaaaaggttgaaaccaacataaaagagcgattgaagaatcgcggcaaccatgaagtttggcgtgatggagaccaggaacattgcaaggtaattgaaagggggtagtgaacaaaacataga

SEQ ID NO: 133111 - DNA, 548 bp, Arabidopsis thaliana
  unsure (1)..(548): unsure at all n locations
taggaacannnnnnnnnnnnnnnnnnnnnnnnnnnnnnnnnnnnnnnnnnnnnnnnnnnnnnnnnnnnnnnnnncttttttttttttttttgatgatcactctcttcttacaataaacagtgtggtatggcaaacatttgaacggtaataatacaaaggttctattttagtttatttacctatctgacagtcacaaatcacaagacctcgtcaatggttacatagcggcgctcctgaatggagagctgtgcagcaactcccatggcaacagccatcaatccgtcttccaaatcaacagctgctattccttcacctctgattgctgataagaaggtgaggtgttccaagtaacttgacccgtgatgcaacccttcatattttattctttcatcttctgcttttattgtttgaacgtgttctcttcctccaatacgactgccagatcgaactataccctctggaacaagtgcctccccctttccaatgtcaccagtaacagaaatttcttgctcggttttgcttccttcagcaaacatgcaaagatcgag

SEQ ID NO: 133112 - DNA, 527 bp, Arabidopsis thaliana
  unsure (1)..(527): unsure at all n locations
nnnnnnnnnnnnnnnnnnnnnnnnnnnnnnnnnnnnnnnnnnnnnnnnnnnnnnnnnnnnnnnnnnnnnnnnnctttttttttttttttttaggtgatatgggtgtagtaaatcccatatatagcaaaagaggatacaaatgtgagtgcacctctgtatttcacatttcagtaaggattaaagaggacacaattacaacgtatgcaagaaatatgaataaccctatttgaactaataatcttggattttctctcatatttggggacgtcaccgaccttgcaattcgctgcgagagtcgatgaaacggtaaactttggatgaacacgatgcctggtcccgttagagttgctgttactacattatcacccccgaaaactgcccgtcttacaggagcagcattgtatttgatttggaaattgatcgacggagtgagagcggcaatgcaagaaacgtcaatggtgagaacttctcccacctccaggtttttctgtacaacagagccgccagcgataataaaagcaagaccc

SEQ ID NO: 133113 - DNA, 593 bp, Arabidopsis thaliana
actatagaagagtcttgacgtcgcatgcacgcgtacgtaagcttggatcctctagagcggccgccctttttttttttttttgcttttctcctccaaaagatgctacttctaccgtgtctcctcccgtcgctgcacaaagccataaagatgcacttgctaaccatcccctcgatttcttcggttgctgacccagtcttgtagtggttttcaccgacctgttcttccttacatgccaatccatgtgtttactatgctcttcttgacacttgaatctcaacccacacgatgaacattgtctcggcatatcagaatacagagacttaatcacagattcatgtcgaacattaagtgacgatggattatcaaagcttaatccaacaggcaaagaatcactattacttgcttctaaagttttcttctctttctcattgttaagaagactaagcaaatcagtcaattctttgctcaaaacaattggttgatgcatagattgagacacaactgaaaccatgttcgaatgattcatcggattttgaacattcgtaaaaacaggagtgtttggtacaaaattcgatgacctaacaggataattc

SEQ ID NO: 133114 - DNA, 531 bp, Arabidopsis thaliana
  unsure (1)..(531): unsure at all n locations
nnnnnnnnnnnnnnnnnnnnnnnnnnnnnnnnnnnnnnnnnnnnnnnnnnnnnnnnnnnnnnnnnctttggttttttttttgtttgatcggtgtttattatgaagtgacggagatgcaaaagaaaaggacaacaacaaacgacagtacgtcaagtaaaagttaaaaaacataaacgactaagagtagtaacataacatagaaacgactaagcgttgaagaagataacagagaaagaaacaaggcgttttttttttttagacaccatcttgttttcttcttcttaaggacggaactttggataaaggtttggtgccaagcgtggctcaacggacaagtgaagaggtttagccctaagcaatgatgcctcatcttcctcggggcttaacgggcccaaatcttgatggggggttccagttaaacccttgaagaaaccttgccaacgaacatatccagcaggatcggcccggctttaacaccggtgcagcgctcgttggccgggtgctaaacgaggccaaacacgtttgttgttt

SEQ ID NO: 133115 - DNA, 813 bp, Arabidopsis thaliana
  unsure (1)..(813): unsure at all n locations
nnnnnnnnnnnnnnnnnnnnnnnnnnnnnnnnnnnnnnnnnnnnnnnnnnnnnnnnnnnnnnnnnnnnnnnnnncttttttttttttttttcacacagagaagaaacaaggtcttttatctttcctgtaaattacaaatcagctttttttgtctgacaacagcaaagttctaacttgttttttctgttgtttttttttgcagacaatggctttcctagagagaacgtattgaaaaggagaaattctttgttgggtggaagtgaaaatggacctccgccgcaaaaacgactgaccaatcctaatcagtgaaacatctgtaaatttgtgtactactgctaaatttattgtatctgcagagattcttcaacattcatatacagtcaaattatgatcaacaattttcataacctctggacctttgagacatcagtacaatgactcataagcttatgatttatataaactctcacattgagataaatattatcagtcttttgtgacaagtaactcactagaagttctgtactgaaaagtctgaatcttcttgggctccaaaaggttgcattttcaactactctattttgagaaagctgcttcttcttgttcagcatctgctgtttctgactcaatcttcttgaatgtgagcttttgctgaggtaactggccattggagaacgctgtgacctcggtatcgatcaaaatgccatcttcctccttgaaatctcctctcaagatacccttagcaagctcattctcaatgttttgctgtatcacacgcttaacaggtctagctccatagtttggatcataccc

SEQ ID NO: 133116 - DNA, 649 bp, Arabidopsis thaliana
  unsure (1)..(649): unsure at all n locations
nnnnnnnnnnnnnnnnnnnnnnnnnnnnnnnnnnnnnnnnnnnnnnnnnnnnnnnnnnnnnnacnncctcatactttgggtttttttctttaacctgcaaactcaatccaatccatgtaacaacaataaaagctttctatctcacactcttttaaagcaaatgaaaagatgaaaaagaaacaatctttacaaaagaaatgaaacagagattaataaggcaaacagagaatgatactttcttgtttctggttgtttttgtgcttaaataatggattttgtgtattatgaagtgaataagccccaatggtgatctgatggtagagtttccttgatcttttcaagtctcttgagaatgtccagaaacgacggtctctggttcatgtctgcgtcccagcatttcacaattaactctcttagatctgggtgtgcatcctttggaacggaatgtaggtctagtgtccatcagatacatggttggctgcctcatatggctcagggttcgcaaatgggggctctccccagcactcgtaagtatcatgcaaaggagagacacgacttctcggacgcgtgggcgancgggaanccggacgggactgaagcggaccagcttccctaagnagtcgnatagagctggcggaaanagggcaag

SEQ ID NO: 133117 - DNA, 529 bp, Arabidopsis thaliana
  unsure (1)..(529): unsure at all n locations
nnnnnnnnctatagnagagttatgacgtcgactgcacgcgtacgtaagcttggatcctctagagcgtccgcccttttggtttttcttttttcatgtaattgcgaaatttatttgacataggaatatttatttgtagatatcgaaatcactggtaaataaagaaagaaaaacattcatctcacatttcttcaaagagataccaatctccaaaccaccaatctcatccctccttgccgacatagaaaactcattggtcttgtaaagagacataacatcagtcttaacaggtcttccccacccgaaatccgacccgtatatcccaaattggtttgatcctgtaacagtcacattctgtgtatccaattgcatattttttgttccatcctcatacacttcccatattgactcaatggttcgggaacccaaacctctaaccgaatcacttaaaatctcaactcccttaaccgtatccatcttttcctagaaaccgttgtggctttgtatccattgaaatcatttggcaagacac

SEQ ID NO: 133118 - DNA, 607 bp, Arabidopsis thaliana
  unsure (1)..(607): unsure at all n locations
actatagaagagtgatgacgtcgcccgcacgcgtacgtaagcttggatcctctagagcggccgccctttgggttttttttttttttttttttgtattgaacttggttaaatcattttctagaaccgaatctcgtcacaacttaaaaaaaaaaaaacataaatccgagttcaacatcctaatcatacatatcaccacgaaacatgataaataaggcaaacagaggtggatcctcagatctgcatagcatcttgttcgtcttctgcagcagcttcatcgtttttgattggttcactgaacatatactgactctgatactcaacaagatactgcatcgatctcctcacatccaagaacagtctgtaaactctctgaatatcctcaacctccacgactttccctttccggttctggcatgacaatgcagctgcggttataagatgaatcgcataccttagagatgtatcacgtgcgatcaatgtcaaaagctgtttggcctcttcggtaatccaaaggctccccttgggaaggggtttaaaantccctnngnacgccnngnaggngggggngttttaaaaggcagggnaacgggcccggggggtcggttgc

SEQ ID NO: 133119 - DNA, 512 bp, Arabidopsis thaliana
  unsure (1)..(512): unsure at all n locations
nnnnnnnnnnnnnnnnnnnnnnnnnnnnnnnnnnnnnnnnnnnnnnnnnnnnnnnnnnnnnnnnnnnnnnnnnnnnnnnnnnnnnnnnnnnnnnnnnaaacaaagataattttattcacaaagggaagcatgaaacggaaaatcaaaagtcaaaggttaagagacacgattaaggaactacatcagcaccacatataggacacgtggagcgataagagagaagattagaccttctctggcatgaggtgttggaacgactgttcacataaatctttgtccttagcttgggaagtctctagcactagatcgtctctgccaactgtggaacgaacagaagcagcttgtaaagagaaacttagagacatagatatggcccgccgaagtgtttgtcgtccatgagagaaaccgcttctgtagccctgtctcgaactcatggctcgaggtaaggtcatgttgcttgtccttatcagattcaagctaaccaattggctttgcatctcctctggtaactg

SEQ ID NO: 133120 - DNA, 525 bp, Arabidopsis thaliana
  unsure (1)..(525): unsure at all n locations
nnnnnnnnnnnnnnnnnnnnnnnnnnnnnnnnnnnnnnnnnnnnnnnnnnnnnnnnnnnnnnnnnnnnnnnnnnnnnnnnnnnnnnnnnnnnnnnnnnnnnnnnnnnnnnnnnnnnnnnnnnnnaactgacatgaactagtcataggtttacttcttctactatcgggcatttttggggggggccacccaaaaatgctcatgagaaaaaaagagatccccatttgactatccaaagaaaaagaaagcacacgacattgttctcttctaatctcctaaatataaaaacgaatatttcttcctttaatatacaatcacaaaacattataatatactgtaatgaataaccaaaaaaaaagtaaattcactctttatctgtgggtatagtaaagccacaccatatgaatcttgtgaagggtattttaggtaatttcacaaagaacggtcagattttgacctcaaccaaaaaaatcaacgggcggtgatcaactctacctaaatccacaagcttcttagaccggttaccg

SEQ ID NO: 133121 - DNA, 510 bp, Arabidopsis thaliana
  unsure (1)..(510): unsure at all n locations
tttaggacgannnnnnnnnnnnnnnnnnnnnnnnnnnnnnnnnnnnnnnnnnnnnnnnnnnnnnnnnnnnnnnctcttttttttttttttttcaacatcaaaattgcctttttattctgaaaccaatgaaactatagtgtatatacaaaaaccatgaaagataaaaaatagaaacctaaatcagtggctaagagcttaaatgcttttgtttcttactaagttcaaatattgaagcaacgaagagagttccgaaggaaacctttacttaagtggtgaagaaaaaaatcctaattctaaactttctcctataatctccagagaaatggcaacagtgagaatctttgctttagatgatcttcgtgtgattctcatgtgttttgcttccccctgtcaaaaaagaattaactttcgtcgagtctgagcccgagttaatccgttcgctcaaggcaactagatttctgttttcatcctccaagtgatttctgcttgtaaccattttttatcctatcg

SEQ ID NO: 133122 - DNA, 905 bp, Arabidopsis thaliana
  unsure (1)..(905): unsure at all n locations
nnnnnnnnnnnnnnnnnnnnnnnnnnnnnnnnnatagaacagctatgacgtcgcatgcaccccttccgtaagctgggatcctctagagcggccgccctttttttttttttttcctactcattttgtattataactatctcgagtttcaaatatggtttctgttcacaaagagggataaattaaacacagcacgagtaatgcttttagtgtaatgcacacacaatattggtttttttttttaagttagtttactgatctcttcacaacagagactttggatatatctccaccaagttcttcaaaaagtactaacaagttcccttttggcttcaaccacgaacgcggaacatgataccatctttgtgtcggctcgccacaaccagactggcatttgttctgcctgtatgttccagcgtagttacaacttccgcagtctcctttggcaaatgccatccagtatctccctatgctttgcccgtttatccaagcttgccctttccccatactctttagatccaaagccagcggctcgttccctctaggcgcgtcaaaataggccttgtaccatgtcaaaggttgtttgttttgcttagccaatgagcctttgatccaatcaacagaggagtcctcagtaggagagaccaagttcattgattcccctcgcagaccagcctgataagtccatttctgccaactcaagtctttgttaccctcgtcaaggccatgaagcgccacagacccgacgattcctgtggcccacgtctcaaaatgtggtccaacattcggcaacccaactgctacactcagtagtgcgattttgttagctccacctcgtagattgacttgggagctaaatgaaaacattctgttttctcttgttccaaaggcagatccgtaaaaatgtc

SEQ ID NO: 133123 - DNA, 502 bp, Arabidopsis thaliana
actatagaagattctatgacgtcacctgcacgcgtacgtaagcttggatcctctagagctgccgccctttttttttttttttttttggaagtaaatagtttatgcattgaaatgttgtggcgtttacaatgatctgtttggaagattttagacatatggggtaaaaaattgtttctttgattgttgtaacccttgagcactgactcttacggggcagaaactcttggattcgaaatgacttcaagaaatgagtttgtatttgattttgacgattaatgcaaagaggccataagaaggaagatgcaggagtgccaccaacaaataccacactggagccatgtctaatgacaggttgagaaatggatatggccacccaacggagataaacatgtggagaatccactggaaaagaacgaaacatcctgtccataagatgaagtaagaaaacctgaacaagggaaattcagacggttaaaaacgtgtcattagcagaaaacgaggt

SEQ ID NO: 133124 - DNA, 621 bp, Arabidopsis thaliana
  unsure (1)..(621): unsure at all n locations
agctannnnnnnnnnnnnnnnnnnnnnnnnnnnnnnnnnnnnnnnnnnnnnnnnnnnnnnnnnnnnnnnnnnnnnnnnnnnnnnnaacgatgaatatncggccgctaaagaagaagccactatcaaactgttcaacaacaacaacaacaacaaaaaaagcttttagaaggaagctgtgcatgagttctacagagagaaagcttttgctacatatgaaacctaatcataccttattatgcattattcatatccaaaaccattgctattccaccatcaccttcacaaagcaagcttattatacctctacaggtccctcctgctttagctctgagtacatgcaaatgggtgaaagcttccttctgcaaattcttgcatcctaaaccttcgcattagctccacagacagacgattctctcgattgcggcttagcttctgttgattactctccattacttccactacattggccggttgctggtccagctgatcccccggtaaaattgatgggactgatgcgggtggggccanaccttaatggggnaacaatncacncggggnanaaactatcaacggggggattgatggngtcaaacggtcangcaangggcttnnaagctcccg

SEQ ID NO: 133125 - DNA, 665 bp, Arabidopsis thaliana
  unsure (1)..(665): unsure at all n locations
nnnnnnnnnnnnnnnnnnnnnnnnnnnnnnnnnnnnnnnnnnnnnnnnnnnnnnnnnnnnnnnnnnctttttttttttttttagtaaaaattcactttttcagcgaatattcattacatgtatatatacaaattgtctgtaacgctgtgaaaaggaagtaggcatagatatctgaagcaattttcttcagaacattattgactggtgaataataacacaacagttacaaattacaataatacgtgtaacatgatctgatcctcttaattcctctatctaatcacaaactaatcaagccatgcaggcttgtcttgtccttctgcagaacaatctcaagaaactcgaaccggtttaaaggaataagaatgttgtaaccttttattaggagccagggaaataaagctcattatattcctgcttcacatcaccagtgtaattcctctgttgctcgattctttgaagatgtgatgacagttgcagtagatcaaccgtggatgttccttttcctttacaaggactagaaccagcagaattggtcttgccaggatcgatccacaacggttgttccatctgatgatagtcagttgatgatgagtgattgagattttggttgggttggtgatgagacggtgtgtttgaactaggcaaggttgttggctagctgc

SEQ ID NO: 133126 - DNA, 656 bp, Arabidopsis thaliana
actatagaagattctatgacgtcgcctgcacgcgtacgtaagcttggatcctctagagcggccgcccttttttttttttttttttcattcagaatttggtctttgaattgactattctcggtccgcttaaaccgtattgggtacatctcacttttacaattgtagcagaaagttacattatctattataattgaaaaaatgaaatgacatcttttatatctggttttgtattgaggactcaaaacagaggaggaatactctgttcgttcctgaagaaatttgttggatcaatcttccctttaaccaaacctaatctcttgaaattacctttgaaataagtctcaccccatttccttgcatcttcgaaactcgtgttaatccctttggtcgagcccaaatcaagatctctgtaattcaaataagctcctctcggcgatttagaaacatacggagtcatgtaatcgtgtaacgatctcatccacctgacatgtttgttcatctcctcgacttcattcactttccatttcaccatgtactgtatattatacagattacctcttctgtgtggatatggagattctgtttctgaaatcttgctgattttcccacccaatacaacaaagatcatcagtggagtatcttgctcgagaaatctc

SEQ ID NO: 133127 - DNA, 526 bp, Arabidopsis thaliana
  unsure (1)..(526): unsure at all n locations
aaccgnnggnncccctttccattgccgggaagccncgntacctttaaatgggaaaaatggaagggccccccctttaaaacggggttttggattggggccccaaaccnaggggggggaataccctggccgggtcctgaggaaaaatttggtgggtcaatcctcccctttaacccaaacctaaccccttggaaattacctttgaaataagtctcacccccatttccttgcatctccgaaacccgtgttaatccctttggtcgagcccaaatcaagatctctgtaattcaaataagctcctctcggcgatttagaaacatacggagtcatgtaatcgtgtaacgatctcatccacctgacatgtttgttcatctcctcgacttcattcactttccatttcaccatgtactgtatattatacagattacctcttctgtgtggatatggagattctgtttctgaaatcttgctgattttcccacccaatggctcaaagatcatcagtggagtatcttgctcgagaaatctc

SEQ ID NO: 133128 - DNA, 516 bp, Arabidopsis thaliana
  unsure (1)..(516): unsure at all n locations
nnnnnnnnnnnnnnnnnnnnnnnnnnnnnnnnnnnnnnnnnnnnnnnnnnnnnnnnnnnnnnnnnnnnnnnnnnnctttttttttttttttgcatgagagattaattcactaatgtaacttttttttcacacataagccgaaaaaacatagatcacacgacggctaaaaatctagaaaacgacgtcggatctaacgaaactacccgacaacgacaaagactcatcacagagacatcttcttcttgctctcagccgcagtattctcggctattttcgcaagagattgaagattgcatcgtacgataacgtcaacgaagtcacaagtctcttcctttgtgttgcctggaggaacatcaacgacgtaagactcgacaacgacggtcccggagatcggtgaagggtgaagggtcgttacggatcggtagttagagagccggtggtcaccaccaacaacgctgaagctgatgaacggggcgttcgtcgtcgaggatatcgagtctctcggtggagctagcg

SEQ ID NO: 133129 - DNA, 558 bp, Arabidopsis thaliana
  unsure (1)..(558): unsure at all n locations
nnnnnnnnnnnnnnnnnnnnnnnnnnnnnnnnnnnnnnnnnnnnnnnnnnnnnnnnnnnnnnnnnnnnnnnnnnnnnnnnnnnnnnnnnnnnnnnnnnnnnnnnnnnnnnnnnnnnnnnnagctaagggaaatttagcaaataataatcataggcaagagagaacataatttaatggccacaaactatatagctcactagtaacaaggggcaactggctgggtttcatcatcataataaacatcattttaatcttattggtaacttcgggaaattaaaaaccattttaacgcacgttaaaatcctgacctagcttgagcccaaccataagcttcttggccgctcatctgtcctcctccaccactgccaccattagaaacaagatttcccggcatattatacaccggaagtccttggttaccgtcgcctccaccagcaccgttgcttagtggcgaacctccgcctccgagctgccccggaaccactcctgcggtggctccaccaccggctntntttggtggctcttcctcctccaatggcaatctctcgtaagtcgcgt

SEQ ID NO: 133130 - DNA, 568 bp, Arabidopsis thaliana
  unsure (1)..(568): unsure at all n locations
cgattgatcnnnnnnnnnnnnnnnnnnnnnnnnnnnnnnnnnnnnnnnnnnnnnnnnnnnnnnnnnnnnnnnnnnnnnnnnctttttttgtgttttttttttttggaacaagcatttttattgcgggatataaaaattcagaaggacatatccttgatgtatgtacatgaaggaaccgattttgactccaagctacaaagaagaagaagaatgatatacaaagaaaactgcatatcctcaccatgaaattgaaagctagaggaaggggaataacagatactctgcgtagaagagattccatataaaccgataatatcctgagatagcttccttggtgtagtttgctttttctagtacccatgtctggaaaattaagcctgaagccaagatcacatgtgcaggaatcatcaagctacctctaaaaacctgaggcatgtagaaagctagtgatatggctgaaacataatttactagcagaagtccagaaccgaggaatgcaatgtttctcactccaagttttgttgccagggttgatatttggaactttcgatctccttcaacatcaggg

SEQ ID NO: 133131 - DNA, 558 bp, Arabidopsis thaliana
  unsure (1)..(558): unsure at all n locations
ggtgactnnnnnnnnnnnnnnnnnnnnnnnnnnnnnnnnnnnnnnnnnnnnnnnnnnnnnnnnnnnnnnnctttttttggtttttttttaagtaagaagacatcaaaacacatgacattgtaaaaataaaaacgcaaaatcagtttaatcaatagtatctgcccaaaattacgtttagaatcaataataaacaacaaaatcattttcaaccgccggtacaacacttaaaaagaagttctctcttcgaaaccgtatctccaatctgtcggaagcaacacattactattgtagtattccggcaaggttctcatcttctacagaattgtttctagataaccagtatccggtttgattccggtttactagtgccatgatcatccggaacatcattgacttaagcagaagtttggtctgtggtgctcaaggaatggtacttgattccacattgactaagacttgtgatcacctcaaagtctccagctttagtagacccatctttactcgacacctgtcttctcaattcagcacaaccacaatactctacgtcgtacacatgtt

SEQ ID NO: 133132 - DNA, 552 bp, Arabidopsis thaliana
  unsure (1)..(552): unsure at all n locations
nnnnnnnnnnnnnnnnnnnnnnnnnnnnnnnnnnnnnnnnnnnnnnnnnnnnnnnnnnnnnnnnnnnnnnnnnnnnnnnnnnnnnnnnnnnnnnnnnataaaaactccttatataactttttataaatgttcaaagaggtattggatggaggaacaaagacgcaataagttgtaagagcttttgatcaggatgcccaaatccatcggcttctttgtaaaacaaatccattacacgcgcaatgttgacgggtcgcaccagaatctgtcgtggcatagctttggacgtcatgaactcctcaatcattatcttataactctctctttccatcttcctcagttcttcaaccgctgcttctttggtgacaccatgttgcttcatgtaacagttgacaccatttgccacctctcctctgctcatctattgctcgaacgtgacaatgtcatttctgatacgaaacagagcattcaaggcatgaaagattttaggtttggagtaaaaccattccttcaattgcttctgatcacaatcgtccattgctataaagccgtagg

SEQ ID NO: 133133 - DNA, 536 bp, Arabidopsis thaliana
taggtgacttatagaagagctttgacgtcgcatgcacgcgtacgtaagcttggatcctctagagcggcctcccttttttttttttttttttaaaagaacacacctttgagtaatgcaagattctttcattgaacataaacaaagcaaagtatccatcataatttaagacgagggtaaatcatagtggtcttgtgactaagacattcttctctgagtgatttgatcctctagtcgaagcaaagagagtgattttcttcacttccggttcttgctctcgttcttttcccgctctctcttcttgtaaagcttctcgagggctcgttttgcttcacagttggggaagttggaaagatcatagtaatgctgagcaacatcgactaaccattcaccgcggatatctgtaacagtgcgtatgaaattccgagtagtcaagacatattcattggaaatcacccactctggtttgtgatccaggcaattagatggatgcaagtgaaccacttggttatctttgacggtcaagtaatggccagtgg

SEQ ID NO: 133134 - DNA, 563 bp, Arabidopsis thaliana
atgatactccagctctctacgactcactattgggaaagctggtcacgcctgcaggtaccggtccggaattcccgggtcgacccacgcgtgcgcctgaagtgaatgcagtggctgaatcaatggttgagcggttgaggactcatagccgtaaatccggtggccgtttcatagcagtagaccttagaatcgacatacttgagaagaaaaattgccatacaactggtgtagtagggtccaagacatgttacaacgctcaagagattgctttattcttgagaaagcttggatttgccagcgacacaactatctatctgactcagccaagatgggacagtagcctcaatatccttaaggatatcttcccaaaaacattcactaaggaggcaataatgccggcaagtaagagatcaaagtaccttgaatcagtgagttccgagtacgaaaatgttatcgacttctacataagctcaagaagcgatgtctttgttccagccatctccggtctgttttatgcaaacaccgttggcaaaaggatagctttaggtaagcctcaagtgttagtt

SEQ ID NO: 133135 - DNA, 545 bp, Arabidopsis thaliana
  unsure (1)..(545): unsure at all n locations
nnnnnnnnnnnnnnnnnnnnnnnnnttctgctncaatcaggntnttattaaacaataaatagagagcaccacaacagaatgaagtttttcacatattcgataagtaaatcattcgntctttatttggaatttataacctttttattgagttattatattcatggtaactgaaaaagaaaacaacaaacttggcctaacaatgacatccaataggatggacctaagaagggattcattttatttattccaacacaaatggtttcaactcaagaagcctatgaactggcgaaaaacacacaggaacaaaaaccttgaaagactaggatgagattcaatcatccttctttttctctgaaatctctgtcttctcctccaccgactgggatcccgtcatccttgccaacaaaacaaacgacattcctccagcaacattgtttgcacacctcaaaactatcacacttgtcttaaacaccaatgggggcaacacctttgccagcaagaactcaatcccattcaacgtttggtaccttgcattcgcactcact

SEQ ID NO: 133136 - DNA, 535 bp, Arabidopsis thaliana
  unsure (1)..(535): unsure at all n locations
aggtgaccttatangagagctttgacgtcgcatgcacgcgtacgtaagcttggatcctctagagcggcctccctttttttttttttttctgaattaagtataattaaagtacttataaaaatttatgatgtaatatatgtttgttttcataactaattgagtaaatcattttcaacatcttcactatcattaagtaaattaaagtcctcatcttttgttatgaaatcgcttgttcctataatattggtggttttattttccacaattttattatgcattttatatagattttgttcattaattgctcttatttaattatcgtttaaagacatgtcttcctcgtcatcattaaactaatttacttattaactgtgattggtaatatctttgccttaattattaagattgtgttataaatcgttgtcatcttcttcatcatagtaatattcctcttattaatggttatctccaccttcttcttaatcattttagatgttatcgttatcataaaattgttaagttatttgatgattag

SEQ ID NO: 133137 - DNA, 811 bp, Arabidopsis thaliana
ttaggacgtgacttatagaagagcttgacgtcgcatgcacgcgtacgtaagcttggatcctctagagcggccgccctttttttggtttttttgaccagcaaaatatttatcccttcatatatattattcatcaacattggttatggggagttacatacatatttgaaaaagaataacatttaaacaagaattcaacacttgaccatataaaaaaatcatctcaaacttttatcacaaacaaaactaaaatcgaaagaaagaaactgcaaacaggtttaatttgaaactactgatctaatatattaaaacagagagaaaatcatcggatgatctatacttctagtattttcaatggagacaaggctcgaaagtgctaaccaccttcttcaattggtctagcaacgacaagtacgacaccgttccatcgtttccagcgagaaccctatacttatcttttcttgtgaagttggtgcactcaaaccctaacgtagccgccaagattctctgaacatagttcgccacggtcatgcgggctcttcccggacgaacatgttgcctccataggaagctggttcaagaacgtaatctcgtaaaccggtcttgggttcatgaaggaagaaaattgggtccaaacccttccagcctctcgctgtagtcgcgaggaagaatccgactctgtagttcatcgcaaccggaacaatcctatccgttaactcagcgaaaagcgcgctgaatcttaacaaaaacggttcacgacaagtggttccctcaggacaaaccactagatctccttttgacagttgttgtttga

SEQ ID NO: 133138 - DNA, 558 bp, Arabidopsis thaliana
  unsure (1)..(558): unsure at all n locations
nnnngacctaaaaaaaactttaacgtcccatgcacccttccgtaagctgggatcctttaaagcggccgccctttttttgtttttttcttggttggtttggtttggcattcatctttttttacaatttgtaaacaaaacatggtgaatacacatggacagcacaccacagaacattaatatgtaaagaatgatccccaccttcatcatcatttagtcatcttcttcatcaagcatgatgttattgttcctgctcatcagtggtcaatgcagaagaactgggaactgctgctctctggataggtttctgtagctgctttaaagaatccatgatctctccaaaacttggtcttaaccttggatccgtctgccaacatttcctgatgatatctgcaattccaggatccacaaattcagggatatcaagtcgtcgatgttgaaaaccaaccgcgccaaccacttgctttgggttcattcttccccatggttgctgtaacgtaaaagagttcccagagaatgaccccgtagctgtacacatcacacttctcatctgcgggttcg

SEQ ID NO: 133139 - DNA, 578 bp, Arabidopsis thaliana
  unsure (1)..(578): unsure at all n locations
nnnnnnnnnnnnnnnnnnnnnnnnnnnnnnnnnnnnnnnnnnnnnnnnnnnnnnnnnnnnnnnnnnnnnnnnnnnnnncttttttggctttttttttttttttgaacaacgacatgaagaaatccaagaaaccgcgaaaaacctctattcatgtttcgagagaacactgaacatgtctctttcagacgagtagaaactcaagcagtactctcataagaacaatacacagcccaatggctctctctctttctctctggccctctctactacacaccaaaattagaacaatgcagacaaagattagtgaccagaagcagctaacttgggaggatttttgccttccaactcttttggttaacttagtaagtatcagcctttagtttttgttagactccctttggaaccaaatccacatcaaaaagcagatggttggggacttgggatgatgcaggttcttccacgaggaagacgggcttttgctctgcgtttttgtccagggttgtaagactcatagttattatgatgaaacttcctgaaatgctaggttgagttcgagcacagacttggccaccaaacct

SEQ ID NO: 133140 - DNA, 551 bp, Arabidopsis thaliana
atagaagagcttttgacgtggcatgaccgcgtacgtaagcttggatcctctagagcggccgccctttttttttttttttagctaaatcacactttcattccacagcggctaaataaactttcttgcgtattcgtttgaaaacccaagcagtttgtgattcggatcaataaaaatgctgaaaccacagtttgcttggttaatataagctaaacaatgaattaaaaacattgactaagacggggaaaaataaaaaaaaaaaaaaaataattttgggttggagacgacaacacatcaccactttgatgagcccatgcatgctataacgagaaaccaggaaattggaagtttggttagaccaccaaagcagccaaaagagcatgcaatatcgcccagtatagcatgatccctaaccgtaaagcaggttgtctcatgagcgtccgatcacaagagacccataaaccatcgaccatgttagtgatgggtcttgtgaatctaggaatgattcttgacgtaaagagtgatctgaaaccatgagctttatcatcatcttt

SEQ ID NO: 133141 - DNA, 638 bp, Arabidopsis thaliana
  unsure (1)..(638): unsure at all n locations
nnnnnnnnnnnnnnnnnnnnnnnnnnnnnnnnnnnnnnnnnnncgtgcgtaagcttggatcctctagagccccctccctttgtttttgtaattataacgaacaaaggactattattaatttattttaatttagttaagtatctccaaattctaaactcagaacaggatctaaacactcgagttcctacaacaaccacaagtacaaggaacaaaaagaaaagatcacaagccaccaaacacaacaacaatgatcctcccgactttgaatccagaacccgctgcggagccaccctcaagtcctaatccagtctgtgccaccactgaaccagccctttctgtacacatcttgaaccttttgagaccagacataaccagacataaggggaaataacacaccagccggagaaggaaacaaaagacactaactaactagcatttgcacaacacatcatttacatctttgagatatccatatatctatgctttgcttctgtcatgttcactggttgctgaatgagctctcttttcttcattggcaggggtggggaaactctcttcaggttaagtacgggcanggaggatagtcctgggcggcaaatcagggggaccaaagggggccaacccataaaggcntgggg

SEQ ID NO: 133142 - DNA, 562 bp, Arabidopsis thaliana
  unsure (1)..(562): unsure at all n locations
nnnnnnnnnnnnnnnnnnnnnnnnnnnnnnnnnnnnnnnnnnnnnnnnnnnnnnnnnnnnnnnnnnnnnnnnnnnnnnnnctttttttggtttttttttttttttccaacaaaatgtgaatatggtataacgcacgtaaataatggtaatctcatttattgacgacacaaaaacaaaacaaaaacctaatgtttgatactttagcattggatttaataccaccaaattaccaacggggtagcatgggcatgacggtgaacttcatggtaccattgctgcaatgagcaccgtcatgctcgccacacgaaatgtagtaaggcttcatctgttttagaacaaactcaaagccttttccagcaccttgcttcggagacgcaatcattttgcctttcttcacgtcacacttttcataactcgatgggttcggaagcaagtaaacgctgtgcgtgaacggggctggtgggttgtatttgaaaacaagtatgtcattgagaaagaatggagcagtcttagaagcccagtcagcgtaattgaatccataagtccactctttgtctccacc

SEQ ID NO: 133143 - DNA, 568 bp, Arabidopsis thaliana
  unsure (1)..(568): unsure at all n locations
tgannnnnnnnnnnnnnnnnnnnnnnnnnnnnnnnnnnnnnnnnnnnnnnnnnnnnnnnnnnnnnnnnnnnnnnnncttttttttgtttttttaaacatcaagtaatcactggcacactttattgatcactgagtttggttatttaaaaacagaacgtacagagaccaagcataatcaaattgtattttaacaagtaaatggcacaagaaggcccttttagccatgctaaaagataacgattcgttcaatacaaaatcctttatgactctcaaattctgaaaaaaacgaatttggaaaactcataattgaagtgcagagaaagcatcgtcaacttcgtcaacctaaaaagagacaagaggacagaggttgagaattgaataccagggcttcacaaactcaaacacaccacattttacacgtattttaagatccaaagaccggaatagaagaaattcgaatcgccatagaatgaagaagaaagaaaaagagaaaacggaaggatggaatcgttgatcacgattaagagaagattttcttcagttttgctcgtcgatttcatcagtcggg

SEQ ID NO: 133144 - DNA, 542 bp, Arabidopsis thaliana
aagagcttgacgtggcatgaccgcgtacgtaagcttggatcctctagagcggccgtcctttttttgtgttttttccttcaaaatatcacatatattaaataccaaactggatatgctgtaaaatggagacattaaaggaacctcacagccacatatatatagcttgtagagataatagcagggtactgggttttgatgatctacatacatacccaaatttatttccaacttatagtaaatgccataatcagtttctcttggcgatgaacaaaccccacttctgctcaccacttgagctcctaagtagctttgacttccacccgcctataatatcctcgtaatcctctttcgagaagtcactgatgaattcttccttctccttctccactgcatccagttcccgtttcaggactttcatgaactgatcggttctatcctccgcgattacctcctcgaaaccagcatctctcagcatctgaccgtatgcttgtacatcatgaagatcataacctcgtttcttgatgtagattgcaaagtctgga

SEQ ID NO: 133145 - DNA, 556 bp, Arabidopsis thaliana
  unsure (1)..(556): unsure at all n locations
aggtgcctnnnnnnnnnnnnnnnnnnnnnnnnnnnnnnnnnnnnnnnnnnnnnnnnnnnnnnnnnnnnnnncttttttttttgcctcatattgagcattgtcaaatatttctatgatcttcttcgtagaccctaaggatgtaacaattttgtggttgtaaatagcttctgatgcaatctgtgagctacggttttgtgcataggcgtaattgttggaaattttggagagcaaaacctttttggtatagaagcaaaggatagagagtggctgtaccgcgatcattaccaacgcgagtttccaagaaattagtagacctatgatcattgcgattgtgacacctgaaatggtctggacaagtaaggagattctgtcggctactaaggacttcacaatggacacttcattattaagccttgaacaaatctcactggtaaagttctcttccacatcaaaccatgcaggttcaaaggtaaagattttttcaagcattttcaaccgaaagtcgttgcattagcctttcacccatttttgcaaaactataatgctgaaggagata

SEQ ID NO: 133146 - DNA, 551 bp, Arabidopsis thaliana
  unsure (1)..(551): unsure at all n locations
nnnnnnnnnnnnnnnnnnnnnnnnnnnnnnnnnnnnnnnnnnnnnnnnnnnnnnnnnnnnnnnnnnnnnnnctttttttttttttttttaaagaacaaatatttattcataggaactgtgaaaagagtggcaaaactcaatgtacagttttgtgacaaatatgacaaatatattggattcactcattcctcacctcttcttaaaaaaacttatagatgcaataaaaagatgtataggatcccaaaaagaggaaaaaacctattgatgaaaatgttttaagcagtggtggagactgggaagagcttttccaccatgttgttggagaggattctatttgggtccagctccctacgtgctttgttgtatgcatccactgggaaacgttttcttattcttgcctgtaaggcttcaagttcttctttgtcttttggtatctcaattttagcccaatgttcatacgcagaanattgatcccacaattggttctgtgtcaaatgtctatagtgggaaaaatcatcttggatgtcctttctctggcgagggtctgcttt

SEQ ID NO: 133147 - DNA, 573 bp, Arabidopsis thaliana
  unsure (1)..(573): unsure at all n locations
nnnnnnnnnnnnnnnnnnnnnnnnngtcgcatgcacgcgtacgtaagcttggatcctctagagcggccgccctttttttttttttttttgatatgtaatatagtgatttagaaacttaataaatctcattggaacctaaaaaaaaacaaaaacaaagaactcaatgtaccaaactttcttcactaacacatctagagagacagataggtacagaaaaagagagctctttggtgttatcaaagttggggtaaaggaggagcctcgccaaatttaagaatgtaagcagcttggtgaattggtctcagctgcaaaatgatctgagcatcaagatacgctatagcttagtgcaaggcagtgaccggtttgttgatgatgcatcagcatatgcctattcacgaaacggctgcatagaacctctttacaacaaaggcataaccagttctctaccgggttttggcacctagaacaaggcggacgcgtgggcggacgcgtgggtcgacccgggaattccggaccgggacctgcaggcgtgccagctttcccaatagtgagtcgtagagagctggagtatca

SEQ ID NO: 133148 - DNA, 735 bp, Arabidopsis thaliana
  unsure (1)..(735): unsure at all n locations
atcgtaagaagcataggaaggttgatcccaaggccatcaagaactgggcaaggcagattctcaaaggcctgaactatttgcattctcagaaccctccggtaattcaccgggatctgaagtgtgacaatatatttntcaatggaaatactggagaggtcaaaatcggagatctcgggctcgcaactgtactgcagcagcccactgctcgaagtgtgataggtactcctgaattcatggcacctgaactgtatgaagaggaatacaatgagcttgtggacatctattcttttggcatgtgtatgttggagatggtaacctgtgaatatccatacaacgagtgcagaaaccaggctcaaatttataaaaaggtcacctcgaacataaagcctcagtctcttggcaaagttgacgatcctcaagttaggcaatttatagagaaatgtcttcttcctgcctcttccagaccaactgccctcgagctctcgaaggacccattccttgcaagggatggaggcaaggactctgctctgcttgcttcatcaagcacatcatctaaatatgtgagaccaccacagcttgaacatcttcccatggatgtggatcataacgagaataaaagtgtttcaagcaacgaagactacccatggtcccaaaccattgaacttcagaggattgcagagaataaagagttcangttgagaggtgagaggagcgatgatgtcacagcgtctatgg

SEQ ID NO: 133149 - DNA, 569 bp, Arabidopsis thaliana
  unsure (1)..(569): unsure at all n locations
atgaatcaggtgacttatagaagagctttgacgtcgcatgcacgcgtacgtaagcttggatcctctagagcggccgtccttttttggtgtttttttttttttatagtccattgtaattttcatttaaatccaatatgttggacttatataagacatagaagtacgctgatccacataagaagtacaaaacacacctgaattcaatatataaactctttacacttactttattcaaaagaaaagtgcttaataagagaataaatatgaatagagcttaataagagaatagatgaagatatttatgacgacggagatctgcggaaatgaagaggaggggacgaagagctgcaaaaatggtcccgaaagatatgttgaagataccagtagatagatttgaggtctcttttacatttgatccctctttgagacttactgatcctgccaagttcacaaagtctttcacgacgatggagaatctcttaagagaagctgaaggaagaggaggaggaagaagagtcctctctcccacctcccatctccgggcgttggctncttcttcttcttcttct

SEQ ID NO: 133150 - DNA, 541 bp, Arabidopsis thaliana
agctctctacgactcactatatgggaagctggtacgcctgcaggtaccggtccggaattcccgggtcgacccacgcgtgcgcgcaactctctctctctctctctttgagcttctgtaatggctacttggagtggtttcaacgtctcttcttctccgttgcttaggcttcggtcttcctccgtctcaaatgtcactaagcttccgtttctctctcctatttgccggcgtcggttactggcagaacgctttggtctcgcaactgtcgttgttacgcgccaaaacctcacggttactccgtcgtctgcggcggtggaagctcgtatctcagggaaaagagaacctatgacgcctccgtataacatattgatcactggctcaaccaaaggtataggatatgcattagctagagagtttctgaaagcaggcgacaatgttgtgatttgctctagatcagctgaaccagttgagactggtgttcagagtcttaaggaagatttggggagcatgtgtggggaactaagtgtgatgttaccgaagggaa

SEQ ID NO: 133151 - DNA, 563 bp, Arabidopsis thaliana
  unsure (1)..(563): unsure at all n locations
cgnnnnnnnnnnnnnnnnnnnnnnnnnnnnnnnnnnnnnnnnnnnnnnnnnnnnnnnnnnnnnnnnnnnnnnnnnnnnnntcctttttttttttttttgctaaacatgtttcgatttagctaaccgggatttgcataaatattacaatggtcctgtatggaagagagttttggaccttttggtccataatcttaaaaatacaacgatatgttttgtgttgtaaactcaaaacttgaagttaaaaactctcacacaattatcatccccacaagaagttaaccatcgcaagctctgattagactcacacttctcggttggtctccaagctaacctgttcacagccgagacatgacacatgaacggttcgagccgaagagcaagagctgctgttgcagtcgtaccttcctctgtttctataatctttacgttcgacagctctattagcccgctttccatccccactgccacgcacccactcttctcgttgcggtctagtccagtccaagccacggccgttacactgcttccaaacggaggcaagacaagaatctgtttaatgcgag

SEQ ID NO: 133152 - DNA, 569 bp, Arabidopsis thaliana
  unsure (1)..(569): unsure at all n locations
nnnnnnnnnnnnnnnnnnnnnnnnnnnnnnnnnnnnnnnnnnnnnnnnnnnnnnnnnnnnnnnnnnnnnnnnnnnnnnncttttttttttttttttctttttttggatacatgaacctctacaaatctcttatttagaaccatatctacataaacaagtaaaaatacaaggtgatattccatcatcctagtttacgtccactaaaatgagactaaacttgaaagttcaaacttctaaagtcaccaaactcttttatgtacagaaagaggtgatcatctatcaccatcagaatttaaaaatcacaaccaaagagcaaatcacatacaagcttctacctcgtcagctagacacccatcttccagagcaacacgtttcagatcaatgataaattgatctcgaagaaacccgaaaccgaaagtcccattgtcatacaaccagacccgcccttcacctctaagaaaaccaatgccattgccaggttctcctggcaacaccagatcgcagctagacttcatgtacaacattccagatacaacattttcatgaacttcagcgaaagggctaatatg

SEQ ID NO: 133153 - DNA, 525 bp, Arabidopsis thaliana
  unsure (1)..(525): unsure at all n locations
tgannnnnnnnnnnnnnnnnnnnnnnnnnnnnnnnnnnnnnnnnnnnnnnnnnnnnnnnnnnnnnnnnnnnnnntcctttntttggttttaatcttttttngttaacaataaaggcaatgaaatagctttctctcaagggtttctgggtacaattacattattgccttattaaggtgggtggtactagcacaatatagggggtcaaaccagtagaaagattaaaaaacaatacatatatatttaaagagtgaatagtaaaatattatcaccaagagaaaggactagctccttgcaagaacacttcattctccacatcttttaccctttggcacacctgattgcatatctttatcgccatcgccttgtctgcaagtggatcaaatgctgcatagagttcaaaatctggtgtgacccaacatagaaagagtgtagtttgcatctcttctatattgagtctgggggggtcccaatccttttacatgcattgaagcataaagtttctggtatgctcgatatagactttt

SEQ ID NO: 133154 - DNA, 509 bp, Arabidopsis thaliana
  unsure (1)..(509): unsure at all n locations
nnnnnnnnnnnnnnnnnnnnnnnnnnnnnnnnnnnnnnnnnnnnnnnnnnnnnnnnnnnnnnnnnnctttttttttttttttatgtataatcttttgctttataatggtctggacagagaaaagctgtttatacagaatgcataatcaatcatgaaagcagaacattttcgagcgtctaagataatcttttgtttcatctatataatgttggtttttctagtggaactgcggaatggatcatcatcaccgaacgcagcgacgttccctgggcgtgagaaaaactatctggtagcttctaagggtaagagtcttgaaaccagctgcacaatagtcggaaataatattcccatgtccttatgaatttatcgtgcgaatccaagatcgatgatttgtttttgtctctccaaaaagttcttcctccaacatctcaacgggtggtagtaatggatcccaatgttctcaacgttttcaatggcctacctagaggaagaggccatggctgaagtac

SEQ ID NO: 133155 - DNA, 534 bp, Arabidopsis thaliana
  unsure (1)..(534): unsure at all n locations
nnnactatagaagacttagacgtcgcatcgcacgcgtacgtaagcttggatcctctagagcggccgcccttttttttttttttttaaagcaaaacaaagttgatttattaatgaataaaagaaacacagaccacattacagtaattcctataactaaagtctttcttttattcaacattgttaccccataactctacaaaacatcaatataaaccccaagaagacatacctcagttcaccagagaggaatttacaacggtgctaacaaacaaaaaaagatacaacaagcggagacgttggatcatcttctgctatgcattaagagcatttgggatgagagaagatcttgtgcttctgctgataggcaagtgaacataaacctcgtgaacttcctgcttacatacatcccctttgtctctatcaatcgcgtaacagacatagattgtgtcaatcacatcgtcaagaacatgtacaaagaaagccaatatcacaatcagtaacacccacgccagtacagccaccacgtacgaatct

SEQ ID NO: 133156 - DNA, 777 bp, Arabidopsis thaliana
  unsure (1)..(777): unsure at all n locations
nnnnnnnnnnnnnnnnnnnnnnnnnnnnnnnnnnnnnnnnnnnnnnnnnnnnnnnnnnnnnnnnnnnnnnnnnnnnnnnnnnnnnnnnnnnnnnnnnnnnnnnnggctccaaatgctggtcccgccgctgatacttgattactattcgatacgtggacaatataaatagtctgcaatgagaagtcgatatggacatgatactatatgaggtattttaaccacacagttcctctagattcaaacatgaaagccaggaggataatcttgaggttgtttctttactaattccttcaaaccaagttcttgctcttctaggttcttcggtttaacatcatatacatcgttaaacaactctgtcaatggttgtttctcccacttctccgcagcctgaatcgcttgcagaagctgttttcttgcgttagatcttagcttggattcatcttcctcactccaccatccgttatcttcgacccatttccgaaatctattcacagggtttctcgacattttccagtactggatttcatccgccgccctgtacttagttgaatcatctgatgtagaatgatgtcctactctataatggcatcatctcaatggggacaggtctttgttctgttacagccatttctcgagctgagcgtacagcactttaaaccgcaagtgcatcgttaccgtccacacggatgcttcgggtaccgtaagcttgacctttcacaactattccatcacttctaaactgttctgagatatgagtactaatcgcccaaccgttgt

SEQ ID NO: 133157 - DNA, 498 bp, Arabidopsis thaliana
aatacgactcacttagggaaagccggtacgcctgcaggtaccggtccggaattcccgggtcgacccacgcgtccgaaagatggaaaatggctcgatttcctttccaagcaatggagatgtgaattctggaggaacttcttgggcctttaagcagccatctttggaaattggaaacgagaaagaggaaaaggaagtacagacaggcaagcccaagggagttttgccattgtcctttttcgaggatgagaaatcggaaacctctgacactttggttcatgaagatagttttgttttagccagcgattttcctgtgagagagaaaactaaggctccaagtccaactgtgtccatcagtgacttaatatccagattatacagtcaggtggaggagaagaatgcgtgttaatattttgagaaaactcgtgcaactgcttctaatgaagtaaatggtgaggatgattcatggggaatttcagggccccaaaatgccataacaga

SEQ ID NO: 133158 - DNA, 1047 bp, Arabidopsis thaliana
  unsure (1)..(1047): unsure at all n locations
nnnnnnnnnnnnnnnnnnnnnnnnnnnnnnnnnnnnnnnnnnnnnnnnnnnnnnnnnnnnnnnnnnnnnnnnnnnnnnnnnnnnnnnnnnnnaccaatctaaaccagttgctgctagttggctcctttatgaaagagtgaataaaaaaattggagtccggaggaagaatgcatagaatcaacaatgaaaatggttaattgtctaactaagttgagaaatatcaacctcatcaggaatcttgaaggtatccgcagcaccaaactttctaaattcttcgccttcagccactgagtcgtcttcattatcatcataatcttctgcaccatcctgatggcggggtgttgaagggtcaaacacacttctggaccggcagtcatgagttgcaagcatgttcacttggccaaggtgtgaaatctctaccatcacagtttcatcatccagtggcagtggctgtttccagggctccccatccatcctcatgaatgtatggtcggttgcacctntgtgaaattcgaagcgaatacgatttgcctgggcaagtcgtgtcccatgtccattgggagcgagcagaacaagaccatgccaagcatttctaaacccaacaacctcaatgaggccatcatctacaaatggtggagtcaagcctctatcacgttgtttcctgggatttggtgtgccccaaggatttaatcctcccgcaaaagctgggccagatctcagcacatacaatgggacctgatgctatgtggtatgtggagggacctgccactggccatttctagttgcaatcttaaccttggcaagctgagctatattccgtgaagcagggtggaaaagagaggcacaaaaccatccttgcgtgcaaccaagctttacatacgtactctgattaaccagctgattcttaaacttttcagggtgaagcttcctctcagaatgaaacgcataagaaatctgagcatccattccgaggctaaagtaattccagaaccctcctcgaaaagtgtggcagccttccttgtttagtcggacgcgtgggtcgaccct

SEQ ID NO: 133159 - DNA, 526 bp, Arabidopsis thaliana
  unsure (1)..(526): unsure at all n locations
nnnnnnnnnnnnnnnnnnnnnnnnnnnnnnnnnnnnnnnnnnnnnnnnnnnnnnnnnnnnnnnnnncttttttctttttttttttttgtaaacatgaactgttatttattattaccaaacgacaataaataaataattaggtaagacaaagaaaatttacatgaattcattcaaacactaatctataaagatttttgaaatctattctaataaaagttttcttcaccttctttggaagttgaggaacttgataccataagcaaaggcaaagagaaagatcaagatccaggcgatgtggacaacggctacaactggtaagaagtcataatcgaacccgaatccatttttgagcaacgttttaagactcatatctccaacacccgtgatgtgcacaatcgaatccctgtctcctacttgagatgtgatgattccatacaatgtccaagccacaggtgatgcccaatagtaccatctccaccatattggtatttgcggtctagggatgaagaaaccggngaaaagattc

SEQ ID NO: 133160 - DNA, 521 bp, Arabidopsis thaliana
  unsure (1)..(521): unsure at all n locations
ttnnnnnnnnnnnnnnnnnnnnnnnnnnnnnnnnnnnnnnnnnnnnnnntggatccntctaagnccggccgcccgtcacttctttttcttttttttaatccaaacaaaatgcattattatatttaatttatttttcgaaatacaataggggctcgatatgaaatcaaagacaaaggagattattacatcaatgtgactaaacaagacccaatgtctcaaagagaggtgctatagaacttggtggcgaaagaaaggccttcctcggataacacgtcaagactctcaacggaaggttgtgctcgtgccactttagcaatagccttgtgttcctcttgagtacctccttctaggaacactcctactactttcccatctttaacccaatacgtcccaaactttggctttggagatttcgggtcattatctccaaacagtacagattctccaacgttttccccatagaattcccacgatagtttgaaaaatcgagagtagaaatagggaagataatcgtaatctga

SEQ ID NO: 133161 - DNA, 604 bp, Arabidopsis thaliana
  unsure (1)..(604): unsure at all n locations
nnnnnnnnnnnnnnnnnnnnnnnnnnnnnnnnnnnnnnnnnnnnnnnnnnnnnnnnnnnnnnnnnnnnnnnnnnnnnnnnnnnnnnnnnnnnnnnnnnnnnnnnnnnnnnnnnnnnnnccatattctaagtttgtttataggaaacaaaaggaatgacatttgctattaatattaatgttaaggattcgatagttttacagtttacacactcttctgtctctctactcttcacatgagctcagcttcttcggtgtctccatcaacatcttcaacatcgttctcgtcattctcatctgttgcatctgggtctattcccttcatttgtttctccaagcgatctagtccctttttggctgcctcattctgtggatttattcttaatgcagcttgaaagtgtgataaagaatcttgtagcatattcgttgcagcaaacacttgagctagcttgacgtggagagaatcatctgcataatctttgagatatcgttcaagtagtgatacagcatctccattcctcccttccattagatgaagctcagctagggctaacacagctccaaggtacccaggttccagcctcagacctgactcgtaaaacttttt

SEQ ID NO: 133162 - DNA, 561 bp, Arabidopsis thaliana
  unsure (1)..(561): unsure at all n locations
nnnnnnnnnnnnnnnnnnnnnnnnnnnnnnnnnnnnnnnnnnnnnnnnnnnnnnnnnnnnnnnnnnnnnnnnnagaataaaaacactccctattaatactgttttattcattacaacgataacataaaaaccaaaaggtacgtatatatagtacacaaaacacagtaaaacaaaagtgacttaataccatcgtagtacaaaattacacaatgtcttcccatacttatacaacagcggaaatctgagggcttgacataaggtcgttaattcctttactgtttaatttttctgatgagatttcagcaccgttcaccactaatgccttcagatcagcgtctgtgattctctttttgtccttcgttaattctctgtatcgtgagaagatgtcggtgaatttctcatcactgatttcatatcccaactccttaagccggtcttttacagcatgacgtccgctaagctttccaggaacaatgccagaatttccagatttacggtccaaaatctnngggggaaggcccaaaggactcgnttttcaaatccaccngggatgcggcccat

SEQ ID NO: 133163 - DNA, 635 bp, Arabidopsis thaliana
  unsure (1)..(635): unsure at all n locations
nnnnnnnnnnnnnnnnnnnnnnnnnnnnnnnnnnnnnnnnnnnnnnnnnnnnnnnnnnnnnnnnnnncttttttttttttttttcatcgaacatttttgcttacaattcatcatttgctataccgatacagaaatatatttatttataagattagggggagaattcaaattggctttgccaaaagagatgattggctttcatgatatgaagggagcacacaaatggatattaagttatggtgtaggcatcagactctgcagttttctccgacaattcctagcctctcttgtgtggtatcatatattactctctggtttttctgctgataatttccgatgatcccgacttcattttcatatgacagacttgctaaggccaagcagactagagatgcgtcaggcttgacaaagtagaacacaccagtgacatccacttcgagctcagcgttaccttggaagatcattttgataatgggaatgcttatgtcttcataacttgtgaggttaaagcaagtgtctaagattgaataaccaggagcngtaggaaacccggaaaantgtttnagaaactctatcttcacagctttgtaaatggaaggtggcaatcttgtgataaccgttcctgaatcgattag

SEQ ID NO: 133164 - DNA, 523 bp, Arabidopsis thaliana
  unsure (1)..(523): unsure at all n locations
nnnnnnnnnnnnnnnnnnnnnnnnnnnnnnnnnnnnnnnnnnnnnnnnnnnnnnnnnnnnnnnnnnnnnnnnnnctttctttttttttttttttcccaaaacctttctaaaattataacaattgctaattctttaaattatacatcgaccccttcatctttacaccgcctcaataaatatccctcttattttttcaagcaccatttattcttcctctagtgaatctctctaacctcttagaatcaagattaacgtccagcttcaaaggatccaacgacagcttcgagcgtaaaaatacatcgaggttaaacccgctcccagtttcaatgtcctcgcgtcccgcagagctctcgggttgctgattggattggctatctttggttctattcatgtttctaagagtagtagttaatctgttgttgtcattgttctgaccaaagttcaagagccttttaacggtgtctaaagccgggtcaataatatccaagaatcctgtgacccacgaagcatcatcaacaacctc

SEQ ID NO: 133165 - DNA, 498 bp, Arabidopsis thaliana
  unsure (1)..(498): unsure at all n locations
ctatagnagagttatgacgtcgcactgcacgcgtacgtagcttggatcctctagagcggtcgccctttttttttttttttttttttttttttttttttttttttttttttttttnaaaaatgaatgcactgagatataacgtttcaattcatatgaaggaatttcgaagaagaagaaaagaagaatcaacttgttgagcatctaaccttgtacaagtattttttacgaagttttatggctgggcgtatgcatcttctcactctaattgcaagcagcttggcattacaaatctttatcatgtcatcgatcgagcgagtttctttcatgattttatgccgattcatgattagaatagccgccacacaaaagactggaagagggtcatttcctttcccacaggttgaaactacccaagaggcactgggttcttttatttctagaccataaattgcttggtcaagccacataaactggatgaacctggtgggtttatcccca

SEQ ID NO: 133166 - DNA, 502 bp, Arabidopsis thaliana
agctctctacgactcactattgggaaagctggcacgcctgcaggtaccggtccggaattcccgggtcgacccacgcgtggcgccacgcgtccgatccaggaaatctaggtagaatgtcagatatccttgcggtctatgcttgggttgatcctgcaactggttattgccaaggaatgagcgatttagtgtctccatttgtatttctttttgaagataatgctgacgccttttggtgctttgaaatgctcataagaagaacgcgtgctaatttccagatggagggaccaactggagtaatggatcaattgcaatcactatggcgtatattgcaactcacagataaagaaatgttttcacacctatcacgtattggtgctgagagccttcactttgcgttccggatgctgttagtgttgttccgacgagagttgtcttttaacaaggctctgaggatgtgggagatgatgtgggctgctgattttgatgagtcttttgctgaaac

SEQ ID NO: 133167 - DNA, 718 bp, Arabidopsis thaliana
  unsure (1)..(718): unsure at all n locations
nnnnntnnnnnnnnnnnnnnnnnnnnnnnnnnnnnnnnnnnnnnnnnnnnnnnnnnnnnnnnnnnnnnnnnnnctttttttttttttttttttagaaaaaaccatatatcattaatttatcacatcataaacagagagttataagtttgatgtcaaatcatagtttgttgtgagaaaagaaaaaaaaaaacataaaccttaaacatatactggggtcatcaacatatcacttactactacaacatttgacaacttgttccttcggatcatgcatgagttttacttttacaaacagattctgcaaactttaaaagaagtttctaatctcttctgaaaccgaacaaggtttttattagttacctccaagcacaagaagtgataagaggttgattcttccatcctaaatacaatgctccatctctttcttcaagtgtatacttctctgaataactctcaagcaatcctttgattgttgcgttcacatacgagctcaaaggatacggtttaaatcccgccatgtgaaaccgagacctccatttccctagtgggctcgtgcctctcttctctttcaacaccttcacaagctataagattcacaacctctttagccaaacaatgctgctcaacattgatcctttccttgtgatctctagcgagtttcacatctattgattcgaaaactgccaagtaatggttcattgtctcgacaaaccgggga

SEQ ID NO: 133168 - DNA, 431 bp, Arabidopsis thaliana
ccggccactagttctctttattgaaccaagtaggagccataccagtatatagacaaatgtcaacttagtttacaattcgtggttgatacgaaggtaatacagattatgtacttctgagggtttcttacacgcagtggtattcttctttgcctcacagacacgaatcaatcgatagaaggaatagaaaacaaccattaagcacagaggataggctgagagaaaaggatgagctttcacaagttgccaccacattggcattacaggtacttaaccagcagccaaattacaagagcaagaccaacgattccaagcacagacaagagcatagacatgcatgagcaaccacttttcatgttcttgttcatcaaggcaaggctcttttgaacacgccgtagcgagagtcagtgatatccacatcgtatctaagtcat

SEQ ID NO: 133169 - DNA, 502 bp, Arabidopsis thaliana
  unsure (1)..(502): unsure at all n locations
nnnnnnnnnnnnnnnnnnnnnnnnnnnnnnnnnnnnnnnnnnnnnnnnnnnnnnnnnnnnnnnnnctttttttttttttttcagtgcaagactccatgagcttggaggttaagtgtcattaacaacattacaacagactaatggtcaaaatttggacttggcttctctacgtatttcttttaactaacaacagagtgaaactttcaacacacagattgcagttataaaaagaaggtcaagatgaagagttacttaggttgtgaactcgtaagcgtttgggacatcatgaactgggtgacctttctcatttcgctcaattatcctccgtgccaaccctacttgcttccccaccacaaagatgaaagcctttccttttcccctagcccctcttgctggtcttcctacacgtctcacgtattcactgggggccacgggggaagccaaaggagcaccacatgatcaccaccagagaaatctatccaccgggaggctctttcagggc

SEQ ID NO: 133170 - DNA, 688 bp, Arabidopsis thaliana
  unsure (1)..(688): unsure at all n locations
nnnnnnnnnnnnnnnnnnnnnnnnnnnnnnnnnnnnnnnnnnnnnnnnnnnnnnnnnnnnnnnnnnnnnnnnctttttttttttttttttttcaaccaattaatgggtggttcttttctctttattatcattcctcgtggatccagaaatgagaaatccatgcaaacttaacaaaaagaatcgactctctatgtaaagttttctcgattcaacaatagatcaaagattctgccagacattgggacacggctttaagaaaaagaaaataatgaaaggccatatcatatggagtaccttgattcttcagcaaaaatttctcaggacgaagcagagaatgtcaagaaaacccctgatctcgcttgatcgtgttcctgtttcttcaatatgtggcagtagttaagctccatacggaataggcttgttgggaagacgattccagccccaactgaagttctgaatgtctccaagaactttggagcagggaagtttctaaactcattctctgataacttcgccatattccctgcacaggcaaacacatgcccgtggattcctctctctcttaaccatctcactggcaaatcaaatgagagatccgcaaatgcagtcactgccgcatctcctccaacaaaatcccgttcactatcacctttcctctttggctcactgggaccaactcctctggtct

SEQ ID NO: 133171 - DNA, 545 bp, Arabidopsis thaliana
  unsure (1)..(545): unsure at all n locations
nnnnnnnnnnnnnnnnnnnnnnnnnnnnnnnnnnnnnnnnnnnnnnnnnnnnnnnnnnnnnnnnnnnnntcccttttttggttttttttatgaaaattataatcttccaaaattattattgctaattggcataactcatagagaaagcctgaaagggaactcagtaataagaatcttcaaagctcttaaaagaaacaaccatttgggtcaaatgcaaatatttgtttcaacacaacagctccgaaaacgataattgctagaatcttatgatcaaataggtaactataattatgaaacaggcttcacggattggtcctcttgtccaagtagaatcagatgccgacatgagaggataagattctccttcatttccggttcttcttgctctcttccttctccctttctctcttcttataaagcttctcgattacacgtttggcttcacagttgggaaagttcgaaagatcgtaataatgagaagcaacatcaactagccattcaccacgaatgtctgtcacagttctgatgaaattccgggtagtcaa

SEQ ID NO: 133172 - DNA, 904 bp, Arabidopsis thaliana
  unsure (1)..(904): unsure at all n locations
nnnnnnnnnnnnnnnnnnnnnnnnnnnnnnnnnnnnnnatagaagagctttgacgtcgcatgcacgcgtacgtaagcttggatcctctagagcggcctccaattgacaccgtaggttcctgtcagaataatataaacactaattgtacacaatgcttttaaaaagcacccccaactccgaaaaaaattgtcatccctttttttagttgttctgttccgtctgcttctttcttcatcagactcttttaaagtcatttcgtctcgccagcacaagctataaccggaacttcccaaccattcagagtcttttatgctaaacaaaatagttttaaagatctttcactcacccgcctgttgcttctgatccacgggtttgacctgaaccgcagaggaaacagcgtgaacattagtgaaccctggaggcccaagctgatgttgttgagttttacccataccaccacctcctttcatgttattcgctgcagatgcagccgctatggctttcgctggatctgaagtggcggtgacagctcccgtgactggaacagcaggtgctgaacctgactgttgctggtgtctttggatgtaatacccaccagaaggagatatggtgatctgttgctgttgatgttgatgttgagcttgcatataaggattagagaagaatagctgtgcttgcggctgcagcccatgctttggcaactgctgctgttgttgcgacttggatccagagctcgtggtcgggtttccgagaacagaaggaccattattccttccaccagcagatgacgccgcagatgcagnctgtaagttcttggacggctgagatgctgagtgagtagttgtggaagcttgtccacctttgtttcccgccgaggaagcagaagcagttgttcttgggcttc

SEQ ID NO: 133173 - DNA, 701 bp, Arabidopsis thaliana
  unsure (1)..(701): unsure at all n locations
atgccttcaacatactgatncatgntatcacactaataacaacacaaactacacacaaggccagcatatgaacgtacgttcgctcgctatngctgtgtgtctaacgactcttnacttctcccatcttcttgnggntccctacctaacatcaccaccaaacaaaaactcaancctccccaagaaaaatgaatatattttntaaattagagaacttctaagaggttngtgnttctctttttttttttttttgggttttagttttggaattgacaccgtaggttcctgtcagaataatataaacactaattgtacacaatgcttttaaaaagcacccccaactccgaaaaaaattgtcatccctttttttagttgttctgttccgtctgcttctttcttcatcagactcttttaaagtcatttcgtctcgccagcacaagctataaccggaacttcccaaccattcagagtcttttatgctaaacaaaatagttttaaagatctttcactcacccgcctgttgcttctgatccacgggtttgacctgaaccgcagaggaaacagcgtgaacattagtgaaccctggaggcccaagctgatgttgttgagttttacccataccaccacctcctttcatgttattcgctgcagatgcagccgctatggctttcgctggatctgaagtggcggtgacagctcccgtg

SEQ ID NO: 133174 - DNA, 667 bp, Arabidopsis thaliana
  unsure (1)..(667): unsure at all n locations
nnnnnnnnnnnnnnnnnnnnnnnnnnnnnnnnnnnnnnnnnnnnnnnnnnnnnnnnnnnnnnnnnnnnnncttttttggtttttttaataagcaaagcaaatttccattattcaactgttcacaaacaacaacacttgcacgcaaaaccagaaagacatcaatgggaaatgaggaagcaacacacaacaacaacaacaacaaaagaaaaagacaacgaggaagaaaacttgataaaccgagaaactctcagttctgagatgctttagacttcatcttcttcaggcttgcgccagattccaattccatcgcaggggcagagactaacttgagggcactgatacttctccaagaacttgagttccggaaagtaccttttgctcaaatccctccactccacttttagttttggaagaaacttcagacgtaaaacggtaactttgcatttcgaattctggctaggtagtgactttccaaatccagtaagtttgattcctcctttaatgtagagtttttccacattaagtagattatcaggctcaagccattcaggaagatgttcaccaggaaaacattgcaggtccagtttcttcaatgtctttggaagctctggcgctgtgggatctttctccttacggaacatggttgcagccctttccaagatcccaa

SEQ ID NO: 133175 - DNA, 768 bp, Arabidopsis thaliana
tgaactatagactagcttgacgtcgcatgcacgcgtacgtaagcttggatcctctagagcggccgcccttttttttttttttttctttttttgggaacttaagaatacaagaattcttgatctgatgttttcctactaagcgtctttgttttatgtaatatgttttagatttctgaatcatcttgattgatataataaactcagatctctatttcatgagatttctcaatgggattagataatgcaggtccttcccacagctccgcaagatcctttctccgccatgacatgaagatcaccggtcctaacgtagatggtaccagataaagtagagctggctgaggtgagtgggtcaagacacctgcagctagagccgccaccaagccaatggcatatccgggaagtgcataccaaatgtatttgtgtcccttggaagattttagatcaaaaatattcaccacatctctagtttttcgatggtcaaagcagaggaccaaagccaaaagcattgcagggatagccatgtcaccaagaccaagcatcatgaaatctgaggcactcacaccgggcaccacaccgcccaataggttccgaggaaacacaattttaacaggtagttccagtttctttgtgatcaattgcagtccaggaagattcaaactgttagccactgtgtgaactgggtttgatgcttgctgggttgccacggccaccataacgttagcaccaaagaatctctcagagaagaaaacccagatatgtcatatc

SEQ ID NO: 133176 - DNA, 547 bp, Arabidopsis thaliana
  unsure (1)..(547): unsure at all n locations
nnnnnnnnnnnnnnnnnnnnnnnnnnnnnnnnnnnnnnnnnnnnnnnnnnnnnnnnnnnnnnnnnnnnnnnnnnnnnnnnaaaaaaagncaattgcattgatcaagatttcaggatcttaacttaatacatattggatgattctcctacatgtgaaaactcatctcaccaaatctgcaactaacaaaaaaacaaacagaagaagaataaagaaggacacaagaatttacattacaaacaacaaatacaacattctaaaacacacacaccaaacttttctttttctactacttcttgacttcttcttcaacaacaacatcagctttcgttacaaggatatccgctttttcgtcagcacattcctcgggaactatcgccattgactgcctattaccgcatattgtccaaaggtataacgcgaacatgggctcccaatgttccacaaaccgcccccaaaaccaatgcaccaagggttctccatatacattttcctttccccttaacttccaccgtcttctccccttccttaacagtcttggaaacgtcgt

SEQ ID NO: 133177 - DNA, 585 bp, Arabidopsis thaliana
  unsure (1)..(585): unsure at all n locations
tgacctatagaagagctttgacgtcgcatgcacgcgtacgtaagcttggatccctctagagcggccgnccttttttgtttttttttctttaaccagtaatatgtagattaacaatatgaatcctttgttgaataaaggaaacaattaaacgtttgtttacagataagactttacataatccaaattttatatgaagctatctgttatttattacaacttatgaattatgataagcacgtttttaacaacatctccatcagtttcattattttgttgactatattaacattacataaccatataatatatatcacttttgttgattagaataatcaagctgtaactgcgtcgttttctactgatggagcatttccattagcattgttcttcatcatattaccacatcctccaccgcaattaccgcagccagtggaaccgccagtgcaggatccgccgccgcagccttctatctttgtcatcccaccgcacctaccaccaccaccacatccacctccacctccacatccaccacaacctccacaaccaccacagtgaccaccttcttcttcaatcatgttcccactt

SEQ ID NO: 133178 - DNA, 679 bp, Arabidopsis thaliana
cggccgcccttttttttttttttttttttaacaatatgaattttttttgatgaataaaggaaacaattaaacgttggattacagataagactttacataatccaacttctatatgaagctactacaaacaagatttaaaacatcaaagaatccatctaatcttcatcttcaacatccttcaatatctctccacttaagatacactagcccagctctatagtgcgtgaacgcaccagcaactaccagaacatgaaacaactgatggctatgtcctgctatatcgaatttacccggcatccatctctctgggatcctagttgcataaaccagagctcctaacccataaagcaaacccatcaaaatctcataacctgtcgtgtgaagggcttcaggttggtcccaaaagattatcagcttgtgaagaatcggagctaagccagagaatcccattccaaaaggaacatgtcataatggtataagcatgcgtcccctcctagtccgtattttacgtcacttttcaagtttcaaacactcttttgcaaaatactcactccccctccctttctactatggacatatcttgcaggccaagaatgtcaagagcctctctctctctctctataagtttgttgataattgcgaaattgtagactctctcttttgtagcaatgtaaaaatc

SEQ ID NO: 133179 - DNA, 597 bp, Arabidopsis thaliana
  unsure (1)..(597): unsure at all n locations
nnnnnnnnnnnnnnnnnnnnnnnnnnnnnnnnnnnnnnnnnnnnnnnnnnnnnnnncactatagtagagctatgacgccgcatgcacgcgtacgtaagcttggatcctctagagcggccgggcttgggtgttttccttggtacttccaacttcaagttttattcatcatgtgaattagaatagcacaacttcaaattttcttgaaaaccatatatacacatctctcattgctataattagatactaagaggagatgtgtctaaggcttgggccgccattggaacacatcctcctccactaaactccttggggtcatcatcactcttgtaaacatacttactcgctgcccacacgaaaagtcccatgttcactatcgaaatcaccactagaaatccataataggaatcaagcctcgaatcattcaaatttttcccaatccaactctttcctccacctttactggtgatcttatcaatcattggcaccaaaaagctggtcaagaaattcccaagaccgattccactcaggaaaaacgttggtccaaggctctggatctcctcaggggactgatcataagaaaaactcaagcaaacccaa

SEQ ID NO: 133180 - DNA, 620 bp, Arabidopsis thaliana
  unsure (1)..(620): unsure at all n locations
tgnnnnnnnnnnnnnnnnnnnnnnnnnnnnnnnnnnnnnnnnnnnnnnnnnnnnnnnnnnnnnnnnnnnnnnnnnnnncttnntggggnngtgttttttttaattttttttttttttgaccatccagattgaactaaaaaaattgattgtacatttctctggattacaaatctgaatcagtatacaactcacacattgttcaaaaacattgagtacacaagttcagttcttcatcttctattctaccacattgatggaacataaacttgttctttcaaattctgtgtcgcgctttcagtagggaaacctctaactgcaccaattgtccactgcgctatgatcccagcagcaactgcaaacctgagctgtcgctccatcacatcctgatcctcaaacatctcaggacaagttgttagctttctcattatccctgcaacaacagcatcaccagaaccggtcctatcacaggtgaaaggagttataagcacatcttctgttccaatcacaacaccatcaaaagttggagtatagaatgaagccgagcggtccatcagcacaccatagctcagctgncatgcacangnctgnttcccngggggatggaaagcctcggttcgcga

SEQ ID NO: 133181 - DNA, 550 bp, Arabidopsis thaliana
  unsure (1)..(550): unsure at all n locations
nnnnnnnnnnnnnnnnnnnnnnnnnnnnnnnnnnnnnnnnnnnnnnnnnnnnnnnnnnnnnnnnnnnnnncttttttgttttttttttaatgtaaacctcttatttataagagcaatacaacttttattgaaaagaatgagcagactatggctaatgagattttgttcagtatatacaagaagcattattgctctctacaactaattattctaagttagataaaaggagtaaacatatcgatttgcagacttcttcaactttgtgcctccatcagcagaaagagagctcagaatacccaatatttcttcttcttcttgccttctggtatcggcagctctccttcagggtagattgaattgtaatgaacctcagcccagaagcttaaacatataaggcgattagacttctgaaaatgaggcaagatctcaatgtgccatgtatccttgagtgaagttatcacaaacatccgaacaccaaacaattccgcagcaccctgaagagtaacgtgatcaccccattctccattccgtttcattgctttaagatagt

SEQ ID NO: 133182 - DNA, 555 bp, Arabidopsis thaliana
  unsure (1)..(555): unsure at all n locations
atgnnnnnnggtgacctatangaagactatgacgtcgcatgcacgcgtacgtaagcttggatcctctagagcggccgccctttttgggttttttttggttttggtttccggttcaattataaacccggttcgattataaaagcaaaggagctgccttttggcatcaacatatattcagctacaaacagattttcagttaccgttacatttacacaaatgattgaacattgattattggacttttcttctttgaagattcacagagtgaaattttcttcttatgtagaattcttgtggagcaatgggtcagagacgacttgaggcttgaagtctggctttatgtactttgccaaaagatcggcatagacttcgtatcttgcagtcattctaaatccccacttgtccttgtattgccggcagagattgagatccatgtccgagatcaataaaccatcttttgttacgggacaaagacggtgtgcaagaagcatctggtgcagaaaaatggcttgacccatagaaatgcccgaaatcattgtgttgcggttttccatc

SEQ ID NO: 133183 - DNA, 865 bp, Arabidopsis thaliana
  unsure (1)..(865): unsure at all n locations
nnnnnnnnnnnnnnnnnnnnnnnnnnnnnnnnnnnnnnnnnnnnnnnnnnnnnnnnnnnnnnnnnnnnnnncttttttgttttttttgacaatacatgtttttgtctattcacatatctaaaatgaagatgtgttttgcgtttctaagaaatgtagcccatttgcatggcatttgaaacaatggtaaggatatgattgaggttaaactggccacgtgtgattccatttgccaagtcgaaggagaagtgtacattacaagattcagagatatacaacaattagagcattttcttcaactttgtttgtcaaggtgaacgatgtcttctatggtttactcgctttaggatgtaatgccgcagtcttttgctaaaggcctccaatctttccaatttttcgtgtctaggcttctttgcatctgtttcacctccgttcttaatcttcttctccttactgtcttcttcttcttcttctctactagaatctcttggctttcgttccgtgtttacatcagcagttttctcgacctgatcaccctcgccagctggtcaaaactctcatcttccttcaggtgcctcctagtcgaagagcatctggccccagctttccctgttggagcttgtaaatgaacagccttcttcaaactgatcaatacgctttccctcgaagttttcagggtcgtccacgttgtgatcattatcttccacaagcacggtatctgtatctatcatgggcatagcttttgaaaggagcttatttcctgggctttttgggtaaaagggggcaggaggtgcaaaaaaaaaaacttgcaacatcgatacatgccgaacgaagaccagatattgatcttatacagaaaacttttatt

SEQ ID NO: 133184 - DNA, 641 bp, Arabidopsis thaliana
  unsure (1)..(641): unsure at all n locations
gctccctacgactcactatagggaaagctggcacgcctgcaggtaccggtccggaattcccgggtctacccacgccgggcggttccgaacagcattgatatgattgctctttcgtttgtccgtaaaggttcggatcttgttaatgtccgcaaggttcttggatctcatgctaaaagcataatgctcatgtcaaaggttgagaaccaggaaggtgtgattaactttgatgagatcttgcgtgaaacagatgcgttcatggttgcccgtggtgatctcgggatggagattccgatagagaagatcttcttggctcaaaagttgatgatctacaagtgtaaccttgcgggtaaaccggtggtcacagccactcagatgctggagtcaatgatcaaatcacctcggccaacccgagctgaagccacagatgttgcaaatgctgttcttgatggtactgactgtgtgatgcttagcggtgagagtccagcaggagcttttcccggaaatagctgtgaaaagtcatggtaagatctgcatttnaggccgaatccctnggtttnnttaaacnaaatnttttaaaggggnttncccgggaaactncttttcaatnggcccnttggggnttttaaaaanccggttnnggg

SEQ ID NO: 133185 - DNA, 537 bp, Arabidopsis thaliana
  unsure (1)..(537): unsure at all n locations
nnnnnnnnnnnnnnnnnnnnnnnnnnnnnnnnnnnnnnnnnnnnnnnnnnnnnnnnnnnnnngtttagaagtctttttttgtttttttcttgtagttggaataatcttccaaacctaaatacattgtttcatttgtattcatacatcaaatgtatatatattttcttattttattttcttttttgacggctgaatgatttgtttttctgtccgaagacgaatctacggaaacgacgacgtttccagtggctgacatggtaggataaaaaattcggttcaatattttttagcaggtgagcgcttcgtatttaaccggggattggatggttgaaaccagccccggggttagtagattcccaaccgcagcgagatctctacagaatactccttggtacgcattggaatttaccggtttcgtttcagcgtttccggttctcttaatagaaccggatttttcaaccggtttgcgttcttcaatcttttgagcgtgagcaatggcgttcttcctctgctcctcggttatgatcgctgtcacgg

SEQ ID NO: 133186 - DNA, 784 bp, Arabidopsis thaliana
  unsure (1)..(784): unsure at all n locations
nnnnnnnnnnnnnnnnnnnnnnnnnnnnnnnnnnnnnnnnnnnnnnnnnnnnnnnnnnnnnnnctttgcttttttttttttttttaggaatcaaatgtgtattcgattaaaccggttgtgacgctgtgttggttcgttcttaccgactaccgtacaggtcaaaagattttacttcaaacatagggatttcaagcgagagaaggaaacggagttaagcctttttttttttggggtgtgggattccacctaattaaggctaaatacgggtcaagttcccggcttgtgctatcccttcccaagaaaccccgtccattgagcgactcgattctcttttttatctcctggggattagctaggaaccggggctgcaactgttttgaaaccttggcgagtattttggtgtggcctagtatttatctggactttatgatccttacgagggctgcttcaaactaaggttatctgaattcctcaactctgtggctcggctcttgctactccggagctgtttcctttggggcaagcacagttccgatcttcactttgaaaaacttgttagtgaacttgtgatttacaacgaaaaaatcctcctctactatgtcttggcttatggggtgtttatttcttacgttttttgccctttacacaagctcacagggtgctatacagttgtttaaaaatattctggccgggtattcttgaaaaccttgtgtggaaactctttggtagcttgagacaatgcataatttgctgaacctaccattagaaactccccctttttgta

SEQ ID NO: 133187 - DNA, 542 bp, Arabidopsis thaliana
  unsure (1)..(542): unsure at all n locations
nnnnnnnnnnnnnnnnnnnnnnnnnnnnnnnnnnnnnnnnnnnnnnnnnnnnnnnnnnnnnnnnnnnnnnnnctttntggggttttttttttttttttttggaaggatatcgttaaatcgacactaataatatttatacatatatgtaccaattaagttctactcaggaccgatgtacgttaaagaaaactgagtcaaatctgtacacttggctcaaaaactaggaaccaattgtctaaaacctgcctgaagaagttaaaatatctattgaagctctaatcatcttcggattagttagcggagctacttggatcgaatcctttatttgattctgttacagaggcagagaatacaggttcaagactttcgtttatgctctttgtttgtctctttaccctttttgtcctctgaggagtatcttcaccatttgcttcttcctttgctttctgaggagctctagctttcggatttgaagcagctctcctctttttattactggattttggcttttccggttcttccaaaggttcctgtccgttatc

SEQ ID NO: 133188 - DNA, 539 bp, Arabidopsis thaliana
  unsure (1)..(539): unsure at all n locations
nnaggtgacctatagaagagctttgacgtcgcatgcacgcgtacgtaagcttggatcctctagagggccgtcctttttttttttttttctatgaattttttttatatacttaattaaaaattaatgcatccaaatctaacagcaccacataatgacagtaagtaaaactttaagttaattgactagttgtatcacggggagcctcagctctggcctcctcctcaatttttttgttaacgcatataaacctaatgctgggagccagagctgcgtgcttgcatacagagccagggctacaggggacagtttggaattgaagcagttgtgcatgttgtcgagaatagagatgcgtgatgaaactatcaagtcccggccagtaacaagatctggggcagcaaaatgatgacacacagcgcagaaccaggaggctggatcacccatttcactgcacttctcctcctcaagagctactggatctgtggaaaataaaaataaaatagtagagctagttcagcaacagaattcattcaatgaggaga

SEQ ID NO: 133189 - DNA, 548 bp, Arabidopsis thaliana
  unsure (1)..(548): unsure at all n locations
nnnnnnnnnnnnnnnnnnnnnnnnnnnnnnnnnnnnnnnnnnnnnnnnnnnnnnnnnnnnnnnnnnnnnnnnnnnnnnnnnnnnnnnnnncaacgngcacaaaaaaacatacacaaacaaattaagagttacaaagtatcaagccgttcgcatagattctttacacagagcctttcataaattagaataattaatttccatttttaccccatgattttatcagttcttatataggctttgatacaaagagaaaaaatttagtagtgagttatatttttagcatgcttttccgacccggcaatccaatgctccggcgtatttggtaagcttagaaacggccataccatttttgggctttatcatctgttgcctagaatgcgaacacttgaaatgaggatttccagattgtctgaaatatgcattgttcatgaaaacatctttctcggatctccagttccagtttttccattcgctttctgaagcataatccctctttgtcacctctctgtagtgttgtttgggaggaggagcgatgaaccggtttccat

SEQ ID NO: 133190 - DNA, 643 bp, Arabidopsis thaliana
  unsure (1)..(643): unsure at all n locations
nnnnnnnnnnnnnnnnnnnnnnnnnnnnnnnnnnnnnnnnnnnnnnnnnnnnnnnnnnnnnnnnnnnnnnnnnnnnnnnnnnnnnnnnnnnnnnnnnnnnnnnnnnnncagcacattcataaataacacacgatataattgaggtaacagagttgcaagttacaacaaacggcaaactcaagaagatgacttcaagtgttttgcaatatgaccattatataagttatggtatacatatatatttagatagatgtccataatatagaaaatatacaacattgttttgatgaaataatggcgagacggaaaatttctgatttgctttttgtcttccggattggtttacacttgagtttccccatcctccgggatcaaaagcattgggatctgaccgtgggtctacgaagtcaatcttgctcagcctcagacagcataggacttggttccgggcagctcttccgggtttttgagcctggatgggtaagccgagatcaagagtcccgttttttagccgatcccggaaggctcaagcccttccgngaatgnagctgaacgntgnacanccaggcatcccgagagttgggcccaaanagttngttaggccaaagggncgggttcctgagccgaaaancctccgcggnag

SEQ ID NO: 133191 - DNA, 761 bp, Arabidopsis thaliana
  unsure (1)..(761): unsure at all n locations
tgannngttnnnnnnnnnnnnnnnnnnnnnnnnnnnnnnnnnnnnnnnnnnnnnnnnnnnnnnnnnnnnnnnnnnnctttttttttttttttttacaggtaataagaagaaggtctgcatatttctgaggggggaggtacattgtcttactggcgacaaaacaacccgttattgcgatacaagagatatcaatcgagtgtgataaatgcaagaaaggatatttaccgctggttaggtccttgctaagaatgattcaacttacaagggaacttgaagcagagttcctctgttgaagcaatttggacatagtagtgtcgatctgggtaagcacttcatcaggtttgtaccaagaacgaatcaacttaaaagtgaacttggagcagtgttcctctcttgaagcaattcggacagagaagaatcgatctgggcaaacacttcctcttttgagcggtttccctcgatcttaattgttatatcgtcgtacatagaaagcacatcactcacattttggttatgagtcttcagccgcagttttgccttctcttcgggatcatcaaaacgttgggtgagtctaacagcaatctcttctgtctctggaggcgaatacttcaagtggtagatctttcctgtgacaggatccaatcgacgcccaacaactctttcaattagaatttcttcaggaacctagttttattatcagtttgccggattttaagactgatttgccagaattaaacatttcagcaatctgttgcagaata

SEQ ID NO: 133192 - DNA, 623 bp, Arabidopsis thaliana
  unsure (1)..(623): unsure at all n locations
nnnnnnnnnnnnnnnnnnnnnnnnnnnnnnnnnnnnnnnnnnnnnnnnnnnnnnnnnnnnnnnnnnnnnnnnnnnnnnnnnnnnnnnnnnnnnnnnnnnnnnnnnnnnnnnnnnnnnnnnaacttggaacacaataattttgaaataaccactttcgtttttgtttacgcggaaagagactatgcagggggtaagaaagaagacaacgttggggttaattttacaactctcttctgctaccggggaggtgaccacacaatcccaaacatgtttataatgcatcttggcattatacaataatgcatcttgcttcagaaattgggtccagcaaacggagccgaggctcacatgtaatctgacttatgggtcatggggggcgacatcctcggggttgacaagggtgaggggttcagacaaacttgggtgttccaagtaaagctgcaagcagaggggttcgctgttcaaagacttgactggcgttaaaactggggggttctgccactgctttgtgtctgttggaatccacagctctgcttctttgcttgaacccacttgaggaagtgacctcagataagccgttacctcccatctacaatttaggggaagaggtttgactagggatt

SEQ ID NO: 133193 - DNA, 539 bp, Arabidopsis thaliana
  unsure (1)..(539): unsure at all n locations
nnnnnnnnnnnnnnnnnnnnnnnnnnnnnnnnnnnnnnnnnnnnnnnnnnnnnnnnnnnnnnnnnnnnnnnnnnnnnnnnnnnnnnnnnnnnnnnnnnnnnggacttccttgatctctttctctgaaggatttgcagacaacccttctttggcgagtaactccttaagttctttaatcagaatttcctcgcgtttctcctcaggagcctgcttggctttcctgtaaaccgatggagaaatactcattccacaagatttgatgatcgatttaaggggctcaacacgcttcccatagccagtcgttggagtttccggtttctttacagatttttctgaagatggtgccttttctcctgcgtcactgtcgctctgtgaatctgtttgttttgtcttctttgcagaggcaggtttctccttttcacgtttccgctttccggttccctctgactttgataattttcttttctccgccatcttcttttttacagctacttccttggcctcctcctcgtcttcaccatctgaatcaaacatttctt

SEQ ID NO: 133194 - DNA, 533 bp, Arabidopsis thaliana
  unsure (1)..(533): unsure at all n locations
nnnnnnnnnnnnnnnnnnnnnnnnnnnnnnnnnnnnnnnnnnnnnnnnnnnnnnnnnnnnnnnnnnnnnnncttttttttttttttttcaaacaaaagagtcaagaggatttagggtaaatcatgtgtgttctacatttataataagatcatatctatatatgaactattgaagatgatgaacatttttgtggccacacaaagctaaattgtaatcatccctcttttcaaaacccacaaatttgatgatgacttagccttccatgggaagacatctacactgcctaaagtgaagcatccatcttcatgttagtagatttctccttgacatgccacttgctctgtttttctacgtattgctgttttacatgggatgatgatgatgatcaaagtcttcttgagcatcactgggaatcaaagtcgggtttcgaagggtattcaagtccctgcagctccggcattcgccttagatcttcttctgtgtatcctgggattaaccagtatctcttatccattccaaatacctgttcaaag

SEQ ID NO: 133195 - DNA, 571 bp, Arabidopsis thaliana
  unsure (1)..(571): unsure at all n locations
atagaagactatgacgtcgcatgcacgcgtacgtaagcttggatcctctagagcggccgcccttttttttttttttttgaaatggagtaaatatgattaaatatgaataatccaatgatacatgaacaataaaattcttttaagaagttatgcgctacaatctcactctagcacgaacggacggagacagacgcgaacctcatgctcctctggtcccattcgggtgtttaggcactaaaacctctagtgttgttcctgtttcgtcccggtaagcttcaagcttggcgtcatctggaatcctgttcggcagggagacttcgcggacaaattcccccggtgggcaatgctctggtgttggatctgttagcttaaatgttctatcatgtctcttgatgaatggctcacatgctgtacttacacatgatatcttcactattccatgtgctggtgtattcctccatgtcactttcacccttccggaatcaacaaatggcaggctcataactatcaagaaccctctgtcgtcttcatatatcgtttttgcggctgtgactggaccgtanacattctt

SEQ ID NO: 133196 - DNA, 294 bp, Arabidopsis thaliana
  unsure (1)..(294): unsure at all n locations
tngtgaatgttgtcacatattgcgtaacacaaattcaagcatatgaacaaataaggaattaagaggttaaaagaacacaatgaaatggagtaaatatgattaaatatgaataatccaatgatacatgaacaataaaattcttttaagaagttatgcgctacaatctcactctagcacgaacggacggagacagacgcgaacctcatgctcctctggtcccattcggtgtttagggactaaaacctctagtgttgttcctgtttcgtcccggtaagcttcaagcttggcgtcatc

SEQ ID NO: 133197 - DNA, 669 bp, Arabidopsis thaliana
  unsure (1)..(669): unsure at all n locations
nnnnnnnnnnnnnnnnnnnnnnnnnnnnnnnnnnnnnnnnnnnnnnnnnnnnnnnnnnnnnnnnnnnnnnnnnnnnnnnnnnnnnncttttttttttttttttacacacaaaccctctttattttaatcaaatgctatgtctaaatcatacaacctctctacttagcatcaagagctaaggttagtccatttcaaaagggttggttttaataatacattgccttcagaaccagtcaagggtggttttggattggctcaggggcaatctcagctccagaaaacccgttgctcgcgtgcagctggttattgttactgtgacccaatccccaaaagttagcagttttaacatcgtcttggttcatttgcttggagaactcttcatagttatactgcaacaaagctttccctccaaattcggttgggagattttcctcgtcgaaaaatgtgctcataagctccacgctttccgagttctttgggtaaacaaacttcaccttgacgaatgtctttgcatcaatgaagtacttcacaatcttccagaacgcctcaaagagtcttggaggattatagaggaaagctacagctagtctctcagggtagtgattttgcagaatattaatagtttctctggcagatttaataggcacactagtgctcattgaccaaccc

SEQ ID NO: 133198 - DNA, 520 bp, Arabidopsis thaliana
  unsure (1)..(520): unsure at all n locations
nnnnnnnnnnnnnnnnnnnnnnnnnnnnnnnnnnnnnnnnnnnnnnnnnnnnnnnnnnnnnnnnnnnnnnnnctttttgtgttttggttttttttttttttttttatttgaaacttcaaaaacttcaaaaaacacagattttactacatctgttcttacaaaacccatttacacaagagccctctggaaagccaatgaaaaacctctaaactctgcaactctgttcttgtttttacatacactgatttagcatttgactacaagaacgtgggaaatcataagactaaattatgagaccttgtaaagacgcacaaactttagcttgcttcttctcttctttcatccatggggtatactggtatttcccagttcttattcttcttaggatcatcagttaaggggagatctgtttcgtactctttgaatgttttgaagtatgttttggtcccatcattaccagtctctccatcatgaataactggtattattctcgattataggatcccgaatctcgctaaag

SEQ ID NO: 133199 - DNA, 1002 bp, Arabidopsis thaliana
  unsure (1)..(1002): unsure at all n locations
tgannnnnnnnnnnnnnnnnnnnnnnnnnnnnnnnnnnnnnnnnnnnnnnnnnnnnnnnnnnnnnnnnnnnnnnnncttttttgttttttttcacaatttttgaacaactgaagatcatgagagtaacaaagctcttttgtacaaacaaaaaacccagagatggagcaaagtgaatgcaatacagatgaagaagccgtaaagcgatgagctaaacgacgacgattattaatcaatatagttgtaaaatcagctaaaaatgaagagaagttagaaaacaactccaagctaagtatgatactactggcttctcccttgttttttcacttgccttctcaacaaagctccaaagattcttctcagggactttctgtttctcttttgcatgattaactaatatgatgaaataacaacatatccataaccttcaacttctaagtttttttgtttccttttttaaaaaataaaatccattctagagattatgattttcttttgttgacttgctacctctttgaactcagaagggagcctccagtgacgagtcatcccaaacctcagcacttccattggatgcatcttcaacatcttcttccattgatagccgaatatactctctatgtgcaaaacggtcccagtctgtcaatgtcgggttctcgcgctcctgacgaatgaggaacggatcccgggtttcaaatgccataaatttgtttagattaaaaaggatgttgaagaccgtttccaagagagctttgaggcctttcaggtcatgcagcgttatatggctttcgttctcaggtccgatcatatcaatcatctgacataagatatcctcgaaaagaacagcctcttgcgccatgcactccattctatgcaactgctcttcataaaagaattgcatctcatttcgcgttataatcccatttgcatccaagtctatgcacttaaaccaatcggacgcgtgggtcgaaccgggaattccggaccggtacaacagacggcca

SEQ ID NO: 133200 - DNA, 769 bp, Arabidopsis thaliana
  unsure (1)..(769): unsure at all n locations
nnnnnnnnnnnnnnnnnnnnnnnnnnnnnnnncccacggtctcgataagctggatatcgaattcgcggccgcagagaagagagtagaaaacgggtaacttttccttgttttgactctcctaaaaataatttctcaagtggcaaaaacaaaacgacatttcatcgaattcaccgctcttttaacagtttgtaaactgcacctcagatttcatctcccaaaaactattctctctctttgctctatcttctcttcttcagctactaattgctctgtttaccgttactgccatcgcattccccttcaccaaatccgttacgagcttcttctttcgccttcaaatctaattttccttctgttccgttgctgttgtcagccagttcttgatttgaaccgggtgggaggaacacaccagtgcctgggatgggcattcgaggttgtggtgctgtctggtgtcgtggatgaggtggcagcagtggccagacaggcggcccggttggtacaccacctgggaacggcattggagaggcaagtggaggagaaggagggatgaaaatcggttgaacagctccgtttggtgggcggtgagacggagtgggcaagacaccagtggacgggataacaacagggtagtgtttaggtgggcccggttgggtgaccgatgtgctgatttggcgatctgctccgcggtggtccccagttagagtttctcggtttagatttgatgaagctaatgagtatcccgtgctttcgggttgcgtgaattgcatac

SEQ ID NO: 133201 - DNA, 862 bp, Arabidopsis thaliana
  unsure (1)..(862): unsure at all n locations
acgattcctannnnnnnnnnnnnnnnnnnnnnnnnnnnnnnnnnnnnnnnnnnnnnnnnnnnnnnnnnnnnnnnnnnnnnnnnnctttttttttttttttttgaatagaaaggaaaggatatagatgaatgattttcgagaagagagttgaagccgggtaactcttccttgttttgactctcctaaaaataatttctcaagtggcaaaaacaaaacgacatttcatcgaattcaccgctcttttaacagtttgtaaactgcacctcagatttcatctcccaaaaactattctctctctttgctctatctgctcttcttcagctactaattgcgctgtttaccgttactgccatcgcattccccttcaccaaatccgttacgagcttcttctttcgccttcaaatctaattttccttctgttccgttgctgttgtcagccagttcttgatttgaaccgggtgggaggaacacaccagtgcctgggatgggcattcgaggttgtggtgctgtctggtgtcgtggatgaggcggcagcagtggccagacaggcggcccggttgggacaccacctgggaacggcattggaaaggcaagtggaggagaaggagggatgaaaatcggttgaacagctccgtttggtgggcggtgagacagactgggcaaaacacccggggacgggatcacaaacaggtagagtttacgtgggcccggttgggtgacggaatgtgctgaatttggaaacactgcttggggggagggcccccaataaagaagtttcatagggtttaagaatttcgaagaaaaacttaaggaggtcttcccggttggccttttaccgggttggccgttgaaaattggcaat

SEQ ID NO: 133202 - DNA, 575 bp, Arabidopsis thaliana
  unsure (1)..(575): unsure at all n locations
tcaatttnaannncagtccaaagttgcccaaagcaagaaaaggggaaaaccttcatnaaccttggtaagaagtttgggaaaattactnatgatgttgaccggtaggaagaaggtgganctgaagtccttgcctttctttttccccctaagctggaaaaacttgctgcaattgtctgagcgcatttctgattcaagaactccgcgcccggtttgccatcttaggatggaatggatgaactggaggtggtggcttttctgaagcctctgatccatttccttcgcctccagggaacagcctgatccagcttccatctgctccgagaagcttattgggagcaccccatgcaagagtgttgacccttgcttgaagtattctcccgcacacattgggcacggttctagtgttacatagagcgttgtatccgcgagcctccatgaacgaagtgctttagaaccctctcgaatgcaaatnatttctgcatgggcagttgaatcacgaagctcctctactaggttataaccacgggcaataatctttccatcatgaacaagcacagcaccgacaggtacctccc

SEQ ID NO: 133203 - DNA, 642 bp, Arabidopsis thaliana
  unsure (1)..(642): unsure at all n locations
atagaagactttgacgtcgcatgcacgcgtacgtaagcttggatcctctagagcggccgccctttatggggtttttttttttttcttcaaagcaaaacatgtgttcatatagaaattatgcgtacgctacaatcaatggcattacaatgaaccaacctggtattcagattttaccaaatgacaatggacagaaaaaatatacaattttgaacagatcagatgcaaaagttgttctacagacagaaaaagggtaagacttgatgcatcttgttgaggagtttgggaagatgatgatgatgatgatcggtaggagtaggtggatctgagttcttggctttcttttttctcctaagctggaaaaactgctgcattgtctgagcgcattctgattcaagaactccgcgccggatttgtcatcttaggatggaatggatgaactggaggtggtggcttttctgaagcctctgatccatttccttcgcctccagggacagcctatccagctttcatctgtccgngagctnttgggggacccataaanggtttnncccttcttnagattctccgannatttgganggtctaggnttnnaagggggtgtttccnggcncntnacnngggtttangccctntgataaaaaa

SEQ ID NO: 133204 - DNA, 808 bp, Arabidopsis thaliana
  unsure (1)..(808): unsure at all n locations
nnnnnnnnnnnnnnnnnnnnnnnnnnnnnnnnnnnnnnnnnnnnnnnnnnnnnnnnnnnnnnnnnnnnnnnctttntggggtttgttttttttttttttttacgcaattcctaaataacattgcataaactttatatacataaatcttattgagacactcaaacactcacaaacaaatccacaaatactaataagtttctgcaagagcccttacaacacatacgtccagcttcgtagagcaacaatgcaatccaaaactacatccatatatagataaagaagacggtaattacgaaattgttatacttacatgaccgatcttgggtctcagttgttgaagaaaagtcgtcaaattaggaatgggaagtttctgaacgcatccttagaaagttcatgtgacaatctctcgaacaagccagtcgagacaaggataagcgaagtagaggatgagaaacgacggtagagccagcaagagagtgactagaatgtacatcgccaatatggctgcactggtcggtattgcatagagtattatcagcagaatatgacaactaatgggaactttgctgtccactgggcaaaggaaaccagggacctcctcagtgaagtttgtatgttgtcccttggaatgcgatgatcattaacagaacgtgatggttcaggttgactgcgatgatggcgattgtggagacatggagatggagtttcccttgtatgatcattgtttccatctgtttgagctccaccaggtgagttacgtctctctccattcatcctctcgaccatccaaagcacaaagtagttcttg

SEQ ID NO: 133205 - DNA, 550 bp, Arabidopsis thaliana
  unsure (1)..(550): unsure at all n locations
ttgannnnnnnnnnnnnnnnnnnnnnnnnnnnnnnnnnnnnnnnnnnnnnnnnnnnnnnnnnnnnnnnnnnnnnnncttttttggtttttttttcaaagttcgatttatcgatacaattcttttttcctactagcattcatagtttcaaaaacaaaagtttcaaataattccaggttaaatttataatttttgagcacaaaagtggtttgacacttgcattaaaaaatcgtacaataactgaaaaagcaaacatttgtgtactgtgtagttttgactatagaggaaacaaaaacctactgttgattcctgctctgtacaacttcaagtcagatgaagacctcaagtgaatctcggtatctgcaggaacaaataaaacatctcccattgaaatcccatcggctgatgcttctgtagactttcttccttcaccttggagtacaagcagaagagaagggcctggaacagagggaaacaccgtcgaggctccactgggaagatcacacagatcaacttcaaactcttcgaaaggcggcaggtatcttgttatgt

SEQ ID NO: 133206 - DNA, 506 bp, Arabidopsis thaliana
  unsure (1)..(506): unsure at all n locations
nnnnnnnnnnnnnnnnnnnnnnnnnnnnnnnnnnnnnnnnnnnnnnnnnnnnnnnnnnnnnnnnnnnnnnnnnnnnnnnnnnnccacgcgtccgtatgacttcaacaatgatatctggctttgccattcgcttcgtgggctatgtttcaactccaccgctttccaacctgcaattaacatactgagggaagttgaggcatttctgagtcaaaacccaacagagattgttaccatcataatagaggattatgtgcacagacctaaaggcttatcaacactgtttgccaacgctggtttggacaaatactggttccctgtttcgaaaatgcctagaaagggagaagattggcctactgtgactgacatggtgcaagagaatcataggctcctggttttcacttctgttgctgccaaagaagatgaagaaggcgttgcgtatcagtggagatacatggttgaaaatgaatctggggatcccggagtgaagcgaggttcttgtcctaaca

SEQ ID NO: 133207 - DNA, 546 bp, Arabidopsis thaliana
  unsure (1)..(546): unsure at all n locations
attgannnnnnnnnnnnnnnnnnnnnnnnnnnnnnnnnnnnnnnnnnnnnnnnnnnnnnnnnnnnnnnnnnnnnnnncttttttggtttttttgagcaaaaacaaaagctatcaaatatatcaatagtacttgaagtagtctgcacaaaatgaaaaacaaatgttaaaaaggaaaaaaaaaaaaataaagctaaacgaaacgaacaaattattgcgaaattatccacgtggaaatagaaaactagattaagtgtctaaaatcaggagccacgtggttagtattattatgcattaagaaatcttcaccgttggatctgatatccatcagtagattctcacacctaagctgactcagcaaatgctcgtctctcatctccttctgtcgccggagctccatcactttccggtgagagttcgagtgcctcgccatcacgaacgtcggactcgacgccggtctatactccggcacgagcctccctgatttgtacctcactccgcaagcgttacaaagcgtcttcggacccatangtcccgtcctccattgcg

SEQ ID NO: 133208 - DNA, 542 bp, Arabidopsis thaliana
tatagaagagcttgacgtcgcatgcacgcgtacgtaagcttggatcctctagagcggccgccctttttttttttttttttttcaagaacaaccttaatttttcatggccagaattatcatttacagacactaattttgttaaacaacaacgatgcacttcaagatgtaaacgagaagaataacacaaactgatcgcgaatgtagtattaccataaaatgggtattgatattagttggtcagttcacagtcgcatatattacaaacaacaaatccccaaaccctctcaaagaatgtggcacatcctcataaaccacagaggccatttcagttcagtacgaagtgataccttgagtctacatggctctccacgtcccagaggaaagaaccaaacgtcacagcctccaacacaagcctcttcaatcccttgaagctgatcttgatatgctcgtccttcgaggaatcaatagtgccttgtggcgttatcacaatctctggccttccaaacaatgcttttgtatgcttctcaattatcccaaccgat

SEQ ID NO: 133209 - DNA, 546 bp, Arabidopsis thaliana
  unsure (1)..(546): unsure at all n locations
nnnnnnnnnnnnnnnnnnnnnnnnnnnnnnnnnnnnnnnnnnnnnnnnnnnnnnnnnnnnnnnnnnnnnnnccttttttgtttttttttttttttttagaagaaccagatcatggagattaattatttgaaaaagagtttattatcaaaagaaaccaaagataattgtcttaactacaatgaaaacataaaatttacttaaacggacagtcacataaaattagacatgccgtgattttatttttcggttgcgcggttacaaaaaaaagtgatccatctaagagaagaacttgtaggtcttggcgttgataatgatggttctgagtcctccaattggggcaaggatcgtcaaaagaactcctactatgatgcagaaccagttagctgtccaagatagaccaaacctctttggtttcttgagaacgagccacataatgcatggaaggtagtaagttgttggggcaaaggcgaatcctccaaagaagccgagtagtccaccgaaaaacgggacgcatatcgcaacaatcatcgtgaaagcgacgtaaag

SEQ ID NO: 133210 - DNA, 919 bp, Arabidopsis thaliana
  unsure (1)..(919): unsure at all n locations
tgannnnnnnnnnnnnnnnnnnnnnnnnnnnnnnnnnnnnnnnnnnnnnnnnnnnnnnnnnnnnnnnnnnnnnnnctttttggttttttttgaagtctatagtaatacaagttataaaaggggttaacactatcaagtgtacagattacaaatgcaaagctaccggttcgactaaagcaaagaccatccaacgcaacctactaatactgttactcatcttttaaaagtgtcagccatcaaactaaacctaaaccaactctagctcctgcaaatcccagaagcataacccagctctttctcttctctctttttgctaaaaccgaactaaaccgaacgttatgacaatgtggagcctgtcagaggagacccacatgtggtatctctctagaaacatttagatctaccattttggtcttgtctcgattctccttcaagctctttgcgatccatatctgcggtttcttctgggagacacccctttcctggacccaaaaggggcttaagcaatacccattgagttcacctcatatctcccttcttgtaacacatctggcactaaactcaagcaacccctccaaagcatcagcccgttgacgatacgatgatgggtcaaaccgacatcttcttgaactagaggatgtggtgtggcttgatgcccagctgttgcattctgatcagatgatgatgacccgtcgcttatgttatctaccatgttgagttggattccctgccacgtcgtatgagtttgaactgtgcatttgtcttttgttatagagcggtctgagacagaggagctnttagacgatgttttcctttgcatgggagtaaagaagatgtcttgttcatatggagctaatggaaaatggcatcttatcaacttgtggctcattaatggaatattctggagacttgacattct

SEQ ID NO: 133211 - DNA, 544 bp, Arabidopsis thaliana
  unsure (1)..(544): unsure at all n locations
ttgannnnnnnnnnnnnnnnnnnnnnnnnnnnnnnnnnnnnnnnnnnnnnnnnnnnnnnnnnnnnnnnnnnnnnnncttttttgtttttttaaacgcgagagctcgagaaagaatcattcgatgatgatactttcatgttcacaagttttagacctaagacaacatgagaatcttgatcttcatcaagatttgaggttttggcattcatttttatagccaaaaaccagagagatccaaaagataaaacaacaagaaaaaaaatgaaacagagaacacaagacccttccggtttcttcaccgattcttcgatttaaaaggtcgaagaagaggtgttgacaacgatatgccgaagaggacgatccacatctccaccaccaccatgtttaacaaactcagctggtgtcaagaaactaccatggcaaatgcacattatcctcacttcctctccttttccatacttgtacagaatcccatcaacccgtcttccgtttggcccgtcccctttagtaaacacacaaggcatatcaaccaaaccagtagacg

SEQ ID NO: 133212 - DNA, 690 bp, Arabidopsis thaliana
  unsure (1)..(690): unsure at all n locations
nnnnnnnnnnnnnnnnnnnnnnnnnnnnnnnnnnnnnnnnnnnnnnnnnnnnnnnnnnnnnnnnnnnnnnnnnnnnnnnnnnnnnnnnnnnnnnnnnnnnnnnnnnnnnnnnnnnnnnnnnnaaaacgctgaaagtactcggacaatttgaaaaacaagacgtcgcttacaaaacaaagccttttttccccactttttttgttccaagtctcaggctttgaatttgttcaaattccaaaaacaaagttttacttaagccttcagataacaacatagtatagaatctcataagcattaagactaaaactcaagatctctgactcaaagactaataactctggaacaagaatctctccctatctctctcatgtccagaatccagaatccttttccgtgtctcttccagaacacctcagaatttgaaatctttcttcttcttcccttccttggtcatgcattttcctcttcctactattctgctgcacatgctcgacgaccatgtcactcaagtccactggcttattgggcaattctcctcttctctnggctcctcanactgggagggaaaanatttccaangatccaggcttcngggggnaggggnatccacctggcggcttnggccctcaggaataancctttgggccggnttctgggacaggtaaaangaggggggggccngaagtcngt

SEQ ID NO: 133213 - DNA, 602 bp, Arabidopsis thaliana
  unsure (1)..(602): unsure at all n locations
ggnnnnnnnnnnnnnnnnnnnnnnnnnnnnnnnnnnnnnnnnnnnnnnnnnnnnnnnnnnnnnnnnnnnnnnnncttttttctttttttttttggctagtgcaaaaactattaagttgagaattcaatggtacaccacaaagttccaagcttttggattgggaaacaaaaataaactataacatcaataaatagatacttcaaaaagtgtttaaagacaagatttgcagctctctcacattccctaaggacgaaagctctatcatttgatcaaaatgtcaggtcacaccggaaataaagtaacttcagtgagtcgaggtggagttggtgacccaatactgcttcacggcaatcaaaaccttctcaggaactaaaggaccatcctcatgatcgacaagcttcgcatcccatctcattccagcgatgattctcttcaccttgatcaatgtatccacatcatcccggattataaccgctccttctgggtcggagaattctatccatctctagaagaatatcatccgcattgcacttgtcctggaaaggtgagagggggtcgcgnggnnaggcaatgtctgggatgagggaagccnnccagcangt

SEQ ID NO: 133214 - DNA, 966 bp, Arabidopsis thaliana
  unsure (1)..(966): unsure at all n locations
tnnnnnnnnnnnnnnnnnnnnnnnnnnnnnnnnnnnnnnnnnnnnnnnnnnnnnnnnnnnnnnnnnnnctttttttttttttttaaattttataatcgcttaatctaaatggaccaccaacatattaacgtgtaaaacaatacaagaagatctcaaatcattatacctaacattcgacaaatcgcgaacatcaccgtttgaagtaaaatttaaagttacaattttaaaataaaagacatatgtaattctcaccaagcatatactaagagccgaaaaagaaaccgaaaattgatacatatgctggggataataaaatatgaattggcagctttcaatagctttcttggctttgaagcaacacaaagaacctatgcgtgttgttgttgagactttgttctcaagatacctccgaacaaaacaaaagctttaagcttaagctttcgatttggcctattatttctttcttttttggttatttaatttgtttctgaacttgcgttagatgaataccacagcttcttctggcaaatcaagagcttctcattggctgatgcagactctgtttgttctttacggcaactccatctcagctctttagcaacagatgcaattgaatctgcgaagtagctcgattcgcgtataatcgcatacccgctaggacgtaagatcctatccatttccagcattacatatttcatatcacacctctggctttcagatgtaaacagcccatctacgtgaagaagatcataagttcttggatacgtcgaaaaagcttcacaccagtcatgatatgttccgatcaatccacgatcaaacacaacgggaagtgtgtttgcagcataagaagagacgacattcatgacccacaaaggatcattgaccagagcagcagccaaacctccataagcagtgttcatatccataacattccgaattttgtcagaaccaatcgcgggtaacagc

SEQ ID NO: 133215 - DNA, 508 bp, Arabidopsis thaliana
  unsure (1)..(508): unsure at all n locations
nnnnnnnnnnnnnnnnnnnnnnnnnnnnnnnnnnnnnnnnnnnnnnnnnnnnnnnnnnnnnnnnnnnnnnnnnnnnnnnnnnnnnnnnnnnnnnnnnnnnnnnnnnnnnnnnnnnnnnnnnnnnnnnnnnnnnnnnnnnnngggaatcaagagccatttctattactacacaatatacaagctgtttcatagttaaaaggacagagtttgggtttatttttttataaaatgaatttaatggggctttaccctaggaatctactatacacacaggcggagatcaatgaagacaaagtgtctatacaaagagaaagatcggttttcgcagtttttctcactcaaccagacgaggtcttaagctgaaagagacctgtgaagaaaaattgacaatgaactggttcttgccttgatctcaagttgaattgcaggtcatggatgttcaagatatactacccgatgtcaaaaagctctcgggttgatatataatcctacaagggaaatggctttt

SEQ ID NO: 133216 - DNA, 521 bp, Arabidopsis thaliana
actatagaagagttatgacgtcgactgcacgcgtacgtaagcttggatcctctagagcggtcgcccttttgttttttctttttatcgaaactcgtatatatcaaatccatagagaaggaaacactaatcaaaacaaactgaacgttgaagaatcaagaaaccaaatgctcatataagaaaaactgatccaagaaatcagaagaaaaagaaaaatcgattcttcgtatagagagattgagagcattaaacgaataggagaaacctctgattggtcaagtagcttcagaggacaagatttcgagctctgcccaccaaagaggagaggatcttggagtagctttctcaggagttatgttgataacttgtttcagttgttccgctacatctttcattgaaggtcgttgtctctgttctgttttcagacattctcgtatcacatcgcagatcacttcaagctcctcttctttgaatgtctttaacgatggatctatcatctctcccaagtcgtctttttcaaggta

SEQ ID NO: 133217 - DNA, 1160 bp, Arabidopsis thaliana
taggaacacaactatagaagattatgacgtcgcctgcacgcgtacgtaagcttggatcctctagagcggccgccctttttttttttttttgtaacaatgtaaaactgaaatttctgaggtggtctacataagctttttaatgatctgaatgtttcaagaactaaattcatcaaaagaaagagagagattacatggagacgaagcgggctttgtacattgtgatgtacgccatatgccaatcacctcctccagatagctttgtgatgtcttcttcgcgttgcatgctcgggttgtcatcatcatattgaatccatttgccactctcttgcttgacccatgcaacataatgaccagagtctgcactcctgcccttgtgggtcaacacagcgaccaagtcatagattccagtcatgtgagtttccttctcagaagaagtaccttcctgtgggtttactgtggatgattctccacttccatttgcagacgcctctgcatcagtcattttcacatcactgtcctttgagccactcttagcactagtttgaagaccaagctttttaccttcctcctctttaagtttctggcgaggagcttccagtttcttccgaagacccccagagcaaaggtcaaatatacccaacaccagcggggaacccactttcctgaggatctttgctttctgattactcccccttttccaaaaaacccgcacgaactgaacagtcaagtaccttggcaaggaatcctataaggtgactccttgacgtagagtgcaggtacggccaagagcaggagatgttttttcaagttcccctttcagtccatgttttaatccttcatgcaagtggttcacttcatgtgatatatgacattttagagaatatacagattctgtctctgagctttcttcgccactttcttgacaatgcaacctgctctggagattgacaccaaatagagctttcacagcatcagcaccttcgctggaagttggtgcttttagggactgagaaagggtgtataacagttgtgtccaacattcttcagcatcctgctgcatgtgcattccattctgcaactgactaaactgaggatacttttttcgtaataccatccagaactgtgaaggccggacgcgtgggtcaacccgggaattccgg

SEQ ID NO: 133218 - DNA, 1174 bp, Arabidopsis thaliana
  unsure (1)..(1174): unsure at all n locations
aagatactccaggctctatccaactcattttagggaaggctggtccgcctgcaggacccggcccggatttcccgggccgacccacccgtccgcggacccttgggttccaggacggcgccacaagtctctcgtctgctctctcttgctcaaagacgcttcggtaccaagaagtcctgatctgaaagatacaatggcgtctggtatcgtcaaaggaggcggatccttatcggatgtatatagtagtgcgaaaaggattctactcaaggctcgcgacggaatcgagaggttagagaggttcgaatcatcttctatggattctcccgatctagcctcctccgtgaaacgagatattactgaggtccgatctctctgctctaacatggatactctctggcgctcaattcctgttaaatctcagcgcgatctctggagaagaaagactgaacaagttggagaagaagctgagtatttgaatctaagtctggagaaatacatgtcgaggaatcagaggaagatgttggaagctaaagagagagcggattttgctaaggtacgagccgacgtgggagaaaggagctcacaatttttgccagcatatttgaatgagggaagctcaagcctattgagctcctggtgaagaaaccccaaagaggaatgcttgcaagaggccgttttccagtgggggggctgtcctctccaaaaatgctgaacaaagggatcgtttgaagagtgcacagcgtaaagctttggatgttctgaacacagtagggctctccaattcggtactgaggctcattgagaggcgcaatcgtgttgatacttggatcaaatatgccggtatgatcgcaacacttgtcatattatatctgttcataagatggacacgctaagccgaagaaaatcaaacggcttagttgcacagatggttgtttatgccctgtaacaagacatttttggcatctgatcttagctcatcaagttgtgattgtaaaaatagtttcctttgcattgaatacaaactaaaactaaagctgaatcaaagtgacttttactatgttggcacagtaatgaaaaacaagagtcaaaaaaaagnaagnnnnnnnnnnnnnnnnnnnnnnnnnnnnnnnnnnnnnnnnnnnnnnnnnnnnnnnnnnnnnnnnnnnnnnnnnncaat

SEQ ID NO: 133219 - DNA, 683 bp, Arabidopsis thaliana
  unsure (1)..(683): unsure at all n locations
nnnnnnnnnnnnnnnnnnnnnnnnnnnnnnnnnnnnnnnnnnnnnnnnnnnnnnnnnnnnnnnnnnnnnnnnnctttttttttttttttttaaaataactaaacaatcaatgtttatataataaagctacgagagctgttcaagaagaaatggttttaagggtaaaaccaaagtatcgttgagacatacatttaacagaccctaaaaaccctaacttcgaaaaaccaaaaccatcttgtttgatctaattcttgttttttgttttagtttcgaaaaatccccgacgatagttaaatacttaaatcttaaaatccaaaaccacctcgagaatcccaaaaataaaagataaattttgaaagagagaggtttaggaaataaaataaaaataaaaagattgaaaaaatgtaattacgagaatttagaagtgttctcggcgagtttagccagcgattgcaagttgcaccgtactatagtatcagcaaagctacaagtctcttccttaccgttacccgcgggtacgtcaacgncgtatgactcaacgacacgtgtcctcttcttgccgtcggagtcctcctccgactcatgcacccgcgtcaccgacttgtagttcatgagtctgtggtccccaccaacgacgctgaaactgatgacgtggcgatcatcgtccatgatctcaagccctc

SEQ ID NO: 133220 - DNA, 506 bp, Arabidopsis thaliana
  unsure (1)..(506): unsure at all n locations
nnnnnnnnnnnnnnnnnnnnnnnnnnnnnnnnnnnnnnnnnnnnnnnnnnnnnnnnnnnnnnnnnnnnnnnnnctttttttttttttttttaagcgaatatatggttactgttatatatttttaatttttttacccttgaaaatttagacaaaagaaattaaaaaaaaaaactccaaaattttttatttagggcttttccttaaaggagtgaagctaatccggtgacagccttcacttctctctccaccgccacgtcatcatcgccgtcggttggagaggaggaagaattaacaatcactctcggagataaacatttctcctcaaaaaccagctcaatctctacactatccacctccttctccaccgccgcatccgccgccgtaacatccgtcaccgtcaccgtctcatcgacaacaacaacggaagctcgcgtataagaagagagccatttagatcgcatgtactcagctttcctccacggaggaaaaggcattcctttcttctt

SEQ ID NO: 133221 - DNA, 511 bp, Arabidopsis thaliana
  unsure (1)..(511): unsure at all n locations
gaatgtnnnnnnnnnnnnnnnnnnnnnnnnnnnnnnnnnntgcacgcgtacgtaagcttggatcctctagagcgtccgcccttttgttgtggcttttgtttcgtcaaaaagttgtttattactttccacaaagttgtaccaacagtgttaaaacttaagtgatcgtagtaaaagtaaaacagaaatcgtatgaaacatcatggagctaatcttgtatgacaaaatagtatagagttctcttctacctgggatgttatgttgtttacagatagacctcagaaaaagtaaaacaacactggagtttcagaacctatccaaaccaacagcagtcacgggttagttgcaagctgccaaatcttgaccatcccatcatcactagccgacgcatgcaaccgggtcccctcaccgggtgaccattggacagaggtgacatcattttcatgtgcttctttcttcttcagcaaaagatgttatgaaggtccatcaacagagtcatgttggctggccacaa

SEQ ID NO: 133222 - DNA, 581 bp, Arabidopsis thaliana
cacgcgtacgtaagcttggatcctctagagcggtcgacctgggtttttattcccttttaaaccaaaccgaaatcaaatttcgacactctttacaaaggaaaacttgtgcgtttgttacaacaaaatgagaaaaatacagccgagagagagattacgtaaatattcttacactaacaacccaacaaactctctaccattcgggaaatagtgagcaaccaagtgggaaaaatggaatatataaattatatttacgttggggctgaagggtataaagaattttgatttgagaatgtgttggtgcttcatatcatctccgtggaggatcctgaatcaggttcatttcaactcccacgggttgggattctctgaaagttccaagcttttcagcctccctagctatccgaacatcggaaggtctgtaatactccactagaaacttgatggcgaatctaggaagcaatgatgtcacaactattgctagcaagcagaaccagaacatccatgtcttgcccacttggaaaattgcccagtaaccagggagtgtgggtataacatcaatcacaatgacacatatacaagct

SEQ ID NO: 133223 - DNA, 614 bp, Arabidopsis thaliana
  unsure (1)..(614): unsure at all n locations
cgattnnnnnnnnnnnnnnnnnnnnnnnnnnnnnnnnnnnnnnnnnnnnnnnnnnnnnnnnnnnnnnnnnnnnnnnnnnnnnnctttctttttttttttttttgattcaaatatgaaattttaatagaaatattccaatgacaaaggtctttttagtcttgcaaacacacacaccaaacacgaaaataaaagattcaaatatgaaattgttcttaaccaacagcaacgcctccaattttttaagagatcaaagaaagaaaacaaatgatattcatattcttcaaagctttgaaagtaaaccagtctgaagagctttcggtgctacaacctctttgacttcactctccttagtctccaattcgcatggattcggtggcacatctactgccggtgagcagttgaaaaatccatgtggcattagtgtgaaaccaatatgttcgacgggcataaccggccaatcttcaagtctaggaacatgtgtgatcccaaacacgtaccaaagacgacgtcagatcttccaaggagcgattctgttccacccatgtggcaagaccttcaccagccgggggtttggttgggatcccccnggaactcccgcnggggaangggaccat

SEQ ID NO: 133224 - DNA, 660 bp, Arabidopsis thaliana
  unsure (1)..(660): unsure at all n locations
nnnnnnnnnnnnnnnnnnnnnnnnnnnnnnnnnnnnnnnnnnnnnnnnnnnnnnnnnnnnnnnnnnnnnnnnnnnnnnnnnnnnnnnnnnnnnnnnnnnnnnnnnnnnnnnnnnnnnnnnnnnnnnnnnnnnacaatttaacaatcatattgcaacgagcccaaaaaaataatcatttacattatttcttttttctgttcacatttttatcacatgtttacagaattataaaattctcatgtcccggatttagtttgatctcattgacatgttggaaattgggatcccagcattgtacatgctacttccatcaatttacctcttcttggtttaggggctttcttgacaactggaacgccggttttcttctcgaccggagttttttcctccgggaacaaaacaccgtcaatcccttgaaccgaaatccgtccatcggtataaatatcaggatcgaacaaataagccgaaccatcaccatgaccgaacttaaccgaaccatctgcctcctggagcctctacttttatgaggaaaccggagtgaaccggaccggattttncccaaaccggngganagaattgggaaaaaaccccccttcnggtttggggatnccggggangnatggggaaanananaaatttggccntggggcccccgggttc

SEQ ID NO: 133225 - DNA, 667 bp, Arabidopsis thaliana
  unsure (1)..(667): unsure at all n locations
nnnnnnnnttcctctagagcggccgccctttttttttttttttttgcatgcaatatatatttatattttttcttttggttttggtgtggaaaatattgcaatcgttcgtacgtatatttttacaaaatattaaaaccaagcccatgcaaaacacatatacaccaaagtcaactttctttttcaaaagtcaccgaaccagaggttataaaactttcactcaagaagaggaaccagaactcggaggagcagaggaggaagaagaaaaaggttcttgatctgcgcatgacagcttctcgtgaggaccagcttcttctcgtccaacacctatcagatcaagataatacaaataatgagaaacaatgttgttcatctcatcgttatcgaatccgctgttgcagatttgatcgccgtaaagaacgtttatggtggctccaaaccccggagttcgttttgcagcagtgtcattctttgttggcttccattttccgacgaaaacatcgtgcgccgacggtaaatgcttcttcggtggcgtcatccaccgccaaatcgccgcttgaaacgctaacgtagcattgttctcgagatactctggatgactcagtagatccggacgcgtgggtcgacccgggaattccgggccggtacctgcaaacggacaattcaaatg

SEQ ID NO: 133226 - DNA, 497 bp, Arabidopsis thaliana
gcacgcgtacgtaagcttggatcctctagagcgtttcgcccgtttgtgtaaatcctttttttcttacacgactaattataagcaaaaggttataaccacacgtgagccttagaccaacaatccaaccccgccgaaagctcaaacattggctctaaactaactaatcaccaactaaaaaaataaacaaaaacgaaatctctctaagcgggagaacaacgaagaagaatccctaagacgttctaggtgaccgcatcacacctccggcggacctcccctcgccgtccggtcaaaacaccgcgaacactcaactgctgcatagctccggcaaagtcgttaaagaaccgagagcgcgctctcgcgtataactcaacgaacggacgggttcccgggccggagaataaaccgcgacccgattcacggaacccgagaccttccggaatatcccggaaatacatattatcgaatttgttcggagtcataacgtcgttgaagacaga

SEQ ID NO: 133227 - DNA, 509 bp, Arabidopsis thaliana
  unsure (1)..(509): unsure at all n locations
ttnnnnnnnnnnnnnnnnnnnnnnnnnnnnngtcgactgcacgcgtacgtaagcttggatcctctagagcgttcgccctttttttttttttttttttagtggaaacgtttatgcattttaaaagaagcatataataatcgtataccaatgtaatcacattgagtagtttggactctcccttctatatttctcccaccaatgctacaaacaacagcaagttccatttccaatgtatccaacactggaagagttttttttttcctcaccatctacggcgtctcctcccataccaaaacgcgaacgcagccacagatgcagccacaacgactccagtagctgcgtgccatacatacaaaggcttctttatcatgaccacacttgcagattgcttcaccatctcagcgctcggaatatccttaacttcaggaactttctgctgactcacaaccgtgtgagcaaacccgagtccttctctttccaattcttccaaatcaatagtcacagctggt

SEQ ID NO: 133228 - DNA, 707 bp, Arabidopsis thaliana
  unsure (1)..(707): unsure at all n locations
nnnnnnnnnnnnnntaggtgcaactatagaagagctatgacgtcgcacgcacgcgtacgtaagcttggatcctctagagggctggcctttttttttttttttttcttttgttattgccaaaccttgaatcgtttccagaccaaaacaaaaattctccgatgttcactacgaaaaacagacgacattaatttagctcaaaaaaaaaatacaataccagggtttgttaatgttgcatccctttctattcagcgctcttagacttcttcttcttcttcttggtgctgtgaccatcatcagtctcctcttctcctccagctttactcttctttggcttcttcttctctgatttctcgttctcctctgcaggctccatcctcctcttctctgtcttcttctttttctctgacttggcctcctccatggccacacacctcttcttcgttcttcaccctgtgccttcttcttcttgcttttcttccccgaggcatcaactgggctccttcccttcctctgctggcttagattctttatcacctccttcattacatccacgttcttgcgtgagcaacacctttgcatagagatttagcctttcctaacttggtcgcgaacctttcaccanaagcgtagttgaccatcagcaaaacatcaatccgggatgctataagcacttgtttcaagatacaagcgatacggccttgtctaac

SEQ ID NO: 133229 - DNA, 594 bp, Arabidopsis thaliana
  unsure (1)..(594): unsure at all n locations
gattgtnnnnnnnnnnnnnnnnnnnnnnnnnnnnnnnnnnnnnnnnnnnnnnnnnnnnnnnnnnnnnnnnnnnnnnnnnncttttttttttttttttttttttcgaatgacactagttgctaagattcaataaaaaccttactaattacatctgaatcacctaagtgattttagattcaaagaaaggggaaaaaacacaaccctaagttaaaaaatgtaaagagcatatcaacaccaagacgcgacgaattttgcactttacagagatattgctagaaagaaaaagaagtcaaaaggataatgttaaaataagggattcctttgcggttttgttgattagctttgtagacttgtttgttgttgttgttgggggtcttctagttgctctggttgaggaactgtaacacctccattcattcttgctcgagcttctgcaaacatcctctgttgttccgctgccgcctcttcttccggcatctctgccccgctatccatcttcacactctctgggaaccccgcaggggnccaaattnatgttgcccaacgngggannaanttctctangatccccaagccngaccngnaagcttgnna

SEQ ID NO: 133230 - DNA, 496 bp, Arabidopsis thaliana
  unsure (1)..(496): unsure at all n locations
taggtcacctatagaagatcttgacgtcgcatgcacgcgtacgtaagcttggatcctctagagcggccgcccttngggtttgggtttttttttttattttttttttttttgaaaattatggcccaattaaaggcttgcataatatctaaagccttgtacagaagtaattggaagagggtccccacaagtcacagtgaaccctctcaagaggtctatttgaagtaaatgaagaagaaacaaatggcagcctggggctcttcccaagctgacatgcttcacagagtgacttagaagtcttattgatagagatagagttggtcttgaccagttgctgcaggacttgaggatgaggatgtccaaggcgtctggcccacacttcatcacttgcggactgctgacgaggggagaagaaccccttgaactgagagtcatccttcagacaatataaaccnttacaagtgcttcccattatgagaagcttcttggttgcctgatg

SEQ ID NO: 133231 - DNA, 525 bp, Arabidopsis thaliana
  unsure (1)..(525): unsure at all n locations
nnnnnnnnnnnnnnnnnnnnnnnnnnnnnnnnnnnnnnnnnnnnnnnnnnnnnnnnnnnnnnnnnnnnnnnnnnnnnnnnnnnnnnnnnnnnnnnnnnnnnnnnnnnnnnnagcttcaaaggataaatccaactgaagcgagaataatgatcaataaagactgcttaatatctaaagccttgtacagaagtaattggagagggtccccacaagtcacagtgaaccctctcaagaggtctatttgaagtaaatgaagaagaaacaaatggcagcctagtgctcttcccaagctgacatgcttcacagagtgacttagaagtcttattgatagagatagagttggtcttgaccagttgctgcaggacttgaggatgaggatgtccaaggcgtctgtgccacactttatcacttgcggactgttgacgagtggagaaaaaagccttgaactgagagtcacccttcagacaatataaaccatcacaggtgcttcccattatgagaagcttcttggttgcctgatgagga

SEQ ID NO: 133232 - DNA, 800 bp, Arabidopsis thaliana
  unsure (1)..(800): unsure at all n locations
ttaggtgcacactatagaagactatgacgtcgcatcgcacgcgtacgtaagcttggatcctctagagcggctgcccttttttttttttttttttttagctagcagtcacaataaaattgatgatcctgaatatttcctaaaaggaaagcacaccatatgcaatcacatgttgctaccaagagactactagcatacacgagtatatggcccagagaaacaatttccataggaggattattacggacttaaaaagaaacaacaagggaaacagtgattacaacacaagattttaaagatgctgacaaacaaacaaacaaaaatctcacgggaagtggaaggtgaacgaataggagaggagagaaatggccataagagtcgtatgagacataacaaattagattaagcttatcctcagcggtagcttcgatacgaagggctgtacatgctgctctcagcacactgctccagctccttgggctgaggcaacctcgtggccagtcccagttccgtaggccttggcagccaccttagctgcaattacgagctggagattttcctgatattccctgaaagggagggtatatccatccccttcctccataggggtccctcccatcaggtccctcaagcccaaagcttctggatgcttgcccagaagcatgtcatccatgggcacgggtcggcccctganatttttagccccgggccccaaacccagggangntgttcgggtggtttccctgcccagggaaaanggtttcccccaaacctactgggggaatggggtccnttnaaaangg

SEQ ID NO: 133233 - DNA, 659 bp, Arabidopsis thaliana
  unsure (1)..(659): unsure at all n locations
nnnnnnnnnnnnnnnnnnnnnnnnnnnnnnnnnnnnnnnnnnnnnnnnnnnnnnnnnnnnnnnnnnnnnnnnngacgtcgcatgcacgcgtacgtaggcttgggatcttttaagcgggccgccctttgggggaattctaattattatttttcaaagagaataagtttctgcacaaaataagaaagaatgttttttaaacacaaatttatgattaaaaaaaaaaaacagaatctcatccacatgaataacctaactctgattgattttttttggcccccaacaaaacaaaaaaaaattatgatccaacccgccggtttgaaaataaaattcccacatctcagttgtgtctccggtttggctaaaccaaacccattttatcggcaaagggttttcatcttctactacaaaagctacctttgattttctttcagactgggccggtcaagaccaatgaaaccttcctctactctctcctaatatagcaccaccattcgctgaaacgtcaatgcgaatgtcgatacaagtcgtaaggcgtccataatgcgtctaagggacaaggccgtttggaatcgagtcttatccagggcttgccactaccagaccaatgcagcaaactcacaggaccaggatgcaaatcacgacagctacctctaacattg

SEQ ID NO: 133234 - DNA, 606 bp, Arabidopsis thaliana
  unsure (1)..(606): unsure at all n locations
ttaggtcaactatagaagagtctatgacgtcgcatgcacgcgtacgtaagcttggatcctctagagcggtcgccctttttttttttttttgtttttttttcagttaacagagtactttgttgaaccaaaccaacataaaatctcggagaatggcgtattgtagaatacagcacacagagtaattcagaacacgctaaaacaaagaatacaacctatatggtataaaaccaaaatttctcaagaatctaatgtaagaactcaaatctgctgagaaacattcccatctattgccatcaactggatagactaaccttttctaggcctagttccgtagcaactgctcgtagtaaaatttgcaccagctctctcacccgcatttcccttgataacacaatctcgcacagagagggaaaaaggacaagtaggtgtgcacgggtgtcacggttatcttcgcgtagaacgtttttcaggtagggttgcaacggaagacagatgcaacctcaggatgaatgctgaggcggtaaagtcttggagggnaaagatatcncttcagnnagtgtgggttgnnggtgccaagataattccgcgntaaatctcncaaatgat

SEQ ID NO: 133235 - DNA, 592 bp, Arabidopsis thaliana
  unsure (1)..(592): unsure at all n locations
nnnnnnnnnnnnnnnnnnnnnnnnnnnnnnnnnnnnnnnnnnnnnnnnnnnnnnnnnnnnnnnnnnnnnnnctttttttttttttttttattccaatctaaatatatataatcatttgattaaggagaaatatagattagtggaatgtgtctaactatacaatatgaagataaaaacttgtagtcttatgctttctttcatttgcaaatccacagaccatacaaaaaataataatagtgaagagggctaaagtggaacaatctctaggtggttctgagacgttttctcgagaaccttcctggaatcttctatccggtcacacggcaaaatcggcatcagaaacttctaaaactttgtgggtaccaattgggttcacgcctgacttgaacatgttgccttcaatggacatttctttgaggaatggatgcctgtagaatgcgtcggggattctcccgggaaattgggtgtgatcaaggtacaggtaggccagttaaggatatgagcatggcaaagggaggtnccanaatttgtggaanccgggaacacccaagttgaagattgncccggcggnccccccccaaaggtnttccag

SEQ ID NO: 133236 - DNA, 521 bp, Arabidopsis thaliana
  unsure (1)..(521): unsure at all n locations
tgtnnnnnnnnnnnnnnnnnnnnnnnnnnnnnnnnnnnnnnnnnnnnnnnnnnnnnnnnnnnnnnnnnnnnnnnnnnnctttttttttttttttttttgaagtcaagtcaaagataaattaaaatctggattatggtcaactcaagattctactgcttcataatctttaatatatttgtatatacacaaatattaaaccatatagagaaaaaaactacatcacaaaaaatcacgtattcaataaacacacgcaaggtagcaataactcgttttctcgactgcaaaactttcccggaaaatgtatcttctttttatttagcatcgccataggaagaatctacgaggctgacgaacttcaccgtgccatcaccaccacacgttataaatccattcggacaaacttgtatgtcagtcaccccagcccggatgattccaccgtagcctctcgagtttggctgcagaaaagtgtgtctttcgtgtagtttaggccaatgatgaatcaactttgcagctttcgcatc

SEQ ID NO: 133237 - DNA, 594 bp, Arabidopsis thaliana
  unsure (1)..(594): unsure at all n locations
ttgtnnnnnnnnnnnnnnnnnnnnnnnnnnnnnnnnnnnnnnnnnnnnnnnnnnnnnnnnnnnnnnnnnnnnnnnnnnctttttttttttttttcaaagactaagatttttatccataaaatgcctaattttgtaaaatccataaaagttgagtcggtttagaaaattgatttcatcatctactctaaaagccttaaacaaaacagtatcacaacgtttggtaataataatgtcttataacaacggtttagaaaaaacaccaaaccggttttaaattggttctcatcagttcttctttgtgagattaatgtcttgaggaaggagagtgtagtcgatgtgaaggtcctccaacattctcttaatggccaaagaaagttcggttcttctaagattcctctctctgttttcctgaaacgtgatggtgtggtcactgtatagggccatcttcagcttgttcatgttctctatctccttcaccaccaccgagtgaaccggtgcccaatgttgcgggttctgctccaagtactcggcgattctttctttgagatgtgctatcttagagacctggtgtcgagaaagagatagagaattcca

SEQ ID NO: 133238 - DNA, 598 bp, Arabidopsis thaliana
  unsure (1)..(598): unsure at all n locations
nnnnnnnnnnnnnnnnnnnnnnnnnnnnnnnnnnnnnnnnnnnnnnnnnnnnnnnnnnnnnnnnnnnnnnnnncttttttttttttttttgcattttgaagttattagattgaagggtgttattgtacaaataaccccaaaagaatttgaagaggatctctcaagtatacttgtgtgttgttcttgttacactgtaaaactctttataataggaaacaatatgtatgtatacatgaagaaacacaatgtaatcaagaatcaatggcatcaacaggaagtggaagttgttcttttcagacactttggtaccaatcctttctccaaacatctctttcaccgtatctcctccccttcctaacccggaaaccgaacccaagaacccgtcttccggggaaatttccacctcttctccggattccggccaccgggtttttagtggttcatcctgaatatctctaggctcaattgggcattgggctttaagccctcaaacctggtggaccggatttcaattttcngngggccccgcggnttanggggnaacggaaggtccgacccgaaaaggtancggaccgccnannaaaggtcgggggcggaa

SEQ ID NO: 133239 - DNA, 576 bp, Arabidopsis thaliana
  unsure (1)..(576): unsure at all n locations
gaatgnnnnnnnnnnnnnnnnnnnnnnnnnnnnnnnnnnnnnnnnnnnnnnnnnnnnnnnnnnnnnnnnnnnnnnnnnnnnctttttttttttttttgtttccatttctgaattgattggatgtaaatttatccctattttcaaacaactaacacctataatcatatttcacaatattttttacactctcaaaaacatgaaaaataaagtgaggtaagaaaattttaccaaggcaaagaagagagacgtgaactccaagcttctcgtccttttcttccttcatctcgattacttacaaaagctttcttggtggatttgcttaactgaaacaatggatgcttacacaacctttgtaccggtccaatatttccattacccgatgaagtatctaaaacaccttcatgatcgtttctcttctttatattccaaaactcttcttcattgtcagcctctagcctacacagagtagccactctcaagaacttagggttattattgtttggtttctcagggcttaatatctcggagtgttgtgattcccattcttctgatggatcagatgtttgtttcttgagc

SEQ ID NO: 133240 - DNA, 752 bp, Arabidopsis thaliana
  unsure (1)..(752): unsure at all n locations
nnnnnnnnnnnnnnnnnnnnnnnnnnnnnnnnnnnnnnnnnnnnntaggtcnnnnnnnnnnnnnnnnnnnnnnnnnnnnnnnnnnnnnnnnnnnnnnnnnnaatcctaaaactttttctttttctcgttttttttagtaatctttttattacagcattcaaattatagcagagtatgtacaatacaaggagaaaagattaaactaagatcagtgatcatcagctgtacataaagaagaaagatatgaaaataaaagaaagttaaagaagagacaaatgaaacccacaaatcatataaaggggctgtctggttttagattgtgttatttgaattcaaagtatttacattttttgttcttttttggggggaggggggtttcttccatcacgtctatctgctgccttaggaaccagcaaaaggatcaggaagcttgttgatgaatagcagggccaggaagcattgctattggccctatgaagtatttacatcctgaaaagagaccataagggtttgaagtagttggtgctgaaggtggtggtgaaattgaacttgatgccagaggtctcgagccctggtctggacagagaagatggggtttaccccccctaggggaaaacaaaacctgaaagttgtggagggaatttcactatttggcgctttatgtgggacaatttgcccaacaatgttttgttgccggcttgggaaaatatctgtgaacaaagccttaaatatcaaggacagggctttatttg

SEQ ID NO: 133241 - DNA, 506 bp, Arabidopsis thaliana
taggtacactatagaagactatgacgtcgcacgcacgcgtacgtaagcttggatcctctagagcggtcgccctttttttttttttcttgtttcctttactttctgggttcttcattttattcttttgctttaaattcacactaattttccttcgctttagttaccactgtatctgtgtatagccttacccttatcatacactaaaactgcgcctggggcgtaatttagctgcaagaggattagccatctcacacgagagcctcagtttctcggacaagtcaacggtcttctcatcggacggcgtcagccattcaaactcatgcaaaagcgtcgcagtccaaaacgtcacggtggtcaaaccaagattcttcccggggcaaacccgacgaccggacccgaacggtgcaagcctcaaatcagacccaagaaccgagaactcaacctcaccttccttggctacaaaacgttcgggtttaaactccaacggattctcccacacgtgtgga

SEQ ID NO: 133242 - DNA, 693 bp, Arabidopsis thaliana
  unsure (1)..(693): unsure at all n locations
actatcgaagattatgaggtagactgcacgcgtacgtaagcttggatcctctagagctgccgcccttttttttttcttttttttttatgaacaaaagttagtttattaagcagttgaagaattttttttatcttcttacaacaaaatctaaaaatagtaaataaaaataacctaaagtatcaaaaacacataagtttccacggccataaaactatacacgacatgcctccctcaaaacttccaacttgagattttcttaaataatgcatttacatacagaagattcagaacttggagcagagtagcaatggacatgggagacaattcttcatttacttccctctggagaaatcatcccatgggtggtcttgaccaaagatttcgtcgataatgtttgaagttggaagcagatcaatgttcttagtccaacaatgatctggcagtattgaatcacaaggatcaaatgaatacgactggtccacaagatcattgcagtggcgccagtaattccccaatggtggnttcctcctcnatttccaactggggcatcgagagtagattcggtggggctgntcnccaagggcatggncgnanctccatagnataacccctccccttggcccctganngggtttttcgggttggcaccgngggggtcngnccnnaaaggggnggcnacccactgccccncnc

SEQ ID NO: 133243 - DNA, 531 bp, Arabidopsis thaliana
  unsure (1)..(531): unsure at all n locations
cgattcnnntaggctcactatagaagtactatggcgtcccatgcacgcgtacgtaagcttggatcctctagagcggccgccctttttttttttttttttggatatttgtttttatttggatgtggttgcaaaatcgctacattacttctttccggacttagcagcagctcccttggctggggcagctcctcccttttgtcctgggagtttcttggtgacttccttgatgacaccgacggcaacggtttgtctcatatctctgacggcgaatcttccaagaggtgggtattcagagaaggattcaacgcacattggcttggatggaatcatcttaacgatggcagagtctccagacttgatgttctttgggaaggcttcgagctcctttccagaacgtctgtcaatcttggtgaggatttcgtggaacttgcaggcaatgtgagcagtgtggcaatccaagacaggggcgtatccgttgtggatttgtccagggtggttcatgataatgacttgagcattgaagaagtcagt

SEQ ID NO: 133244 - DNA, 528 bp, Arabidopsis thaliana
  unsure (1)..(528): unsure at all n locations
nnnnnnnnnnnnnnnnnnnnnnnnnnnnnnnnnnnnnnnnnnnnnnnnnnnnnnnnnnnnnnnnnnnnnnnnnnnctttttttttttttttagtataaaatcataatctttcttttttcaaatttcaatatatacaagtaatctttatattcacgaagaatgaatcctttggtaataaaataaaaataaaaatatatagtttctttttgtaacaatcaatgggttttccttgttgttttagtcttcaacagcttcatcgaatacgattcacatgagaaaatggctcggcaactgcttttggtgcagctttttttgcagtctctggtactccaaaaacgttccaaaacctcagggtctcgtctcctgctgctgaagctacagtacaaccatctggactctgggccatatatagaactcttgatgtatgaccagtgagctcagccattttcaccatggatgggtacttccaaagtgtaagctgattctgtgtaaacccatgtgagctaagcaactctctttcattcttgc

SEQ ID NO: 133245 - DNA, 657 bp, Arabidopsis thaliana
ctctgacttcgcatgcacgcgtacgtaagcttggatcctctagagcggccgccctttttttttttttttttatctggaaatagttttcttttttctgtcgactattgagtgtcaaccatattattgggaaacataaccatacaagtataaaaaacaattactccgaagtccctagtgatataaattcacaacaattcaaccattcatcccaagtaaccaaaagcctcagtcccttgtaaggtgtaaacgggtttaaacatcagcctcaggctacaaccggatacgatgaacatgttgcaacaccacacatgttctttcccatttccatcttgaagtagccattgtctccccattcacctccccatgagttctttataagccagtacgggacggccgcttcaactccataaccaactgctaacactgcatggtttacatccattggagtgtcaccacatgtattgctagtaaaaactcccttcttataaaacctgaattcatgtacaacctaaaacgcaacattaactgggccttaccagaaccgaccgaggtgctttaagttgaatcttttttgcacccccaggggtaattggtttgacaagaaattcaccgggtcttttgttaccaacgcggattttttttttcggcttgaaaaaa

SEQ ID NO: 133246 - DNA, 401 bp, Arabidopsis thaliana
  unsure (1)..(401): unsure at all n locations
cccaagtgatataaatctataacaattcaagtattcaaccattcatcccaaatanccaggagncctcagtcccttgtaagttaacgggcttaaacatcaggctcaggcaggcaggcctcttgacattatctggaaataggttccttttttctgtcgactattgagtgtcaaccatattatttggaaacataaccatacaagtattaaaaacaattactccgaagtccctagtgatataaattcacaacaattcaaccattcatcccaagtaaccaaaagcctcagtcccttgtaaggtgtaaacgggtttaaacatcagcctcaggctacaaccggatacgatgaacatgttgcaacaccacacatggtctttgccatttccatctttgaagnaggccatt

SEQ ID NO: 133247 - DNA, 527 bp, Arabidopsis thaliana
  unsure (1)..(527): unsure at all n locations
cgnnnnnnnnnnnnnnctactatagaagagttatgacgtcgactgcacgcgtacgtaagcttggatcctctagagcgtccgcccttttttttttttttttatagatcaactacgtcctagtccaaaatctgtggttataactgtagtttataatagtaaaaataaaagcttacagtaaccctcttttcatcattgtaagattcataacaatgctcttaatatgaatatacaaatttcattttcaagagatatcgtaaagcgaaaacatattgttcaagaactagacttcgactggagacaatggaggaacatctactagcctttcaatttcttccaactggtcatatggagcaatctggctaaacccgtcgggccaggttatcgagacagcgtagtttcccattggtcgtatgtcctcaggttcgatatcttccgctacatcgccatattagaactttttgctctccagtccattcatccacactttgggcagatctatcatttcttctgacggttgcagggtgcag

SEQ ID NO: 133248 - DNA, 588 bp, Arabidopsis thaliana
  unsure (1)..(588): unsure at all n locations
taggtacnnnnnnnnnnnnnnnnnnnnnnnnnnnnnnnnnnnnnnnnnnnnnnnnnnnnnnnnnnnnnnnnnnnnctttttttttttttttagaacaaatgaaaatttcttgatttattttttaaatgaggaagtacgtataattaaatatgtttacatataatatgttgttcatcaatttcattctttgctaagcaaaccaccatagaaaggaatatcggtttgaggcaaccatgtatctcccatggtgaagttgtagaccgtgaagttcatggcttctgccaagttcaataaattgtaccctaaccactgcactctctggttcgtgttagcacctggtccaaagttactatactcaccgtagtagattgtgtctagtccaattgtaccgttccattcgagccatccgactggttgaacaatgtcactaatgtatgattgcatgaaaaccgtccttgagtatggcttccacggtctccctaagaatgtcatggcagatttaggctcagctgcaagatctggggcggcttttattgtacaattgatgatagagattccggtattctggtttggatcgagtcttccatg

SEQ ID NO: 133249 - DNA, 689 bp, Arabidopsis thaliana
  unsure (1)..(689): unsure at all n locations
nnnnnnnnnnctatagaagatctatgacgtcacctgcacgcgtacgtaagcttggatcctctagagcggccgccctttttttttttttttttgaatggtaacaaaaaattgacattcaaaccaacatgttttgtcagattgagggggcagaacaaagatgaaagaacttttgatgcatgaaagaattgatggaatcttcgtaaatgttgaatatcacacactatccctaaagaaaattgcatttacatcgttccttcttctccctatttacaaaaaaaaaccacaatggcatttcactgtctcacctctatttctctctcgtctctgctgcaacaataatgatgcgcttaacgtctcttttgcgcgaggatcttctggatcttccatgtccaagacagcaagaaggccacaagtccaagtcccacacttccccatagtgtcactacccacaatggcatttctgttgggtacaatccacttccaaacttgatgcagatgagaaggttctactatgcatatccccagtggcagccaacagaatgcttccacctttttcacaggttttctgtcttgagntatgaattgtactcccgtgttgttggatcgntatgggcacccanggtnagcntttngggntnnctggggttggggggggtccncaggttaacttgagaanatttgttcagtng

SEQ ID NO: 133250 - DNA, 525 bp, Arabidopsis thaliana
  unsure (1)..(525): unsure at all n locations
cggttcttnnnnnnnnnnnnnnnnnnnnnnnnnnnnnnnnnnnnnnnnnnnnnnnnnnnnnnnnnnnnnnnnnnnnnnnnnnncttttttttttttttttgggaataagatttttctatcagtaggatgcaaatatttccaacagggaaaacatagttaaacacatgagtttttttttcctaagacattcatgggtgaatggcgtttaatacaaaacatctgcgccgtttcacccttaacactagagtttcggtacaatactaaatacaacatcaacctaagcatgtcgatacacaaccaactaaaacaaagaacccaacggaagattaaaatagcattaaaggaagttaaaagtgaaaaggatcttttcttccctatcagagttctacagcaaggagtcataagtaggttccctagatacacacactagtagttcctagttaattaagtcagaccagaagatatcacgactgcttgtacatatggcgcctcagcatctcatttatccccacagctgaaatgctt

SEQ ID NO: 133251 - DNA, 563 bp, Arabidopsis thaliana
  unsure (1)..(563): unsure at all n locations
nnnnnnnnnnnnnnnnnnnnnnnnnnnnnnnnnnnnnnnnnnnnnnnnnnnnnnnnnnnnnnnnnnnnnnnnnnncttctttttttttttttttaaagttttatgactcctttattagcatgaaaatatcatacttccaaaaagtaaacccgttatggggctgaccaagaaacgggaagcgagttatttagaaacaacagaacaaaggaacgcagaagaagagcgacgtgttaagtctcagaaccagcaatgcacaatgccctttagttcaagttgatgacatcgtaaatgaaactggcacgtttcagttagcaaggacgcttttaaactgagctatcgattcaatagccttgtcaaactcactatcttccaatgcaaatgaaaaccggcagtaaccagggattccagtccaggaaccgctgtttaagcaaacaccggtatggctgaggaacacatccctcatatttgaatccgtaagctcgacgatttcctgtccatctcctgctttcagctttacttttttgtgagaaagctttggnttgcnccattggatccngcngggg

SEQ ID NO: 133252 - DNA, 513 bp, Arabidopsis thaliana
  unsure (1)..(513): unsure at all n locations
gtcaaaaaatatatatctgttaagccaaaaaacagtcctaaaattaaattttgttatgatttctacactaaatgatactaaagaataaaccccacatcagagcttacatgtgatttgggaacaaaataaatttcctttttggtatcctaagactttcgaactcgtgatcttccacttccttttttcctaagctaatgtttttataccaaaaaaaagaagaagaaaacttcaacaagcaaagatcaaaaaaggatctcgacaagagaaatgtggggggcatcaaagagcaatttacaggtgatcagtgttgagcgtgtgggaactgtaagcttttgttatttatggcccatggaaacttgcttaatggcaacaatggggggggagtctctggggccttccccttcttctcgcctagtttggatcaggggggcccggagcctaccccttccaaccggctgaaccgcgttggggccnnantntccgctttccnggcaaaaaccccctttggtacca

SEQ ID NO: 133253 - DNA, 672 bp, Arabidopsis thaliana
  unsure (1)..(672): unsure at all n locations
nnnnnnnnnnnnnnnnnnnnnnnnnnnnnnnnnnnnnnnnnnnnnnnnnnnnnnnnnnnnnnnnnnnnnnnnnnnnnnnnnnnnnnnnnnnnnnnnnnnnnnnnnnnnnnnnnnnnnnnnnnnnnnnnnnngggggaacaaaaaaaatttcctttttgggatcctaagactttcgaactcgggatcttccacttccttttttcctaagctaagggttttatccccaaaaaaagaagaagaaaacttcaccaagccaagatcaaaaaggggtccccgaccagagaaatggggggggcatcaaagagcaatttacaggtgatcagtgttgagcgtgtgggaactgtaagcttttgttatttatggccatggaaacttgcttaatggcaacaatggaggtggaggctctgcggcttctccttcttctcgcctagtttgtatcagatgagtcctgagactacactcttctatctgcatgatcgcagttgaggccagaagatcttcgcattttccttgcatagaactctcttttgttactacaacagcgagttctgttaccattatgttcatctcctccacctttgagagtaaagaccaaatggccgatcccatagcctgcattacatcgagggccgaggacatagctgctttcaaagattctgtgtccgcctttgt

SEQ ID NO: 133254 - DNA, 498 bp, Arabidopsis thaliana
  unsure (1)..(498): unsure at all n locations
nnnnnnnnnnnnnnnnnnnnnnnnnnnnnnnnnnnnnnnnnnnnnnnnnnnnnnnnnnnnnnnnnnnnnnnnnncttttttttttttttttaagaagccaaagaaggttccattattaacactcgagtttattacatgaacatgatacacaaacatgtttagacccatgagagaaacaacagaagcaaataacattacaatagtacaaaactacaaggcctttgaagagcttaagagccagagagattagaaaaaacaaaaaagatgacaagttatgggattgatagcaacagaagagtaataatgagacaagagagagtggggacatagattttcacctaatgaaaggggaaagatttaattttcaacaggtaacaccactcccaaaaattcaatatttggccttttggattttttttaattcacacccaacaccaaccagaccttaaaagagatttttttattactcacgaggtaagaatattttttaccgatcat

SEQ ID NO: 133255 - DNA, 547 bp, Arabidopsis thaliana
atagaagagcttgacgtcgcatgcacgcgtacgtaagcttggatcctctagagcggccgcccttttttttttttttttgaaagtttgaaacttttttttctccccacatgaagaagacgaaacagagagagatgattattactgcacaaagtaaaaagacaacaacaaatccacatgaatattacacaaactttttatctcaacaagtctttcagtttctcactcgtttttagcagcttcagcttgtctagctccaacagaaaagaactctgtgatgacttcaagtggcatgcctttagtttccgggactttaatgaacacaaagacccatgaaatgcaacatacgattgcgtacattccaaacacaccagctagtccaatggatttgagcagcacggggagactgtaagtgacgattatgtcacagatccagaaggtgagtgcgcagatggcgatgcagattccgcggactcgagttggaaaaatctctgaacagaggatgtttggagcaggaccgaaacccatcacgaagaagcagaagtagagc

SEQ ID NO: 133256 - DNA, 467 bp, Arabidopsis thaliana
  unsure (1)..(467): unsure at all n locations
gtttcagtatatctgctccaaagaggactggcttatccgctaatgcgccttcaacttcaagaagcgttccttctggtggacaaaagctacctccaaggaggatcaacggccttcctgggactgctccttcaacttcaaaaaatgcagccaccagacaaaaacatgtaatgtaacttatatagcttttttacagatcattttttcttcgagtgtatcatttacatggctacttcaagtttcaagaactccgagttttgaaactctggcttgatgatatcctagtttgtaacaatagatcttcaaaagtttttacaatgatttaataaagtgctttgttttctaaaanaaaaaaannaaaaaaaaaaaaaaaaannaaaaaaaaaaaaaaaaaaaaaaaaaaaaaaaaaanggggggcggccgctctaaaggatccaagcttacgtacgcgtgcatgcagacgcatagt

SEQ ID NO: 133257 - DNA, 907 bp, Arabidopsis thaliana
  unsure (1)..(907): unsure at all n locations
cggattctannnnnnnnnnnnnnnnnnnnnnnnnnnnnnnnnnnnnnnnnnnnnnnnnnnnnnnnnnnnnnnnnnnnnnnntcttttttttttttttttttttttctttaatgaaaaagaatcttattaaataaatagagttccgtgaatataataaacaatatttccagtcgtatggtaaatattctccttcgttaaacattattggtctatgtccaaactccatgcctatgccttgctaagcacggtaggtatactctgttcattcctgaagaaattatctggatcagccgctgttttaacctttactaatcgatcaaaattatctccaaaatacttccttccatacacttctccttcctcataactattcgtaccatgatcattcacacctatatcgacatctcggtaattcaagtaagcatttctagggttcttgctcacaaacccggtcatgaaactataaagaacgttagcctgattcaagaaacccttctctatctcgacagagttttcttgccaagtcaccgagtactgaatcttaaaaagcttgcttcggtgcggaaacggcgtcgcgttaaccgtaacctccgccattttcccaccatacggattaaaaacaagcccgattttccccagctcagtcatcttcttggacaaagactcaatcccatctctaggaatctcactcgcaacgtaatccgatttcctctttccgaaattcgctctatcaagattccgatcgagaaacactttaggatcaatctgagtagggttaacacgattatcccaccataaagctgactgaaaccaagtcatctccgaacagttctccttctttaaactcaattcaggaaactccttaccaagcaaagcaacaacttcctctgctctgcctaaaaacaga

SEQ ID NO: 133258 - DNA, 656 bp, Arabidopsis thaliana
  unsure (1)..(656): unsure at all n locations
cgnnnnnnnnnnnnnnnnnnnnnnnnnnnnnnnnnnnnnnnnnnnnnnnnnnnnnnnnnnnnnnnnnnnnnnnnnnnnnnnnctttttttttttttttatgaaaatctgatcattggaaaccgaacaagtgttagttgaaaagtttacaaaacacagtttaatcaatcaactatcaaatcccaacttccatttacacaaacaaagggcactccctgttttttttttttttcagacttaggttacttttgccccaagaaacaaaatttatcgactgaagcaaataatggggagaaagatccacagttggaaactataaaggtgtagtcatataagttaggaagtttaatcaaagttctgctctgcttttacttctcttcatcttcgccttgaatctcgacttcaccattagtgtctctactgtgtttatgaagtttccaatggccatcacaaccagaagaatgccacaaaccaatacctgccattcagcgactacccccatcaacactgtcctaagcaactgggatcccccgtaggcttcaaagccctgtaaaggggccaaaatgggaaataattagcaatagtggcccatctactccagccgtttccccaaagccatacgacgtccatccttttagcctttccaagtcaatgcgag

SEQ ID NO: 133259 - DNA, 762 bp, Arabidopsis thaliana
ccttttgaacaagcactaacgtcgattgcacgcgtacgtaagcttgaatcctctaaagcggccgcccttttttttttttttttttttttttcttttttttttttttaattaaatggttcgggcataatctaatgaatatgcaactctattaaacttcctttcttatgaaggtaaaaaaaagaggaaaacgtaatagagcgtttctaatttctaagtggaaaggaatcaaagagtaactaaaaggagaaaaacagtctctaaggtcaaaaactaggtcaagcaaaaaagaaactgtacaaggcaggccagaaaataatgccttgaatcgtgtaactgttgatgatcagaagaactagtaacggggctttctgaagggagtaaagaaagatatgcagtgcttgtccttgctagggtcctcatctccaacctgctttgttttcaccacatcctgctctgagattctcgcccttgtaaggtgttttttttactcgggagatcacactacgacgtttacctctttcattatctgtggaagcatttctatgatttcctcaaacaggggtctctgttctgggtcttgatgccagcatctctttagaagccccttcacttttgggggtgttttctttgggattttgggccgaagccccttttggacaacgccaacagctgctttgtgtggagtcaagaaagcatatgggatgtcaccagtcagaagttcccatagcactatcggataactgaacacctctgccttgggat

SEQ ID NO: 133260 - DNA, 519 bp, Arabidopsis thaliana
  unsure (1)..(519): unsure at all n locations
cgattaaannnnnnnnnnnnnnnnnnnnnnnnnnnnnnnnnnnnnnnnnnnnnnnnnnnnnnnnnnnnnnnnnnnnnnnnnncttttttttttttttttgaaaaatattatatattcgataaaattcagtctaaagagtatacaaatgtggactgttacacacatgtattgaggcatatatagcaacttgagaaatcagatcaaccatgaaatcacgcaatacaaacaaattatatgacacacctgattatataaataagtatcgaatttaagttgtaaaaccacaatctctaattaagataccttttagtttgtccttgtacttctccacgatcatcgtcttgagcacagactatgcatgcagttaatcctgaccgttggtagtccttttaatcaatctccacgtcgtaagtcgtaacatacgttaatgatccgacaaaacacacaaaaatctcacaagagatcattagaaggacccgagaaatccgaaccaggcccaaagtactgatttgtttgatt

SEQ ID NO: 133261 - DNA, 520 bp, Arabidopsis thaliana
  unsure (1)..(520): unsure at all n locations
nnnnnnnnnnnnnnnnnnnnnnnnnnnnnnnnnngcacgcgtacgtaagcttggatcctctagagctgccgcccttggggttttcctttttttttgccacaggaattaagtttgcctgaattaagtttgcctgaatcaagtttgccacaggaattagaagtaaactgttaggacttcggaaatctactaaagaacctagagaatacattccaaatatatcctcatttcaagctaaacagcttaattaaaccattgtgtcaatgttgctcctcgcttgattgaagctccttgtaagttgtaaccttgtaaaggcactcacagctaaatctgtcaattcattgcagaagcagggtcggtcaaatggtatgcaggtagattaactgcttgaatagagattacaaacctatatattataaacgtggcttgcttcaatgcttaaacaaaggtattgggttcaagtctagctaatccacattcaaccagacaacccatagatattacgaacgatcacacagtatgt

SEQ ID NO: 133262 - DNA, 593 bp, Arabidopsis thaliana
  unsure (1)..(593): unsure at all n locations
nnnnnnnnnnnnnnnnnnnnnnnnnnnnnnnnnnnnnnnnnnnnnnnnnnnnnnnnnnnnnnnnnnnnnnnnnnnnnnnnnnnnnnnnnnnnnnnnnnnnnnnnnnnnnnnnnnnnnnacatggtacttattggttctgtgatcaatcaggacttttataaatagaagacatatggcacaaacaacaacacacaaatatgttcacctggagattattccaccgggcaggaaacccgtgaataaaaattcaaagaatggttctatttctatgacatcctaatgtgactgaaaaacgaaagaaagaagatagaactctcgggttttcgatcttcttttatcgcctcctcaagtgtggtggtgtggtatatccttcgaagaaatctagaacgatggtctcgatatcttcaaccgaatatttcaaatagttctcagggtgtcttccactctctatatgacccctgaaccttccaagaaacgatctataagcaggggttagatgcccggtagcgaaatcggggtcctctnnaagctgagcacntggaccgncacggggnngngcctgngaccnctcgacatggatgatgctaacccct

SEQ ID NO: 133263 - DNA, 592 bp, Arabidopsis thaliana
  unsure (1)..(592): unsure at all n locations
cgnnnnnnnnnnnnnnnnnnnnnnnnnnnnnnnnnnnnnnnnnnnnnnnnnnnnnnnnnnnnnnnnnnnnnnnnnnnnnnncttttttttttttttttttgtctaataaacaaatttatttcattaatcttccaattttgggaagaaaaaaacaacactatgaaattacaaaggaacagaacatctgcaatataagtctatcccccaaattaattcagattatgcaaaagctaatacaaacactatagaaaattacaaacattacaacttacaatgacaaaccgcaaaaaccgtttcttcttcatcatcatcatccaatccatttaacgattaaatatcaaagttctccatctgaatactgctctttaacggcacatagtcaccaagatatccaccaagatgatcgtgcaacgcagatttatcaatcggctgatgatgaaaactcttacaaacatagtaaaacacactctgcacaagcagcccaactagattcacaatcactagaatcccaaccaagaaaccaccaacaacaatcttcgtaaacaacccgaaatcatcacctccatgaaccacaacaccaccgaaaacacca

SEQ ID NO: 133264 - DNA, 670 bp, Arabidopsis thaliana
  unsure (1)..(670): unsure at all n locations
nnnnnnnnnnnnnnnnnnnnngaggagatagtgacattctttattagaaaagaaagaagacttattgaacatagctcgcttttctttttttacataaaccaatatatgaaattaaaattgtcttcttcgttttgcactttggagcgtttaacagttgtagaatccattagtctcccataattaatatgtttaaggataaatggttaggcaatttcgggagtttcccaaaggtttttctccgatatgactacatcgatgcaaaatccgaaatgcttcctctaaatacttgaaacttggttcgatccttaaaccctccaaatctttgtttaaccgtctgagtccctgtcaaggaacggtaacggtacggtcttcactgccctaaattggccgacattgtttaagtgctcattctccactctgtaaaagttccagtggcctcgacgaatgacttcaagtgacgccaagaagaaatctagcaaatgagactgaacaggactgaccctgaatctcataattgtctcgatccaagcaactcgcaacaccaaattcaacgcaatggagaggtagtagaagttcttgttccggagaaccaaattgtctcttagccatggatttttcgatttagggtttagaagaccccaatccttgacaaagtcccagtataattggt

SEQ ID NO: 133265 - DNA, 535 bp, Arabidopsis thaliana
  unsure (1)..(535): unsure at all n locations
ttaggacgcactatagaatacnttgacgtcgcatgcacgcgtacgtaagcttggatcctctagagccggccgctccctgcgttttttttttttttttgcgtctgtaactcaaagactttgattgattttcacttccaaatgttaaaacttgaacaatagtaataagtaaggacaaaactttcacaccacaaaacgattatgtgaagtgaataccagacttgttgaacaaggaaagaagatacaaaaactcttgttgtgatagctttgaagatctcttctcctcgaaaccaccttccttcaagacattcataactttctccttgaactctgatgtttctcctccgtctccttccccctcatccatctccatatcatcggcatccatttcgttgtcgtcatcttccattcccatgctctggtcaccaagatccatggaggtggtgttcaaagcaggttctccattgttctgcaacgaagctagtacggcctgaagagtcttgaagttcttcttcagcatggaaagaacagacttttg

SEQ ID NO: 133266 - DNA, 526 bp, Arabidopsis thaliana
atagaagagcttgacgtcgcatgcacgcgtacgtaagcttggatcctctagagcggccgccctttttttttttttttttttttttttttttttttaaataaaaagaagaaacaatttattatcaccaaaagaattaaacaagaaaataatactctttggggaatcttcaccttaatgactcagatcaggttttgactattaaagaacatcttatatatcaaacataaactaaacattagtattaatcttctggagtattgggtttactctatattaacaaccatcacagaagttcatcaagaaacgtcttccctttatatttctcgaccttaaatcccatctcctccatccgcaaccgctctgtctcgagctcagcgagctctgctttcatctcctcgaccctcaacctcgcctccgctacttccttctcaatccgagccaaatcagcttcttgaatctccatttcttgtttcttagacctcaccaatccttcttgcctctccttctttgagtctgtgttctcttg

SEQ ID NO: 133267 - DNA, 538 bp, Arabidopsis thaliana
  unsure (1)..(538): unsure at all n locations
nnnnnnnnnnnnnnnnnnnnnnnnnnnnnnnnnnnnnnnnnnnnnnnnnnnnnnnnnnnnnnnnnnnnnnnnctttttttttttttttttttccgtaatgtagaaacttgagagactttttagtacagtcataagttatcaaatgatcctaccaaaaagaaaagaaaagttttacagaataaactgaagtgtgtgacaaattctaaacttccaatgaaaacaccagaacgtttataaaagtgatccggaatttcatcgggaatcttcttcgggatcccgctgccatgaatcctgagattctgactgtaggttaatgatctgagaaactagaagcttcgagatcccacttatcgctgcctggacctcatctggttcccttgagcctctccaagccgaggactgcgagctcaatgagtactcgcctgctgcaacttgtgtcttctttgacgttgcaagaaccttctccaaatctaactgtgataatggcctagggtccaaacatggtttcccctttctctctgcatctaggatttctctg

SEQ ID NO: 133268 - DNA, 539 bp, Arabidopsis thaliana
  unsure (1)..(539): unsure at all n locations
ggattgtttaggtgacttatangaagactatgacgtcgcatgcacgcgtacgtaagcttggatcctctagagcggccgccctttttttttttttttttaaccaaaagcaatcagaaagtttccaaggactaaagcaaaataggtgtggcattcagtctagccgagccgaggatagcgtgattaaaagatacacatagataactaaaacaaaacaaggatcggatctgataagtcaaattcctagggggactttgttcaaagacttcattgttcatcccacttgtcacacggctccaagagttggacattgcaactatatatatccttgtactcttctatcatgtccaagataagatcatccacttgagggtcgtttccaaacggtgaaggatcatactcttctctatagatcttcatctccttcaaacatggaaagttgtccaagaaatgctctatcaggtgcatctctttcattggtactctaaactctttaatctctaccacttttactggaaaaaatttgagcgaacggcctttat

SEQ ID NO: 133269 - DNA, 523 bp, Arabidopsis thaliana
  unsure (1)..(523): unsure at all n locations
nnnnnnnnnnnnnnnnnnnnnnnnnnnnnnnnnnnnnnnnnnnnnnnnnnnnnnnnnnnnnnnnnnnnnnnctttttttttttttttagaaattaacatatgatagattaaaaaatactcaaaaattaaacaaaagttgacattaactgtccaaattttatgaggattcagattcaatgtagacatgaaacaaatagagagtggagaagaatcttaacataatctaaatgccactaaacatcaaagttcatacgattgtctactgttacagcattttttacaacatattaagcgactctgcctatttttgtcggcgggtgaacaacgcattacgatctgcctttttctttgatctttcacaagaagctggttccgacagagagatcaactaaatccttgagaatcgaatatcgggttgtcccaatctggtgagcaagttcaagctgttcctccaatggaagcatctcgtaatggcatagtaactcgcagtcaactatgctgtcaggcccagatcgtcgagcct

SEQ ID NO: 133270 - DNA, 533 bp, Arabidopsis thaliana
  unsure (1)..(533): unsure at all n locations
ggatagannnnnnnnnnnnnnnnnnnnnnnnnnnnnnnnnnnnnnnnnnnnnnnnnnnnnnnnnnnnnnnnnnnnnnnncttttttttttttttttttgattgttttttcaaacgcaaacctcatttttattttttgaataaactatcatgaaatttaaaacatttacacataaacaaattcaaaagtcgatgcatgtattatatacacacaaacgtaatcataatcttaaaacaatcgtattaaatacatcttcaatcctaaatgcaaacgcgatcaacgatcagtaagtttgttcgccgtgtttgagggaagagaacactgcctttagttcctacagaatagagggaatcgctatttataccttgtcggccactgaattcctctcaagggtcagggtatcagttgagcgactagcaatgtccgtctttcgattcgatacattctctgtttagaaccctgagccgatctggacttgcttagcttaataccatgagatagcaaggtctgcaagtggaggcatttccttggctt

SEQ ID NO: 133271 - DNA, 543 bp, Arabidopsis thaliana
  unsure (1)..(543): unsure at all n locations
aatgtattaggacanntaggtgacctatagnaagactatgacgtcgcatgcacgcgtacgtaagcttggatcctctagagcggccgcccttttttttaacatttgaactcatgcatcaattatttgcttttaatcattacatagtgtcacgaaggacaagagaatgacaaagaaaaaaagaacataaaaaaacatatactagtaaccaaactatgggtcaaacacaaatcaaagaattattgccagatttgttagattctgtgtagagaggcccagaagacaaaagcaatataaatcccacatctttctttctgcttcttatgccacaatctgctgctcatggtctatatacatttgctctgcccacgacggcagcttaaacttgtctctactcgctgcaccattcaccgtattcccaaccctctcattcactctctctggtgcattctctttcaccagtgagttcacccacgacacatctggctcgtcactgtagtctctagcagggcgtgacacactgttgttgttgtttccatgaatgcc

SEQ ID NO: 133272 - DNA, 488 bp, Arabidopsis thaliana
  unsure (1)..(488): unsure at all n locations
actcngaaggttttacccagttttggatnccggggccnngnagtttanccnttcccatgcccatgtgtttgttccccatgttgtgcccatatatggtnccgtattnccagntancggtccncataacgagtcagacaagattgcacgagccgtccgggttaaattgcctcttattgaggttggtcccaaggtttttgtttaaatccaattaagatatttggaggcagctctgggaggtgcaacgctttacgagagcccattctatgtatctccaaaccagattcgagctttggagaaaagaaataaagctgggaaatttgctaagaaaataaaggcaaaagcaagaagaaagatgcatgaactctcaaacccattggagcctgatgaatttgcagacatgtggaacgatgaatgataaaagtcgaccaaagtttcttttttgctattgtcaacttctaaattcacaaaatcaacgcagttttgtcttt

SEQ ID NO: 133273 - DNA, 838 bp, Arabidopsis thaliana
  unsure (1)..(838): unsure at all n locations
atagannnnnnnnnnnnnnnnnnnnnnnnnnnnnnnnattccgtttnnnnnnnnnnnnnnnnnnnnnnnnnnnnnnnnctttttttttttttttttttttttttttgccgccactttttttttttttttattataaatcaccatgtttacaaaacacatatagttaagttaaccgttactttctttagcttatctctaagtcttggaaacaagaagaaaaaaaagagcatcaaaaggttcagttatgcttttttgtgtatttgggatttagggtgttctttgagctgataaggatcgactgaaggagctaaccagagacccaccagaatgatcaagtgtagacacaatagcaaacccgaggaggacggtgttgatggataaacattccaacagagctcaatgccgaggaacatgatcaagcgcagccaagtgggaaacggtgttctccatagtagataaggtagcgaatagaagtaccatgagtagaactggtagtgcagagagcgagcaaatacaatgccgatgaaattcccaacaaacatggccgtgacgacatgttctttcgtaataatccgtgaggctgatacatcactgaacgagagtgaagacggaagtgtcaagaagaaatgcctagaacgcatgaagcctataatcccgccttcatgcttgcaccacttattatttgcgaacgccacaaggagaaaaaggtgagcaattgagcaagccatacctgcaaaattcttttggaaccacaaaaaactccgtttttgggaaacaaaattntggaaggtttaaacaggacccaagaaaatggaaatggaaaaaaccaccgttccca

SEQ ID NO: 133274 - DNA, 490 bp, Arabidopsis thaliana
acgtcgcatccacgcgtacgtaagcttggatcctctagagcggccgccctttttggggtttttttttttttttttttatgaacacatttcaatttatattgcatggaatcaacaatttacttaagaaaacgttgagagtgatgaaaccacgattaattcagacttcaatatcactttctgtactccgatcatcacgctcaacaatttaatcacttccctaatcaaattaactgcatagtaatcatttaaattactatggtgctggacctccttgatgctaattattatggcgagacgaagaagccagagcgaccatggagctagctagcttattaatggcttccactaatccattcatgccttctctattcatctcaacattagattcttcgatcttgagtctcctctcttgtacgttcatcacttctttatgtctccgatcttgtctctcctcactctccctaatcgcgtttgcgatcactgacacact

SEQ ID NO: 133275 - DNA, 568 bp, Arabidopsis thaliana
  unsure (1)..(568): unsure at all n locations
nnnnnnnnnnnnnnnnnnnnnnnnnnnnnnnnnnnnnnnnnnnnnnnnnnnnnnnnnnnnntctttttttttttttttcactgaaaccgattcattgatatggatccaaaacaaaccgctactaaagtttcactgatttttaacattgagattataaacatcaaaaacctacaacagtataaactaaccaacacaagaaaccgcgttgttctttatgttttcagtcccatctaatgcggcaaccacgagcatgaagcgtctcgagcaattccgatgagagcaagaatctgagaggtgcgagaagtttaagcttcttgagcctattgcaacaggctcttagagcaaactcaaacccttctacagtcacacggctcagatgaactaagtcaacgtcttgaacccgactcagattgctcatcaacatgcatagagccgcatcagacaccgagctatggcacatgtttatctgtcgtaggtctttcgagaagtaagcgagcgcccaaaaacccgaatcatcaatattctcgcagagtttaacgtccaagtaacccaatttcttgcagccgga

SEQ ID NO: 133276 - DNA, 607 bp, Arabidopsis thaliana
  unsure (1)..(607): unsure at all n locations
nnnnnnnnnnnnnnnnnnnnnnnnnnnnnnnnnnnnnnnnnnnnnnnnnnnnnnnnnnnnnnnnnnnnnnnctttttttttttttttgtcgtaatgtcgttaaatattgtaaaaccttttttctgaagtatacgccactacaaaaaaactgttgtataaataaaaatccacaaaaaaggcagaagaatatctagctctctctctcaatctgtctgtctctgctctctctatcttccattgaatatagaactttctatcaagcacataagaacttgaagaataattataaagtttccaaccgaaagtatgtacaaaggaagaagattgtctttccttttcttctgctttgctccagaggagactagagagacctatcagttcagtttgtgttggatttgacggtgaactgaaacgagaaaatccacgtacgaagccccacccgatcccctgtcctctaccatatacgattggaacaacatatttccagctggatctcctttcttgcacaatttaatgcgtaggtaagaacttctttgcctccttatttcattcaccacggcattgaccctctttgatagctgattatcatacttttgcagcacatact

SEQ ID NO: 133277 - DNA, 539 bp, Arabidopsis thaliana
  unsure (1)..(539): unsure at all n locations
nnnnnnnnnnnnnnnnnnnnnnnnnnnnnnnnnnnnnnnnnnnnnnnnnnnnnnnnnnnnnnnnnnnnnnnnnnnnnnnnnnnnnnnnnnnnnnnnnnagaagagaagaagaatttcattataatacttttgaattcatacggaaacatcatttctcaacaagaaccaatacctttacatataaaacgataaaagatagagaatctaaaatgcagagtttgcaagagagccatctttcaagccttgttcatggagcagatgacataagagacttggctggtgaaatcagagcaacagcacctcttccaagtttcgaatacttcttcaacacaccacgtagcttgctctcccccgctttcgagtgaatgaaagctaaaagctttgagcaatccatgagctgagattcggagtagcctgtgtggaatttcagtgtatcagtccaagtaggagtcttgttcaagcaacaccttgctgtgtagaccgctgatgcagcaagcatggaaggacagaacattaaactgtcgtgatgcatcaaaccc

SEQ ID NO: 133278 - DNA, 654 bp, Arabidopsis thaliana
  unsure (1)..(654): unsure at all n locations
taggtgaacctatagaagactttgacgtcgcatgcacgcgtacgtaagcttggatcctctagagcggccgcccttttttttttttttttgattcttaattgccttcatttccggtttaggtaaccggtcatagaggtttgtggtataaaaacaaagttatggtgtgttttacactttacagagtaagaaactgtaccgtctaacaagagattggttctatttggtattatcacaatgatttacaaaggcctcaaaagtgggtaatcttcaagtagttccctttctgacaatgcgtcggcttcgttctgcggtgtccatagtacttctactgccattattttgtttcttggtattgacccgagtttcagtaaggcttccttcagatctgtagttccgtttattggtggcagtttatgtataccctctgcagccatcaagatggttaccacaatatattcattgctgaaaccgctagctttccgaatcttcgagctttgtctctttatgctattcacgttaacaaggggctcctcatcaaattttccccggtctccaatggggggtgggttaaccggtctcccctttccaaaaccgggncacancncnggtganacaangatnagaaacagggggccanaagnaatgtgcccgttc

SEQ ID NO: 133279 - DNA, 537 bp, Arabidopsis thaliana
  unsure (1)..(537): unsure at all n locations
ttgacgtcgcatccacgcgtacgtaagcttggatcctctagagcggccgcccttttttgtgtttgttttttttaaccaaagatattaattattacacgacttttaaaagtgaagtcataatccattgttcacgacaagcttcatattaagttgaggaggttttgtccgaaaaaaccaacaccaaaccaaatcaaataatcctttagtcacaaaaatcaaacaattttttttataaagaaagaagaaaaaacgatcctatacaagagagactatcctccactcttcgttcttcctctgcacttctgtcactttggtcgtttgaaactagagttaaggattgttgtcttgaaaaaaacataccaataatcaaatttagcgaaaacacccgaaaggctcctaagctttttggcttcttcagtttctggcgcaatcggggcgactttcacctttgccattttcctatcctttggccccggtgggcctgagacccaaccgtgggtctaggggaacttgtttcccatggggaancaggcacgg

SEQ ID NO: 133280 - DNA, 370 bp, Arabidopsis thaliana
ataaaagggcttctctctggggggaatttttctttacaaaattctcaacaaagccataaaagaaaggcccaatacccgaagaaaccgagacttacaaggcaaaggaccaaacacaaactctctggaatcactgcacaaacatatcctacttatggtggcttcttttctctcaaatctcaaaatgaaccttccgtttgttccggttgtcgcgtctctgatatagaatcagagatttctgaatctgctccttgagatcttctcagcttagaaacaagaacccacatattagcaagctcattctccagatatgcttctctctgttttggttcttctaatatcctttcaagctcagcttctctttgttcttttt

SEQ ID NO: 133281 - DNA, 450 bp, Arabidopsis thaliana
gacacactatagaagtagcttgacgtcccatgcacgcgtacgtaagcttggatcctctagagcggccgccctttttttttttttttttaacacaacccaacctttttctattaaaactgggaatcatttcgtttcttttctttcttcctataggaacagacatatatgaatgaagttataatcatcatcagattcagacccatgagtttccattattatcctatttattgccaggtaacttcagttggggcacatgtcgtcgtggcatgaaccctctgccatagacacagccatagccatcatcatcttgtccctcaaaactctctggaacaatgaccagaggtggaggaggaggaaaggtggggaagccctcgcctggcatgtaagaacctacatagctggtgctgcttcctgtttctcccatctcgtaatgatgacgatgatgatgat

SEQ ID NO: 133282 - DNA, 898 bp, Arabidopsis thaliana
actatagactagctatgacgacacatgcacgcgtacgtaagcttggatcctctatagcggccgccctttttttttttttttttttctctgttgtgaatggtcaaaaagcaaaacaacctctcacaagaacccaaagtagagaggtttaacttaatatggttcctttcttcaaattcttctttttctttgttcttctgaaattgttttgagccagaggcggtaactttacacagtttttttctaattcccaatgcttattgcaaaacgaaccaatatggtaacattacataccgatccctcaaccacccggtttcttcgtcttccccatgttttcatcagctgattgcctcttcctttgaattgttaccaccaaaaccaatagctcaatcttcaaactcatcatctatatatacatcagggcaaaggcagattcgtaatgcattgcacatttaccggttcatggataacccggtggattctgggatcaatcagtgcccatgcttttggattggccttgtgagttgcctttgggaataaaccatgggtctgaataatggaactacaaagcttaagtagcttggtggccgtggttaaccctgattacacccgttttgatcacaatacaagtttgcagaagaccacctacagaaggggggacattttttgaactatttggaacagacaaaaatcgcagggcgtgtgggcaatttaaaccccctatacccccaattgttaggtttggttgaaattctgaccgaatcttcttcccgttgcccagggtagaacaacggttattcactttcggttaaaagggaatttaattattgccggtccagcaccaaccttattttttaacaacgtaaacccatggggatctttttttgtttcaccattttac

SEQ ID NO: 133283 - DNA, 491 bp, Arabidopsis thaliana
ctatagaagtactatgacgtcccatgcacgcgtacgtaagcttggatcctctagagcggccgcccttttttttttttttttttttaattcaaaaatacacttaaccacatgtcaagtatcgccataaatatttcccaacagaattataaacaacaacacttaacagtaacacccttgtaaattggactgttgtccaaaaccataaaaccatttttggttcacagataaatcaacctttggtgtagatggggagatacttaaagtcattaatcattatagggtacatgggaattcaccatcgaccacttcattctatgatccatggtttgatccatttggttttcagccttcttcccaatcgacggcggcttcctcttcttcttcttcaccacccggaagcttctgcctccacattccaggccaccttatagttcccttaaccggtaccgggagccttttttgccaatctaactcctccttaattttgggtt

SEQ ID NO: 133284 - DNA, 510 bp, Arabidopsis thaliana
ggcgaactatagaagtactatgacgtcgcatgcacgcgtacgtaagcttggatcctctagagcggccgccctttttttttttttttaataagagcttttcttttcttccctttaaggaagggagtttagactatacacatcaaatatgaatttgaagaagatactacaactacataatgttaaccccaaaaccaaaacacatctctttctgctgggcctttcttctataccttcttctctgaggcttataaaatggagtaggctcggattacctcgatgatcggtgctctacaaagcggacattttccctccgtttcttacaagctcatttgcacattttggagcaaggacacatgtgtccgcatctataccagagagcatcaatgggggtggcacaacaaacgcaacaaggtcctttgcttacatggctccatcttgaaccatcctctgatggttccgcactcataccttggtcacctggcagacggtttaagggctgaaagacccttt

SEQ ID NO: 133285 - DNA, 730 bp, Arabidopsis thaliana
  unsure (1)..(730): unsure at all n locations
nnnnnnnnnnnnnnnnnnnnnnnnnnnnnnnnnnnnnnnnnnnnnnnnnnnnnnnnnnnnnnnnnnctttttttttttttttactttatttgcttcggtttaatcgaaccataattggccgattcgatttctagatttggtgcggagaaataagtaattgaagatcggtctttcttagtaagcaatatagtcttgttaaaccggaataacttgagggaagaacaagaaaacaaaaagcaatgtagaaaataaaaccgaaccaaagtaatcaagattcaagacaacacccggttctgtgcggagaaaagaaaccggccttttgtttttgtgacatgggtttggtaataacacttgaaactgaaaccggttcgtctttaaatatgccggtacgccacaccatgaccatgaatgaatctcgcattctcttcactataaacttcaggctacttctctagcgcgagagagatggtttcgctgagtagctgttcccttcccgcacatgtgacttcgttctgcttcttcgtggcagattccgggtatttgtgcgtggtaggtcctgtgttgtatctttcacgtctcccttgtggttaccacggccccaatctcactatagttttaggccctatatggtccaactgctattgatattcttagtacttcggaaagatcattagcgtaacggttctacacctatttcctacttctattctgctaatatgttcttacgcct

SEQ ID NO: 133286 - DNA, 789 bp, Arabidopsis thaliana
  unsure (1)..(789): unsure at all n locations
tcnnnnnnnnnnnnnnnnnnnnnnnnnnnnnnnggctgattgagacnnnnnnnnnnnnnnnnnnnnnnnnnnctttttttttttttttgaagaaaattcttatcataatgattttcttgtgacaaacacacgtaaacagaaaatccacattgattagaaaaaaataaagccaaagcattcgtgtttgaaccatttgaaaaagacaacaacaaaacattcgttggacaaacaagcccgttacaatttttcgttcatgtatcaatgtgccctgccctctttagtttgtagttgttgcagcctcctccaccagattacttcctgcaacatcaaccacaaatctgtaacgaacatcgttcttgcgaagcctctcaaacgcaatgttaagctcatcgatcttcacagtttcaatcgtcgacgtaagccctttctctttgcagaaagccaacacttcttctgtctctttaatgctccctataaagctccctgatatcactttcctcccaagaatgacgagaggggtcacgaactgaagaggagtgttgataacacccatgagaatcaatttcccgtcgagtttaagacaagccaagtaagggtcgagagggtgaaacaccggtacggggtcaatgatgtagtccaggggaatctgcgagtctttgcatctctgctggatcagagctcaccacatagtcgtcagctcctaaatggtcgatagcttcttctttttttcttatctgaggagcttattacagtcacatggtgtcccattggtttagctatttttacacc

SEQ ID NO: 133287 - DNA, 813 bp, Arabidopsis thaliana
  unsure (1)..(813): unsure at all n locations
nnnnnnnnnnnnnnnnnnnnnnnnnnnnnnnnnnnnnnnnnnnnnnnnnnnnnnnnnnnnnnnnnnnnnnnnnnnnncttttttttttttttttttaaacatgataatatctttactattataagacaaattctcgaattaacagatacaacaaaagaagaacaattacagaaaatcaaacattatttgacatgatcaaaatgaaagacaaacgaaactctccacaacatgatcacaatttacagaaaccggaagtattatatataattaagactgtaattccgatcagttattgtcggaagaaggagaaatatccggcgcgggagatggagcatgggagataccgtcatcggcacgcatgaagtcaaatcttttgatgagtatattagcgacgagttcgttagccttatcggtgggatgatactcatcccaaaacacatacttacttctgtctttacacaatgtcgacgctggaatacacgttagcgcaggccggattctgtagaacgagcaacacggcgaatccgagttatcaaacccgtatttttttgggttagtgatgacgtcgttgacgaggtcataggcttcaccaaacctgtagcttgcgttagggagcttggtctcgagatctaggagcattgtggtggcagctttngtgatctcttgcaagatactcgctttttttgacatttcatccaggctagagcttttgagtggatacacccattggtctaaacaacacattagctcctcgtcctaactatgaacaccttgagtgagattcagtgttcattaagagcgacaaggttgatc

SEQ ID NO: 133288 - DNA, 685 bp, Arabidopsis thaliana
  unsure (1)..(685): unsure at all n locations
tgatacttcagcgtctctacgactcactattgggaaagctggtccgcctgcaggtaccggtccggaattcccgggtcgacccacgcgtccgcgtttgcttacatctcgttccacacctactccattgagggtcttttggagaacgagtacctcggggaagtgtttgcggtcggagaagtgaggagtatatcgggttaccaagcaatccaaggaaattaccaaatatctccagacacaaatgccaaatggaggaacatgcttgtgttgctagcgatggcttttggctaccgtcttcttgtttatgttttactacgttttggcctaaacaagaatgtgtctggtcgtttactgcttagtcataagaaaaataacagctctaggtagatgagtgattgtttttagataatataactttagcctcttatgtaattttggtaggtgaaaatgaaaacagttcaattctttcttttttttctagaaatttgggtagataacacctttttgaatatttatatgcatctttggtacttttttagactcatttgggttgaaaaaaaaatattttaagataaaataaaataagcacttcatttttacaaaaaaaaaaaaaaagnnnnnnnnnnnnnnnnnnnnnnnnnnnnnnnnnnnnnnnnnnnnnnnnnnnnnnnnnnnnnnnnnnntccta

SEQ ID NO: 133289 - DNA, 633 bp, Arabidopsis thaliana
  unsure (1)..(633): unsure at all n locations
nnnnnnnnnnnnnnnnnnnnnnnnnnnnnnnnnnnnnnnnnnnnngcacgcgtacgtaagcttggatcctctagagcggtcgccctttttttttttttttagtgaaatggttaggatatataaatcaccaagagtttcaacaatctctcgtaaatactgtatgtatataaaaaggttttctgtttgttctttatggcttttgagtacaatcaagtatgactctatacatatacatacttatctaaagacttgcaaagtaccttataacagctgtaacctgcctctcactcggtctgtgcgatggtaggaaagattcaccacatgagtcttgacttgcgacggaactgcttccttgtgatacaccaaggaccaggaaagatgctcaaattactaataagctttgccccatgccatgatgtgtccacgccgtaaggaggaggtattactctgattccgttacttatagatgaaggaaggtgatcttgcagttctctctctagcctctctgagaggccaggcaaacacgcgctttccccagttagtactacagtcttgaaccaactttcggcacctggaagtcctgctgctcacaagggcccataccaagcgagacggcctggggcaaactaattg

SEQ ID NO: 133290 - DNA, 638 bp, Arabidopsis thaliana
  unsure (1)..(638): unsure at all n locations
cgactgattgagacgnnnnnnnnnnnnnnnnnnnnnnnnnnnnnnnnnnnnnnnnnnnnnnnnnnnnnnnnnnnnnnnnnnctttttttttttttttttaagaaaaggcaagcttcaagaacatgattatggcgtgttcttgaaataaaagtatgcgtaattccaactattagaagcaatgtctttctttaacaataacgatacaaatcacatttagggacaagctaaaaacatgattaactattatgtcttctaacaacactttttttttttctgcagtaacatcacttggtgatctgctgatctggggatatcaaggttgctaacatgagtctcttagcattgatctggtgattctgaggaatcattgcgtcagtgcaaagaaaagatttcatgtgtttgtacatctgttttggttgctctggattaatcgtatggcctgtgtttttcaggaacaccaatttggccactgagttctcctaacactggtttgaatacatgaggccacgccaatttggaatgctaggtgttggctctgagccagtgtccttgctcacccgcataccttctttaatttcttcccccgcgcccttttttccccctctgtcgttcacatacccccctacgttgtggtacga

SEQ ID NO: 133291 - DNA, 477 bp, Arabidopsis thaliana
  unsure (1)..(477): unsure at all n locations
cgatctattgaggcgnnnnnnnnnnnnnnnnnnnnnnnnnnnnnnnnnnnnnnnnnnnnnnnnnnnnnnnnnnnnnnnnnnctttttttttttttttgtaaaaccttaataatactatgctttaaaaagggggaatatcatgacttgtattcgttcatacatgaaaacatcaaaaatagccctctagcaaaacgcttccacctaattgcttagactgcaaatctttcacatgctttgattctaaccacttcatcgacgcgatctgtctctcatcttttgtgctccattccggcaagacctcaataattactttctgcaatagtttctgctcaaatccatctctcagaagaacttcaaggtctttgacgttccccctcaaatctaacaagacactgcatagtccacgggttgtacaataattccaaatggaatccaagttaatcttttccatactacggntttcgacccggtactact

SEQ ID NO: 133292 - DNA, 609 bp, Arabidopsis thaliana
acactatagaattactatgacgtcgcatgcacgcgtacgtaagcttggatcctctagagcggccgcccttttttttttttttttggtcgaaaagagcttcttttctttattggaaagcacttaaacaatcttacagatctgtttaatcagttttacacaggttaacacaacctgttactgaccaattcctaatctacccaactcacaacacagcaacagctatgtatccctctttgttcactcaccaagaaccctaatagcttctagcttagatcttgagattcacaaagcttgtgagataagacggctacctaacctaaagtctagcttccgattatataggtaacgacacaagcgtcattaacctatttcctaattctaagatatcttcaaatcttctttccatgatttgcttatatcttgaatgacttgttcatcacgttctggaaactccagcaaccaaacgcagctcgccacgtcatcatcatttgagtctcgttgcttcccgaatacagcttcccttcatgtgcttcacagagtcgccttgtgctcaaacatctatatatcttcattctccccctttttacttgaatgtgacaactcaagctc

SEQ ID NO: 133293 - DNA, 415 bp, Arabidopsis thaliana
agtcttaatttatttgctttactaatgaaaaacgagaaaatacgtaataaagattggagcagtgagtattattctcttattacagactccattattccttcctttgagcaacatctatttgaggcagttcttgatgtcaatcacgaaacggtacttgatgtccttcttcaccactctttcgagagcttcgtttatcttttgaatgggaatcacctctatgtttggataaatcttatgagctgcacagaaatctaacatttgctgtgttattttgggtccccccggttacacttccagcgagcattctcataccaagattgagattggcaggactgattttaatttcacttgggaaaccaaccaatacataagttccagcaatcttcaagagagacatgtaaggatcaaacgcgtg

SEQ ID NO: 133294 - DNA, 726 bp, Arabidopsis thaliana
tacactatataagagctatgacgtcccatgccctcagcttggatcctctagagcggccgcccttttttttttttttttttgcttctatcactgatattctaatatcttagtaaaaacaatatgaaagggaacaaatggaaggtgaatctctcccacaacaatgtctgcaaaaactgaagatggaaaggaaaatatgactgaagcagcaagtttactttatggctagatgtgaaactccattctcaggattcttgtgtatcgtccacacaaattcaggcgtatccattctcggtcctgcgactgttctgtatatgtatatcctctcaactggagagctctcaggtcttgactctggaggatgttcatcaatgacttcgacattgagccttgggcattttctggacttagaagcttgcaagcaccaaaacttaccaaagcaagatgacatccaaagggatcgctggggctctagcttggcagcgtgctccagtagtgcagtgtctccaaaagggcagtcccggatcccaggcttctttaaactctcacagcccgacaacaagtgatgaagcatcaaatcactgtccccagcaaatgctattgatagcatcctaaccttcttggcatgtttcccaatgtatttgaaggccttgtcagagagaagaccagagacggagagccgtcgaagatccctgcatccctcagctatggctttgaatcctttatcac

SEQ ID NO: 133295 - DNA, 528 bp, Arabidopsis thaliana
  unsure (1)..(528): unsure at all n locations
nnnnnnnnnnnnnnnnnnnnnnnnnnnnnnnnnnnnnnnnnnnnnnnnnnnnnnnnnnnnnnnnnnnnnnnnnnnnnnnnnnnnnnnnnnnnnnnnnnnnnnnnnnnnnnnnngataaaaggataattttattccgaacacaagggtttgtttgtttaacagagtacaagctatgaaatgcttctatcactgatattctaatatcttaggaaaaacaatttgaaagggaacaaatggaaggggaatctctcccacaacaatgtctgcaaaaactgaagatggaaaggaaaatatgactgaagcagcaagtttactttatggctagatgtgaaactccattctcaggattcttgggtatcgtccacacaaattcaggcgtatccattctcgggcctgcgactggtctggatatgtatatcctctcaactggagagctctcaggtcttgactctggaggatgttcatcaatgacttcgacattgagccttggcattttctgacttagaagcttgcaagcaccaaaactta

SEQ ID NO: 133296 - DNA, 521 bp, Arabidopsis thaliana
agaagagctagacgtcgcatgcacgcgtacgtaagcttggatcctctagagcggccgccctttttttgtttttttttttttgttcatcccacagagttagtcgtcatttcatatcaccattcaacaacaaactacatcacttagaagttacatatgcattatgcaatcaaataaagcaatccaaaacacacagtaaactaaaaagaaaaaaagcatcaacttcacttgcttccgacgggttcgagctgcaaatgggtggctgcacaactccattatctccctttgaatccgtagcactagatccctcaaactcactctttatgcttcctgacttgggttcatcagcaaccacttttattatctctgatgcttcttcctccttaattatgtacacaccatctccttcttcttcttcatcttcatcttcatcttcttcttcttcctcctcttcttcatcttcttcttcctcttcattggctttttctttctcgccatcttcggcttctttgctacatcttctg

SEQ ID NO: 133297 - DNA, 841 bp, Arabidopsis thaliana
  unsure (1)..(841): unsure at all n locations
ttgtnnnnnnnnnactataggagccctatagcgtcaccagcacgcgtacgtaagcttggatcctctagagtcttccgcccttttgtgttgccctttttttttgagagccagagcttcattgaaggttcgttgttcggtcaaaataggaaaacatacaagaagcaacgaacaaggttctctatggtcagactgtcgaaggggttccgcaacagttgttccttgctgagggactgctagcgtacagggatagaacgcagcggggaaattaggaactcacttggacatcatcatcttgacaaactcctcatagttgatctgaccatcaccatccacatcagcctcgcggatcatttcgtccaccttcttcatcagtgagcttttccccaagatttgtcataacatgtcgtaactcagcagcagagatgaagccgtttccatctttgtcgaaaacacggaaggcttccttaatttcttcttctgtgtcagtgtcatgcattttcctgctcatcaaagtcaagaattccggaaagtcaatggttccagatccgtcttgatccacctcattaatcatgtcctggagctccgcctcggtgggattctggcccagagaccgcatgactgtgccaagttcttttgtcgtgatggttccatctccgtccttatcaaagagggagaaggcttccttgaattcggcgatttgttcatgcgtcaaggcttctgccatctcttccggtttttctttctcgcgcgcctcgtgggggtcgacaaagngaattccggaccgggtacctgcaggcgtacggtctttccctataggagtctgtannnnnnnnnnnnnnnn

SEQ ID NO: 133298 - DNA, 532 bp, Arabidopsis thaliana
  unsure (1)..(532): unsure at all n locations
nnnnnnnnnnnnnnnnnnnnnnnnnnnnnnnnnnnnnnnnnnnnnnnnnnnnnnnnnnnnnnnnnnnnnnnnctttagttttttttttgattacattgaagtaaaatgttgttttggggatgtgattaatttcaatccgaagtaggactataaataacaatggggctacgaacagagtgacgtgggctcttccacacgagcaagccggacacaatcttcccaggagtcatttgtttggccttcaccaccactttgaagcttctcttttgtgaagcctttgaaaatgacaaactctgtggctccaccgtgatttctactcctttcggtgctcggacggtggcggtgtagaccgacgacggtggtcccacgttggtgactctccgcctgaacacagccaatgtggacgttttggcggatctcaacgtgagttggattgctgggtagttgagggaatcgtggccgagtccagggacaatggaggaacagctcacggagcgtggacccaccattggagctagagtgggtgcgttgt

SEQ ID NO: 133299 - DNA, 549 bp, Arabidopsis thaliana
  unsure (1)..(549): unsure at all n locations
taggtagcactatangaagactatgacgtcgcacgcacgcgtacgtaagcttggatcctctagagcggtcgccctttttttttttttttttttagaaacttctttatatatattataaagaatttcgacaatctctgatgctcacttttagatcaaaaccctaaaaaggggtgagagaatcttgattcaatgccctaaattgacagcttcaagcaccaaaaattgagagagcttttttgggcaaaacacttttctttctccatttgtgtctcaagctatacttccttggtctgaggtgtcttcgttgtaataaggtgttaacttgccatccttgtcatctcttatcttgtgtaggctatcttcgtctccaccaccaatttcttgcaacatcttaaccacacgcctcatggaaggtcggttaatgggcaacggactcgtgcagaggagtccaacgttgaggattttgcttatctcttctttgaaacaagagtcgagtttcgggtctatcacatgctctatgcctttttggtccaatgtagagcaaaccca

SEQ ID NO: 133300 - DNA, 579 bp, Arabidopsis thaliana
  unsure (1)..(579): unsure at all n locations
nnnnnnnnnnnnnnnnnnnnnnnnnnnnnnnnnnnnnnnnnnnnnnnnnnnnnnnnnnnnnnnnnnnnnnnnncttttgttttttttttttaatgaagatcactattacgagagaagtgtatctttctttacaaggtatgtgtatatactgatggaatttgagatatatctctaatttgaactttgagcagctttttaaataattgtaaaaataaacgatatgtttcataaatcataattagcacgctctgagtttctcaagaggaacatgaaccttaagaatgttcatcctcaagcatttttaaagccaattcagctaaccaatgaaccgttctgctctgtcggctcactccaaccgtgccagagaaaacatcaaagttctcaagctcagccgtagtttccagaaccttcacgagctctttctccatacccaaatccctgaacatcccaacgttctccacatcatcttccatcatccatatcgcaagctcgatcacaaacctcctgattcttggaaccttgattgctggcttgtcatgctttttcagaatcgaaaccagtgagtttgcaagttcttgc

SEQ ID NO: 133301 - DNA, 675 bp, Arabidopsis thaliana
  unsure (1)..(675): unsure at all n locations
gaaagtcaccccggggcatncccacccnggntgtgcccccggncagccngcaatcccaccngcctttaaccccggaatcctggccggtttcaaaaaccatggtggtaaaatccaaccttttaatttttctaaaccaggaactcttccctgatggatccgattcccttcttaccaatgattggatccatcctttgtgttggatggccagcgtcccaaaaaaccgtatttggtaggatctttgcatacttgcatatctttgccatgccctctccatattcgtatgtaccctgttccacaacagcctagcgaagcctcgacgaaaccaaattttctcggatttttaatggcttcttggatggtcggaataagcatcaacgtagatggttttcaaaccgattttagactgaagaagctctagatttttgatgattttggcgttaaaggagaaagcgatttggtttagttgatctacacaagttttttggcctcgtaggtatttaattaaaggcatgcatcccatgggaggaactcccactaccaccaaccttttagctccaagcctatgcaacatcttggcgtcgtaaagcatacggtgggagagaaactcgatgtattgctcaaccgtgaattgcttttgtcgagtaaaatcgactaagtaattttgaagaaagtcat

SEQ ID NO: 133302 - DNA, 520 bp, Arabidopsis thaliana
  unsure (1)..(520): unsure at all n locations
nnnnnnnnnnnnnnnnnnnnnnnnnnnnnnnnnnnnnnnnnnnnnnnnnnnnnnnnnnnnnnnnnnnnnnnnnnctttttttttttttttacgtagatgatttgaaccattaaagttaacattttgaatgcttttcaattacatctagaatttttcataaatcatgatagtaaaatacaaacatataatatttctaaacaagaaactcttcactgatggatgcgattgccttcttaacaatgatttgatacattctttgtgttggatggacagcgtcccaaaaaacgtatttggtaggatctttgcatacttgcatatctttgcatgtctctccatattcgtatgtacctgttccacaacagcctagcgaagcctcgacgaaaccaaattttctcggatttttaatggcttcttggatggtcgaataagcatcaacgtagatggttttcaaaccgattttagactgaagaagctctagatttttgatgattttggcgttaaaggagaaagcgatttggtt

SEQ ID NO: 133303 - DNA, 559 bp, Arabidopsis thaliana
  unsure (1)..(559): unsure at all n locations
nnnnnnnnnnnnnnnnnnnnnnnnnnnnnnnnnnnnnnnnnnnnnnnnnnnnnnnnnnnnnnnnnnnnnnnnnnnnctttttttttttttttaccactcgcaattgggatccattgcatagctaaagatctagttccatcaaatcttatgtgaaaacatacatccggtttaaactacacacaggtttagactaaatccgtttacctataacagctaaaaccggtttcataccaagtctgagctacaatccaaaatcatagttatttatgctcattcatcggaagctgaggcagactgtttcagacaatcacgcatgatctctccaagttttgaactagcatccaagcaaagctgcattgcctcgttgatattaggtgttgtccattcaccagtgatggttagctgagtgatttcataacgagatggcatgcacgtcatcataaagctgccatcttcacatccttcctcctctgtaaccgggtctatcataaggcttttgcctatgcaagacactgaaacagctgtgataaggtcatacatcataattccggcatcagct

SEQ ID NO: 133304 - DNA, 570 bp, Arabidopsis thaliana
  unsure (1)..(570): unsure at all n locations
nnnnnnnnnnnnnnnnnnnnnnnnnnnnnnnnnnnnnnnnnnnnnnnnnnnnnnnnnnnnnnnnnnnnnnnnnncttttttttttttttttttcacaatggaacagaacttgttgtgtaagtcttcagggatgtccttgaaacatatactataaagtgggcaaaagacttatgaaacctacttaaacatcagcacttcactgtttactttgtctcacacgtaaagcaaatgcaagtaaatcaatgcagtcaaaactctaagcaacacagccaatcccacagcattaaggtctacttcataagaaacttgtacctgtcagtatgtgtttcttattccatgaactgaagctataccaataatcagtgtgcaccatatcagttggacactttgtcaattcaacacatacacgctttagcctgaacttttctttgatctgaaatatactcacgaactctctgagttttacttcgcatgggctcaatcatattttctgtcttgtgaattatctcttttgacagatgaccctccagaaaactgaacaatgctcctaatgtcatctttcttagatct

SEQ ID NO: 133305 - DNA, 531 bp, Arabidopsis thaliana
  unsure (1)..(531): unsure at all n locations
ctannnnnnnnnnnnnnnnnnnnnnnnnnnnnnnnnnnnnnnnnnnnnnnnnnnnnnnnnnnnnnnnnnnnnnnnnctttttttttttttttgtggttcaacgccatcctttactgggggccataatccacaaagaggggattctaaaattagcaatcaacattacagagcaacaacaactaatctcacgttgttcttgtcctaatcctcgccatcatcaatgcgtgttcggaagaggtagtcttcgccttcaagttcatcttgatatagggatattgatggatcattacatttctcatcttctttctcatcattacatctctttccctttcttaagatatagaagaaataatggaagccatcgccaaaagtgttgtactccatggaccaagtaaacttaggatccttaaacagaggacgcctgaaatgcggctggccaaaagtaatggaaatgaaaatgccatctggtttcaaaacccggtgaactccatcaagggttgccatgactttgctaacagtttctggacgggg

SEQ ID NO: 133306 - DNA, 547 bp, Arabidopsis thaliana
  unsure (1)..(547): unsure at all n locations
atgatcctgccagctannnnnnnnnnnnnnnnnnnnnnnnnnnnnnnnnnnnnnnnnnnnnnnnnnnnnnnnnnnnnnnnnnnccacgcgtccgggctgagctgataaggaggagaatcgagcagggccagctatggagaatccagagtccgttggtcctccttctgctttaacctacctcgatcctcactactgggacgagagattctcttctgaagaacactatgaatggttcaaggattactctcatttccagcatctcatcatatccaacatcaaaccctcttcttccgtattggaattgggatgtgggaactctcagttgtgtgaagagttgtataaggatgggattgttgatattacctgcattgatttatcttccgtggcggtagagaagatgcagagtcggctgctaccaaaagggtacaaagaaataaaagtggtgcaagctgacatgctagacctcccatttgacagcgagtcttttgatgtggctattgagaaagggaccatggatgtactgtttgcggatgctggtgatccttgg

SEQ ID NO: 133307 - DNA, 527 bp, Arabidopsis thaliana
  unsure (1)..(527): unsure at all n locations
nnnnnnnnnnnnnnnnnnnnnnnnnnnnnnnnnnnnnnnnnnnnnnnnnnnnnnnnnnnnnnnnnnnnnnnnnnccacgcgtccggttttgattgttagatggatgatatagcggagcttgaatggttatcaaatttcttagatgattcttctttcacgccgtattctgctccgacgaataaaccggtttggttaaccggaaatcggagacatcttgtacaaccggttaaagaggagacctgcttcaaatcccaacatccggccgtcaaaaccagacccaaacgagccagaaccggagtcagagtctggtctcatggttcgcagtcgttaaccgactcatcttcaagctctacaacatcttcgtcgtcctctcctcgtccttcaagccctctatggctcgccagcggtcagtttcttgatgagccaatgactaaaacacaaaagaagaagaaagtttggaaaaacgctggtcagacgcatacgcaaacgcaaacgcagacgcggcagtgtggtcattgtggagttca

SEQ ID NO: 133308 - DNA, 566 bp, Arabidopsis thaliana
  unsure (1)..(566): unsure at all n locations
cgattctannnnnnnnnnnnnnnnnnnnnnnnnnnnnnnnnnnnnnnnnnnnnnnnnnnnnnnnnnnnnnnnnnnnnnnnctttggttttttctttttttttttttgggnaaaaaaacgaatatccaataatattatttatccaaatttttatatatcattgggcaaaaaaaatgatttaaaattatcaaaaaaaaagaagagaataaaaatactttcatcttttttttttttttacagaatacgagaaaccctaataggcaaaccgttaggaaaatcaacaaaaggaaaagcaaatgggttatcatcttctgctaattcccaattgaatttaagaactggatgatgaataaacactgccttttctaacttggctagctctgaaccagcacatagccttggccctcctccaaacggcatgtagttgtttccccacgtcgaaaaactaccacttcctgaggatgacccttccgtggttttgctggtgccattctccaaggattaaagagattaggttggtcataacgagaattatccaaatgtacggctgagatcaccggtaacact

SEQ ID NO: 133309 - DNA, 523 bp, Arabidopsis thaliana
ttaggtgcactatagaagagttatgacgtcgcccgcacgcgtacgtaagcttggatcctctagagcggtcgccctttttttttttttttttttttttttttttttttttttttttttttaaaaaggatgaactttttatacataggataattatttagaattgatttacaagaccaaaataacattgactgaaaacgtcgccgtatacatgattgtctatgttcaagaggtagaagatacagagttgggggagaggttggaaagcggtcttacttcatagagattctcactttctcctttaccgacttctgccgggatgtttggtccaaagaaggaagggaatttcgcctgtcttttttcaaaatctgacaacgtcagagctttggcctcaaatacaaggaccacacagtaccgaccatcggtcaggacctcttcccttatcagctgtaagataggggcactacgtctcgggattcctcctcccagcccatattgaaagattcgttttagtgcttcttccaaa

SEQ ID NO: 133310 - DNA, 660 bp, Arabidopsis thaliana
  unsure (1)..(660): unsure at all n locations
taggtgcacctatagaagatctatgacgtcgcctgcacgcgtacgtaagcttggatcctctagagcgtgccgcccttttttttttttttttttaaggaaaagaatgcttgatcattgacaaaaattacagagaaagctacagaatttacttgaaatcaagaatgtgtgaagagtttatcgtttaaaaggaatctaccatagattataaacaatacgaatggtgccttccttctcctgtggctttcattgctgaaactactgtaccaaacaagtcctttgccctttttgtgtggaccagagacctctgataattcggttacgttccgcttaaccggttaaggcttccagcacgaaggtggtatgccttgcttctcaaaccattcaggcatgcggaaccgatcataaagtgtcggtcgtacatcgtcttcctctgacagttgcttcagaagcggtagaataacatccaagagctgagtatcatttggctgccctgcggaaaatgcaatacatggaattccatttgatggttgcaacaaaaagctgaaaggattgttgccaacaatactgccacacatatctttgngncttananncctcngggatccgggatgcgggngnttnanggncnaanncggtgggggnctccgganaccacaaagg

SEQ ID NO: 133311 - DNA, 505 bp, Arabidopsis thaliana
  unsure (1)..(505): unsure at all n locations
gaatttagaaaacaatnngattaatngactttgttatncggttttaggaggttactcatttatctttcttctcacacttggtcgtttgttttaacaaagataaactactaacaagagtacaaactacaagacataacaaaacaaagtggaatagaaaaaagattttgacccgttgactaaaaataaaaaatcttcaaaacacagagaagaaaaaccaaaaaagaattagcctctaaaacgacgacgctttttcaacgctttccattcttttcctcacgtcgaagaaaacgacccatttgtcggaacaacactctgacgactatctcctactcctcctactactactccgccgttagctcttctagcgccgctgcgtcctgaaatcttgttgttatgcatccacactttgaaaacgcttttatcaactccaatctcccgacaaaactccttaaccaccacgtcatcagctttcggcatcctccacccaactctctccgagaactcg

SEQ ID NO: 133312 - DNA, 503 bp, Arabidopsis thaliana
  unsure (1)..(503): unsure at all n locations
nnnnnnnnnnnnnnnnnnnnnnnnnnnnnnnnnnnnnnnnnnnnnnnnnnnnnnnnnnnnnnnnnnnnnnncttttttttttttttttttcaaatgaatctctccctcatccaattggtttgcacaactatgaacaaagcttgtgagagttatgtagcaccatgtggctttcatatctaagaggtaagaaaaggttgaaactttacacactgaatgtcaggcaatgaacattacagaggagggtgtttaatttctttcaaactcaaccgtatccgtaagttacatcgcgtttcgctacaacagagtcaaatggtatttcgactctttccttaacaaggcaccgtgcttctccatcttcaatcacaagaactttccctggtggacattggttaggtgttctcttccctctggtagctcggtgcgggagaagtccaaaaaggttcaaggaagcgcctcttttcctcatctctggaccatatcctgatgcagacaatagagagata

SEQ ID NO: 133313 - DNA, 502 bp, Arabidopsis thaliana
  unsure (1)..(502): unsure at all n locations
nnnnnnnnnnnnnnnnnnnnnnnnnnnnnnnnnnnnnnnnnnnnnnnnnnnnnnnnnnnnnnnnnnnnnnnctttttttttttttttctgttttctttagctagtagttgtatatcatggcgaaagaaaaaaaatccaagtcatcacacggatctataatttttggtttttaactatgtatcaaaaacttattaagctgggaggcaaatcataaggtaatgaagatgaaaaacaagactttctatagaaactttgtgccatagaaaccattaggaaccggaattggcatggcccggttaatgggaaaaggtgactgcataaccggaatatcggtaggcatgactgcgtaaggctgatgtccattggctgcaaatggttgtggagcatatagatgcatcggttgaccagttgcgattagactctgatgctttggatactgaaactgttggggagtaaagagaggacgaggaggcaaatgtgagttatgtggtgctccttgaac

SEQ ID NO: 133314 - DNA, 627 bp, Arabidopsis thaliana
  unsure (1)..(627): unsure at all n locations
atagaagagctatgacgtcgcacgcacgcgtacgtaagcttggatcctctagagcggccgcccttttttttttgacttatgatcccaaaaacaaattcccaagttcatggaaaatgtacaatttttacaacaaattacataaatgaacagcttgtgaatcgaaccatggtctctctttcttttcttttgtcgatatgattatgaaacctaaccaagacggcgtataacaaattatttttacgtaagttttttttctttaggcttagcttaaatttccatcaaagtaatgaatcgagataagtgtagtctctggttcgaccatactccaagagacttccataagtcctgtcccaaacaccgatgaagagagattcagtatctgggctaaacgatatcccagaaatctctccaaagaaatcaatctcttgctcctttttgtatcctgatttttgtgtcatagatatgaacgaaatctgctggctcggcatgggaacgnaccggccgncantgggaccnatnggccggangggncaaggnancttttaggaagcgctggtccgggngtcctggggccaaangaaggcttgctggtcctggggangtaaccggttggggcaaggggngaat

SEQ ID NO: 133315 - DNA, 578 bp, Arabidopsis thaliana
cgattgatttggtgacactatagaagagcttgacgtcgcatgcacgccgttccttagcctggattcttttgaaccggcggcccttttttttttttttttggttatcttaattgcctaacctaattatttttggcttaccatttcctaccaaaaatggtaattcaaaattaataagtccacctttaggtaacctatttaatttaggatacaattgtgagaattaattcaaaaaacaacaatcttctaacaataacttagcccctgattaaatcaggaaacattttagttttaattatccttaatctgctattaaccgatatactactaccatgtttctttaaccgggaaatatcagaaactcggaacaacaccgaatccgcaataaactccgacgtctccaccatcattctctctcgaatctgttctcttagcaaaacgtcctttgattctcggcctcatctcagcgtaagctttacgcgacgcatacctaatcgtcttctcaaatttccgattcttcctcttctctctatacctcaaaacccttgcttccctctccgccggtgataactgcacagctg

SEQ ID NO: 133316 - DNA, 453 bp, Arabidopsis thaliana
gcggccgccctttttttttttttttttttttaatcttattatttcaactcatttatttttgcataccggtttccttacagagattgtaaatccaaaatttattaggtcaaccatttaagtaaactatataatttaggatacaattgtgagaattaattcaaaaaacaacaatcttctaacaataacttagcccctgattaaatcaggaaacattttagttttaattatccttaatctgctattaaccgatatactactaccatgtttctttaaccgggaaatatcagaaactcggaacaacaccgaatccgcaataaactccgacgtctccaccatcattctctctcgaatctgttctcttagcaaaacgtcctttgattctcggcctcatctcagcgtaagctttacgcgacgcatacctaatcgtcttctcaaatttccgattcttcctct

SEQ ID NO: 133317 - DNA, 659 bp, Arabidopsis thaliana
  unsure (1)..(659): unsure at all n locations
cgattcnnnnnnnnnnnnnnnnnnnnnnnnnnnnnnnnnnnnnnnnnnnnnnnnnnnnnnnnnnnnnnnnnnnnnnnnnnnnctttttttttttttttagctcagagatctcattattttacttcgccactgcgtaaaaaataatacacaccaccgtgttcattctggttaagaaaaacagtcatgatgtcatatataaatacaaaagacctaaaaagtatttgacattttttcatccttttaaggcaattaaagaaaaacaaacccaaagctctttgcagtcactcatctgttgaatgagcctgatgagcggttactaccaccgggattcacataatctcgctttgtaaacaatctgaatcttggaaggcatcttcctagcatcaccttccagctccttttgcgtgcaattcgatcacttatcaactccaaagtagagatgattactctaaatgttggtctttttgatgcttctttgtcccaacaatcctggattagctcttgtaacccgaaaggatatgattttgttgggggcattgaatggggggcgnccanctccaanaaaggcttaggganttcgggggcttcnancccaggaaggggtccnaacntntannaccntggaaggtaagnggaaggggaaccncncctttggtnna

SEQ ID NO: 133318 - DNA, 428 bp, Arabidopsis thaliana
atcacttatcaactccaaagtagagatgattactctaaatgttggtctttttgatgcttctttgtcccaacaatcctggattagctcttgtaacccgaaaggatatgattttgttggagcattgaatggtggacgttcatcttcaatatatgctttaggaacttcgcggcctttctatcccatgaaaggggttcacaaccttcctaccatctcttggaagattaaagcgaaagagaatacatctacttttgtatcatactcttcattcctataaacctctggagccatatatcgccatgaactgtccaagcatgtaacaacaggtctgtcttttttaactgtcttcttaactaccagcagcttgctgactccaaagtctgcaactttcagatgtcccgaatcatcccgcagtatgtttggaggttcta

SEQ ID NO: 133319 - DNA, 506 bp, Arabidopsis thaliana
  unsure (1)..(506): unsure at all n locations
cgattcnnnnnnnnnnnnnnnnnnnnnnnnnnnnnnnnnnnnnnnnnnnnnnnnnnnnnnnnnnnnnnnnnnnnnnnnnnnctttttttttttttttttatatcttaaagaacttataataacagtaccatgttccccacatgttccatagatcaaaacataaaaacccaaaacataaagttctcggcttttcagtatcatcttaacttcgtcttaggataagggtacaagacacaaccataatctagagaagactagcaaaagagtgacgaatcaatcactggcttggtgaacggtcttcgtcatactggcccccatgcgggctttggctcctgcttctggcgggttcaggagtgtagcttcttctgcttctcctcggactcctgcttcttctagggctacggcttatgcttcttcttgggctaacgctcctatttctttttgggcttgggctcctgcttcttcttgggctacggcttatgcttcttctagggctggggcttaag

SEQ ID NO: 133320 - DNA, 513 bp, Arabidopsis thaliana
  unsure (1)..(513): unsure at all n locations
cnnnnnnnnnnnnnnnngacactatacaagactttgacgtcgcacgcacgcgtacgtaagctgggatcctctagagcggtcgccctttttttttttttttgaaaaaaacaaggtacattcacatctcttatttgaaagctacatgagtcttatcttaaacgtacagaagaaaaatagtaaaaaggaacttttgtcctcacttactactactactcattactgtactaactcttctctttgtatcacgtttcattacaacattcagatatcagctaattaggatgatggtttgtctaactctatttgttgctggttttgactgcaactgggtctgaacaataagggcagttcccaaacagaacatcaaatgactgtcttgttgttgtgatagaccttaaccagtctgtgaggcagaggctatggaaagacttgttgcaactgatgttttcacatgtgtaatctgttcgtgtcccacttctagctccgagctcctcatcggtgggtagaaactgc

SEQ ID NO: 133321 - DNA, 706 bp, Arabidopsis thaliana
  unsure (1)..(706): unsure at all n locations
cgnnnnnnnnnnnnnnnnnnnnnnnnnnnnnnnnnnnnnnnnnnnnnnnnnnnnnnnnnnnnnnnnnnnnnnnnnnnnnnnctttttttttttttttttttttttaacaaaaccatatttgataatatgtagaaaaaaaactaaaataaaaacatgtatataggtttggatcaagtcaagggacccagaagacagtccggtttgcttgccggttcgatttagaagacaatagtttaaccaacacaagctattaatattacaagacacaaaacccaaaagaagacttttaactcaagaaagcttaaaaagaaataaaataaaacaaagcctattggcgttgattgatgattgatttgactcagtgaagcctagtgagttcttcaactctcttacacaactcctccacttgaacattcatggatttcgatatatcctccatcttggtttctactcagatccagaaacgattcgattaagtcaccatcccaggaattcctcgcttccgggggtcctttccncggtaattaaacgactccatggccggggggtaatccggcgnnncctttaacacttttccaaactgncggaattccccaagaaggnaatggtntgggggagggaggttttacccancncccatgggtgnncaagngaagnnggggttggcatccggaccgggcccntaaagncnggggttggnaatcca

SEQ ID NO: 133322 - DNA, 513 bp, Arabidopsis thaliana
  unsure (1)..(513): unsure at all n locations
cgattcggnnnnnnnnnnnnnnnnnnnnnnnnnnnnnnnnnnnnnnnnnnnnnnnnnnnnnnnnnnnnnnnnnnnnnnnnnnctttttttttttttttttctagaaaagatggactttagattatttacttttcagtaaattagtatgaacaacattacatattcaaaaataaagtacgtaaaaacaatttatttggctcatgcaaaagatgaacggaagttttctggtaatgattcttgacttttgcggtaaatggtcttcacgaaagcagcgaaacgttccaatcctccacgaataatcttctccataaacggtttcattgcaaatgcaactggagcaaaagcatttggaacttcatatgaaaaactaatctctactaaacacgaggaagggcctcttgggaaaaagcgaacactgcctctattttcaaagccttcgatagatctccaatgtatctttcgatctggaattggctgtaaattttgtgcgagaaagtgatattcaatattctg

SEQ ID NO: 133323 - DNA, 817 bp, Arabidopsis thaliana
ggtgcactatagaagagttatgacgtcgcacgcacgcgtacgtaagcttggatcctctagagcggtcgcccttttgtttttttttttacttgagaaagctatcggatcagtcagaacttccaaaaaaacagctgcaatgtacagaaaagttcacagcacaaccaccatctgatgccgggtaaaccgccaggagttgacagttgcgcatcgtcgagagaggaggggggggtacggcagggacagctcggtggcttggtgagtaatgtccctcggtcactggaagtacagggtcatcgacgctcggggtgcggggttcggtgtgggcggctcagtcctcctccgcggggccagggggctccacctcgtacttccgcaggcggtcgcggacgtcgcgcagcagctcgttcttctgggccagcatggccttcatgttcttgaactgtggcgcgtcgttgaccttgccctccgccaccttgttggccgcctccagctccttgtcctttgcctccaatcttgcattgagatccttcacctcggcagacagcgctcgcagctgtgcggccttgtcgtccttcgcggcgaggtccttcagctgctgcagctcctccgccagggccgtcttctgcttcatcatcgtggtgtactgctcctggatcttacgcactttttcctggagcgcctttccttcctcttcgctcaacagcggacccttggcctcctgcacaggggcctcgaccggacgcgtgggtcgacccgggaattccggaccggtacctgcaggcgtacgagctttccctaactgagtcgtattgtagct

SEQ ID NO: 133324 - DNA, 515 bp, Arabidopsis thaliana
  unsure (1)..(515): unsure at all n locations
nnnnnnnnnnnnnnnnnnnnnnnnnnnnnnnnnnnnnnnnnnnnnnnnnnnnnnnnnnnnnnnnnnnnnnnnnnnnnnnnnnnnccacgcgtccgtattttttttcgaacctccacaaatggcctctgtgatgtcaggatgcctgcggcagtctggtcgttggatgcgacccctccaggcgggcgctgcccgcagcctcttcaccgtgcccaagaccatgaaggccgctgtggtggagcagttcggcaagccgctggccatccgggaagtgcccgtcccggagccagggtacggccaggtgctcatcaagatcatcgcgtcgggcgtctgccacacggacctgcatgtgcgcgatggggactggtacgtgaagcccaacctgcccatcatccccgggcacgagggggccggggtggtggtgaaggtgggccagggcgtgtccaccctcaaggtgggcgaccgcgtgggcagcgcctggctgcacgactcctgcggccactgccactactgccgct

SEQ ID NO: 133325 - DNA, 886 bp, Arabidopsis thaliana
ttgggtgggccccaatggcgggccaacagaaaggggcttgaacaattggaaccaagatccaccaccttccaaggaggtccaatgcaagcctcccattgaataaggggtgtgaaaggcttcaaccgcaacattggggtaacctttaatactgaatttaatccgattgcgccctcctcgagataggcattagtcccttaagctcctccaaacgtaccgttccggtcccacacgtttctccaacggggccgatcgatttatcagcgacccggctttgtctataaaccgagtttaaagattcctccatctccaaacaagcacttagccatgacttcttcgctcataagagcattgctttgatctctaccaagtagctcccagtagattacgtaatgacccggtatagtcttcgtttctgcgtagcttgtgtactcgatcacacgtgttccttgctctgcaaacaacctcgacgcattctccactgctttttgtagctcagcctcgtcggttttatcggattctacgcttagcagaacattctttctccgtatgaatttgaactgtggagcggaattatggaaccccgtgacacgaagaatgtcgccaactctgtaacggtagagccccgcgtaggtcgtgatcacgagttcgtactcttttcctacctcaacattagcaagctccacaagtgacgtttcgtctaatgatgcttctgctgctccatctccatcgtgattatgtgggaggaattcaaagtaggccatgtttggcatgattgtgtaagaaacctccgaaggtttacacatcggctttaggttaatcccgaaataactttcggacgaagcacggacgcgtgggtcaacccgggaagtccggtccggaacggcaa

SEQ ID NO: 133326 - DNA, 711 bp, Arabidopsis thaliana
ctatgacgtcgcatgcacgcgtacgtaagcttggatcctctagagcggccgccctttttttttttttttaaagaaaatttttggcgtagtaataattaaatgctgattttaaaaatatctggtttttggaccaaagctagttattagctggattccaacagaagatgaaggaaaaaaacatcggtacgtacttcaaattttattgtacgattcacaaagcctaataagaaatctaacagggagtcttaattagcatcagaaacagagctttatattctaaaaccgcacatcatccggttgatatctttcatataaagttttatctaacgacgtcgttctggtgaccaatgcggcaacgaagggctgaaatgagcagacacaactctagagtcaagcagctccatgataggtgtgaagctcacgcacctcggtaccttatactgattaatcgatgcgcctctcgagatggcatagtccatgagctcctcaaacgtaccgttccgtaccacacgtatctccaacgggccgatcgatttatcagcgacccggctttgtctataaaccgagtttaaagattcctccatctccaaacagcacttagccatgacttttttgctcataaagagcattgttttgatctctaccaagtagcttcccagtagatttacgtaatgaacccggtatagatctttcgtttccggcgtaagcttt

SEQ ID NO: 133327 - DNA, 518 bp, Arabidopsis thaliana
  unsure (1)..(518): unsure at all n locations
cgattnnnnnnnnnnnnnnnnnnnnnnnnnnnnnnnnnnnnnnnnnnnnnnnnnnnnnnnnnnnnnnnnnnnnnnnnnnnnncttttgttttttttttctacaaacttcgattcccaaactcaattctgccaacatatatcagtctcaatttgatcaatgttccacgatctgtaataatgcaactaaggtagagtattatatatccgaccaacataaaaaatatcattacctattattgcttgcactaaaacacggaaattaaaacaaaaactcgcaagtcagcagagaaaccaatggatgagagtgaccatcaatccgcatagctaaccagacctctctttcctggtggagaaggtgagtgagaagggctgagtgattctgcaggagaggtgcgtcctcctctgatgggggatctctgtggcccgagacgggatttcaggtcttggctaattggctgcctctttctagggctctggctacggctacgatgcctcggactctggctcctgcttccgtc

SEQ ID NO: 133328 - DNA, 513 bp, Arabidopsis thaliana
  unsure (1)..(513): unsure at all n locations
ttaggacannnnnnnnnnnnnnnnnnnnnnnnnnnngaaaaaaaatactctacatattattaaatctagataactgttttctcctcgttcgtttcaagtaatctcaaattattacgagaggaagatacaactgagaagctgaggacaaaagactggagagacactccatcctgtctagctctaaccttaacttatgacttactagctaaaacaatttcataagacacaatcggccaaaagataaaataaataaatataaaaagcctatattgtgatacaaaaactcacagcaaatgcatcctctcaacatgagactgcagcaaccatctgttaagaggctctccgcttccaacgaaacaacctgagtttccactctccgtgaaaaacggtgaaccaaagatgttcagcagctcctcaactgcttgtctcaccattgatgtaccggtgactctactacgtcttccccaaccagttactatatcaatccgagaagggcaagttcctgaagctaac

SEQ ID NO: 133329 - DNA, 502 bp, Arabidopsis thaliana
  unsure (1)..(502): unsure at all n locations
nnnnnnnnnnnnnnnnnnnnnnnnnnnnnnnnnnnnnnnnnnnnnnnnnnnnnnnnnnnnnnnnnnnnnnnnnnctttttttttttttttatggtgaaatagcgcctctataatccaaaccttttcaatttttatgtctttccaaactcaataacttaaaaaatacaacaaaagttacatctccaaagaaagaaaccaaagagaagagaacaaacacgacgtgtgtgattcataagagctttggccttaagttttaagcaaatcattgaccaccatttgaagaaatagtagtaagaacatcagtcaccgaagccatcacactcagggctgccttcaatacgtcttgagaacatcctggtttcactatcgccctcacttggtcaagatattcctgcagcttcttgatacgtcccatgtaatcttgatcttcaacacagagactcactgctttagcatccgcaccaggaccatcgtactgtagcggtcctgggtttctgtacag

SEQ ID NO: 133330 - DNA, 527 bp, Arabidopsis thaliana
  unsure (1)..(527): unsure at all n locations
nnnnnnnnntttaggacgnnnnnnnnnnnnnnnnnnnnnnnnnnnnnnnnnnnnnnnnnnnnnnnnnnnnnnnnnnnnnnnnnncttttgtttttttttttttttaagaaaacatgcgatattatattaatgatgagttacaaatatagtttgtttttaaaatggttacaaatagagattaatatcgcatggcgtttccctccttcatataatagtaaaaataaaaataagagatgaactcatggctccttcatctgttgtataaacttgggccctttgttcaatctaagtgcttcttgtgagggttgctcaatggcctgaatccgcttcctccactgacatgcgccttacccgcggcatcgaagtgaccttttccaaagtacttcatgattccatcataatatccactgccggtttcacctccgactttagcttcaacttgagctctaaccttagccttacccgcggcatggacctgacctccgactttaacttaaccttggaactccaacctttccttntgggtt

SEQ ID NO: 133331 - DNA, 477 bp, Arabidopsis thaliana
tgacgtcgcacgcacgcgtacgtaagcttggatcctctagagcggtcgccctttggttttttttttttttttttggaaacaaaaataacaaacattattgtgattttgtaatcattcagtgtgtaatacatgataacccaagaaaaaaaaacattcaaagaatttgctataagatcaaaccccacaatgtacaaatcaaagaggggttaagcacacatattcactttaccaacctacaaagaagaatcaaaaagaataatagagatccaaaagcaacataaagttttcttggaatgagaagagctaacaagagatgagagacttcagacgttaatatccattcgctttgacctggcactgccattgttggttgtttcttgtacactggaaagagagtatctcggaatggtgtagttatcaggggtggacactggttgttgcggatagagcgtgggaggcggagttaggttgcgttgt

SEQ ID NO: 133332 - DNA, 494 bp, Arabidopsis thaliana
atagaagagctatgacgtcgcacgcacgcgtacgtaagcttggatcctctagagcggtcgccctttggtttttttcttgttttttttttttttttttttttttttttttttttttttggagcaatggttcgttttttctttcaataaacaaaatgtctcaaagcacatcgtcgattctaaagacttcaattccacttagagttgcaaaggtttcacagttttgaaattcagatctctcccaagtagatatttttatcactactgcaagatccaatgataggctcggttgggtggaaaacacactcattgacagaaccggtatggcctgggagcttatatatagggcgccgactggttgggtcccagatatgaaccatacggtctgagctaccggcagtaacttttgtaccatcaggggaccatgaacatttcagcaggttcttctcaaagttgtgttgatgcccctcaaagatctttacacatcggttttgtgg

SEQ ID NO: 133333 - DNA, 495 bp, Arabidopsis thaliana
taggaacactatagaagattatgacgtcgcctgcacgcgtacgtaagcttggatcctctagagcggccgcccttttttttttttttttttttaagagacaacctctgttttttctactataagacccacaaagataaaacccaaaaaagaaagaacattgcagtgtttgaccaaaagagttcctccaacgaatgcatctgactaaaccaaagtatgtctgagaagcagcatcaaaggccgaggttactcagaagctgactccatctgggagtctcctcatgaaaaatgtatgttacaggagaaactagtaccccacttcctcccaccgctctcagttgctgcacagactcataaagcgctttttttggtacacatatcacaatggcatagtactcaattgttacttttccatctcgtttacaataaactggacttattgttggtccctgcaatcctgatagtgatggttgggttttcacacgttcagccacttct

SEQ ID NO: 133334 - DNA, 511 bp, Arabidopsis thaliana
  unsure (1)..(511): unsure at all n locations
cgattgtannnnnnnnnnnnnnnnnnnnnnnnnnnnnnnnnnnnnnnnnnnnnnnnnnnnnnnnnnnnnnnnnnnnnnnnnctttttttttttttttttttacgcccaaaccaactaataatttggcatatataataaattatgtttttgacaacaaatataataatgaagagtgatgagatataatttgacgtggaatactggaaaacggaaaaattccagacaatataaaatcgaaaaaaacaaaaataaaagccaagataagacgacagcgtttatagctgtgactgactgatgtatgtacagtgttgagagtgtggatcaagtagaagatggagtagtggtggtgggagtaatattacggnttntnatatacgtnaaaaattgtgttgggaattttgttagaagtgnttttaccantgagacctntnnatattgtatgtntngtaatggaacaaactggacgatatngngcgatgctattcgaccactggagctctctaatttctct

SEQ ID NO: 133335 - DNA, 807 bp, Arabidopsis thaliana
cgatttaattatggtgcactatagaagactatgacgtcgcacgcacgcgtacgtaagcttggatcctctagagcggtcgcccttttgtttttttctttttcggccgctgttgtttagctgaaagaaagaaggaaagaacaactcatatgaaaaaaggtcaaagagtaaaatgataaagactataaaggagtctcctctcctccaaaggaaaatatttaaatgacctcaatcaaaaatgactcacctaaaccccctcaaagaatattacagacgaaagctggtttattatccacacaaacctataaaacaaaacaaaacaaggaaacattccgacagaattccgcggtcacagtcttctagtaagcgaataccaccatggcagattgcgctactatgagatttcaattacttatatggatacttgttttcccaaaggtcttagtagccgcccatcggtggcattccatatggaggcattggaggcattcctgacattcctggcattccacccatttgtggtggtggaccatacccgccacctcccattcctggcatcggtggtgcgggtagagccagtggtaataattgggcgtacatgtcctgttgcgacatgacatccttctcttcctgttctttggcctccacctttttttgagccctccagccttggcctttgattagccccattgcacctttggcccggaagtatttcctcggagataaaacttggaagggagaataaccggcaaagggccacaagttcccactcagttttcggggcgaattcccaaggccaaagttttttta

SEQ ID NO: 133336 - DNA, 662 bp, Arabidopsis thaliana
  unsure (1)..(662): unsure at all n locations
nnnnnnnnnnnnnnnnnnnnnnnnnnnnnnnnnnnnnnnnnnnnnnnnnnnnnnnnnnnnnnnnnnnctttttttttttttttttttttgattgatgagttatatcaacattgatatatatcatgaatggtgagtgatccaaaacaagaaatgaatacaatacaagaagatctggaatttgttcagactacaattcaatacaactacagtttcatgtctcctgaatcagttatgttccatgagttggtccaatggttagagattgatgactcagtctcctccactcttaaacacccattagcgatcagaatcacagagacagagaacaaaagaatctgcgaatatgtaaagagagaacaacgtgcttttacatttctatctacctttgtgatcaaatcagtcttcgtgctcatcttcgccttcagaatctgatctgacatcttcactaagcttgcctctatcttgtatttgtttcacaagcatccgatacatcaaaacccaccaataaatgtgaagaacaagcaagcaatataggagagtgttaaacatgtagtagtaaattgggccttcgattgccggacgcgtggggtcgaccccgggaaattccgggaaccgggaaccctggcagggcgttaaccaagcttttttccccttattaagtg

SEQ ID NO: 133337 - DNA, 514 bp, Arabidopsis thaliana
  unsure (1)..(514): unsure at all n locations
cgattgtannnnnnnnnnnnnnnnnnnnnnnnnnnnnnnnnnnnnnnnnnnnnnnnnnnnnnnnnnnnnnnnnnnnnnnnncttttttttttttttttttttaagcgtgaactgtgagcttattggagttactagaaaatcaatgacgtttttgtggtataaaattacacccgcagaaaagtgaggggaaaagaaaaaagaaaaaagccagacatgcctggaagcgggacttacccaaatcgttgtgacataatgggaagaaaaacaaagcttaacgtacaaaagcgttgttgtcatgtaatgaaatcagcaagtggtttatcgacttccagagacaaaaaccaacttcactacttagaatcgtgcactttctttgagcaccattttccttcaagatcctactgtttcttattttttggctttttgcttcttcttatccaaagatgttaaaccagcacctaatcctgcaggagccaggttttctgttttcccattttcagaggattctttcttc

SEQ ID NO: 133338 - DNA, 646 bp, Arabidopsis thaliana
  unsure (1)..(646): unsure at all n locations
ttttntnccnccaaaaccgggnctttnaaaaaaccngggttggcctttccnccacgggnaggtttttanaaggttttnaggagggnaaattccaaaaggatttttgggggctaccccttaaaaattatggcccaagaaaagnaaatnagaactcaacanagagcaagagnccaattccgagagaccaacgaaaacctttttttttttttgggttttagaatactttcgtgaaaagaaaaccaatctttttttttaactgactcggacttctcccatgctagcatgcacttgcttcaccgtcttatcatactcatcttcttcgtcttcttcttcttctacttcctcaacttcttcctctgcatcttcctccttgccctcggcatcttctcctcctccccacccaaatgctccaatcgaccgagaaacacgagctggagtttttgcctcttccacaatcttcattatctcttcgacgctttggagtgagaatgtcgggttctctttcctgaagtatgcagcttgagctatttctgtaagttcccttggcaggttctttaggaaccatggatgttccttgatgtcacctatcgggatccccctaatcgagtgggggacaaaaaacggganaggagangtttgcaacctg

SEQ ID NO: 133339 - DNA, 541 bp, Arabidopsis thaliana
  unsure (1)..(541): unsure at all n locations
nnnnnnnnnnnnnnnnnnnnnnnnnnnnnnnnnnnnnnnnnnnnnnnnnnnnnnnnnnnnnnnnnnnnnnnncttttttttttttttttcgacaaaaggctttgcttatatagccatgaagttttaatttttctacgatataccgtatgtttacaaaagtatagcataaattggattccatatgggatgtgaagatgaaagatggcatttgtttatttctaacaaaaacaattaaggtttttggttgatgaaaacttatttcttcacctcccttctctttctcttcctttacttttccgtattccgatttaaatgaagggagattgcttaatgggggttctttcccagtagaaaattccatgaatgattagcaaagacaagcattgccaagcccaatgagaaccgtaaatcggctaaggccatgtattcccatccactctaacacaaggcttgctcgtttgtatccataaacgtcgaccattaggtatatcgcggataacaaaaatcccgaggcccctgaggtgacacacatgtaactcaa

SEQ ID NO: 133340 - DNA, 734 bp, Arabidopsis thaliana
  unsure (1)..(734): unsure at all n locations
attctnnnntacnnnnnnnnnnnnnnnnnnnnnnnnnnnnnnnnnnnnnnnnnnnnnnnnnnnnnnnnnnnnnnnnctttctttttttttttttttgtcatgaaacattgacttgtattatatatataccgctttagaatacagagaatccaaaaacgacttatatggataaatcaatatctactcgccagccaaaaccgttttctgtctccttgagtttccttgcagccgatcaatctcaccgtgcacaatctctttcaccagatcttggaagagaagcctctccatgtcaagcactaaaccagggagtgcatcatcaaaggccgtccatttctcagatggcattgccatatcttcatccaatatacattgcaagaaatcttcttcttcttcttcttcttcctccaacaacaacaagttttctgatctcttcttggcttgcttttgtagtatctctatctctgaacatagttccttcaacagattttgtgcacttaagaccttctttctcgctttagcttgcttcatccatggatctacatagctctcaacaaaagctagcttcttcccgagcatttcattaacagcatcgaacacaagtttgcggatgatcttttcattgctgctactgctgcatcctttagtttgctcaatcacaaggaacagctccggattaattgggtggcctgaagggtgcagttgaaaagttgttaatcctgagccaagatctctgt

SEQ ID NO: 133341 - DNA, 548 bp, Arabidopsis thaliana
  unsure (1)..(548): unsure at all n locations
nnnnnnnnnnnnnnnnnnnnnnnnnnnnnnnnnnnnnnnnnnnnnnnnnnnnnnnnnnnnnnnnnnnnnnnnnnnnnnnnnnnnnnnnnnnnnnnnnnnnnnnnnnnnnnnnnnnnnnaggataaaagtgaattattatgaagaataagtaacatttttaaattacaggacatctgagagtaaggaaaaagatttggtggagaaaggaaaaactggtttaccaaaatgcaacccagtgatatctgcaatctgatttgcagagtatacgtaaaatataaaaacctttaggacgagagtttgttgagaatttgtggtaatagttgtttgaattcagtccatgagtttgtagcgtttctcttgcacaccagaaactcccatctgtatctctattatagggtgaagtggcatctcgatttggggtatttctttgaggggacgatccgcaaaatatgcatacaaggctctcagaacagcctggtgagatatcacgacgacaggagctctttgtcgttctaactcaatgatcacaggttcaagccgttggatta

SEQ ID NO: 133342 - DNA, 604 bp, Arabidopsis thaliana
  unsure (1)..(604): unsure at all n locations
ttannnnnnnnnnnnnnnnnnnnnnnnnnnnnnnnnnnnnnnnnnnnnnnnnnnnnnnnnnnnnnnnnnnnnnnnnnnnncttttttttttttttttactcagaatgaataatttctccattgttggctgtatatttcatcacaacacaacaggcaaaaatataatctcatacaacagatgttctcttgacataatctactattgtttagaggatttcagaacagcgagataaaggccttgctcatcaacaaactgggttagctcaaatgaatgcttctcagcaacattactcaatgtggactcatcaggtaaatcagagacgaccacatctgaaaactctttcctttgctgctccaagcctagtctaccttgcgggtgactgattactactcttgcacctgaggaacaacgttgagagagtgtcttgaacagttcgtcgaggtcaaaaggcaaagctggaagaaagtagagaaacacagcgtctaatggagaccatttctccgggacatagatcatttctccttgccaacatttgactttgtcgtacttctctttgatacaggctaacgtaaaaagggagtcatggacaatgagcaaaagctg

SEQ ID NO: 133343 - DNA, 636 bp, Arabidopsis thaliana
  unsure (1)..(636): unsure at all n locations
agcaagagaaacataaactaatctgctaatcgtttttttacagaataaaaagaaaagaaaaaaacaatagantaaaaacacaaagtatatatcnaaaaaaaaactaaaaccctaaaggccaaagttcaaaccaggttttaaacctcctattagacatagacacacatatcttacaatttacaacatcaacctttccatgaacatatataagcaatccaagtataagataaacaccattaatcaaacagaggattttcagtaaatgaaaccatagactatcaaatcttcacattccataccaaatcctcgtccactgctttttctacacgttaccttccggtactggaaacagtcgtttaatcaaccaattgattggtcccaaaacatgaactttctttttcctccagaaccaaatcgctgcactgtactgttcattgcgtatctttgtcgttgctgctctccaatcatatttctcggtctcttctcttgccgcttttccaatgatctctcttgtttcacggtcgtgcagtaaagttctcagttttgtcacgcaatcttcaacatctccagggttgaacaaaaatccggtttttccctcctgatcttcagggattatatcagggattccaccggcac

SEQ ID NO: 133344 - DNA, 548 bp, Arabidopsis thaliana
  unsure (1)..(548): unsure at all n locations
nnnnnnnnnnnnnnnnnnnnnnnnnnnnnnnnnnnnnnnnnnnnnnnnnnnnnnnnnnnnnnnnnnnnnnnnnnnctttttttttttttttgaactgcttgattctttagtttcttaataaaccccgggactgatactagtctggttacataattgctcgttcaagttacaaccacacatcactttacagaatcaagaacataagttactaaattggagttgaagctatcataaggaacaaactttgatcctttttcccaatattggcatccatcaggaaaggcttggaaagctatgcaagaacagtttctccagcaggttccatgacagtcgctaagaccagcgctcaaactatcgtcatagtaaaatggataataaccggtattattttccatcatgtatcctcttctgggttcgaaatactctgaccctttcctacaagccgttggcttctccgtgatgcagattgctgaactgttctttaaatccgtcttgcagggttcactgctttcggaaatccaggtgctgctattgttactgctgagaga

SEQ ID NO: 133345 - DNA, 556 bp, Arabidopsis thaliana
taggtgcactctacaagactatgacgtcgcatgcacgcgtacctaagcttggatcctctagagcggccgcccttaagatttgtgtgtgttatttaatgcttttctaactacattttttaagagacttgaagaaaccatcataaaaagtagaagtggtcataaaaattacataagcgtttttgataaacatcaacaacaactcctaaaaagcctaaggagacaaaatagaataagagacacaacagtctaaaaaaaacacgagggaacaaagaacaaagctgcctacacagatatggacgatggagagagatgggaagcatgaacaatggtaacatcctaattcactttacagacattaccctacctctccttgttgtttggttagagacacaatcatcatcatcagttcatcacattgttctttttgtttttctcctgcaaacacccttataagattaaaaatttcatgtaacacacaacaagtaaacccaccacttgctagctttttatgtcaaggctttatctttagaacagagcttcttgcattgcctctgct

SEQ ID NO: 133346 - DNA, 540 bp, Arabidopsis thaliana
  unsure (1)..(540): unsure at all n locations
nnnnnnnnnnnnnnnnnnnnnnnnnnnnnnnnnnnnnnnnnnnnnnnnnnnnnnnnnnnnnnnnnnnnnnnnncttttgttttttttttcgacgaagtacgatattgataatttcatagtacatcgatcataaacaattacgtccgattaaattggaatcaagaagcgaaataaagcgcctccttgtaagtcttcttccaatgatgcagaacgtgtccaaaaacatcataaaagactacacgcagttcagcttctgaaacgtgaaccgacatgaaaccttgtccgtcgtagtaaaacctcatctcttctggttcaacgtagttcacgtcacctcctttccaggccttggatccacctccacttgtcataaattgtatgttactgtccacgctgcttatgtgctctaagcaatgatcatgtccgtttacgtagagatccacttcatttgcttggagaataggtaaaaggtgtttctccaactcaatggtgttcccgtggtggcctgcgcttttgatcgtatggtgaccaatcactattttc

SEQ ID NO: 133347 - DNA, 508 bp, Arabidopsis thaliana
  unsure (1)..(508): unsure at all n locations
nnnnnnnnnnnnnnnnnnnnnnnnnnnnnnnnnnnnnnnnnnnnnnnnnnnnnnnnnnnnnnnnnnnnnnnnnncttttttttttttttttatctttactagcttttattagatttcaaacttgtggaagtaatcatattcatgtgggcgaatctacatgggtcaaataaatttggtggagcaacaaagtttgtttttatttacatgatgttctactgatgcacctaaaaacacagcatctaacaaaggtaaaaactgaggatcaacaaacaaagcttgctgtcctttcctggctgtcagaaagggctaatctcacgagcccctttcagtaactactctggtacaagacgctttctgggaggagccaacgagtctttggtcagcccatcattgtcctccgcatgtatcacagagactatgtcatcaaagagttcgtctttacctcctcgtaagggatcctgaagaaataagtcagtatgtgtctttccgctgtataaaacaagctcgg

SEQ ID NO: 133348 - DNA, 523 bp, Arabidopsis thaliana
  unsure (1)..(523): unsure at all n locations
cgattcaannnnnnnnnnnnnnnnnnnnnnnnnnnnnnnnnnnnnnnnnnnnnnnnnnnnnnnnnnnnnnnnnnnnnnnnnnctttttttttttttttagaagtaaaataaatgaattaaataaaattaccgaaatgggttatgtgttcaaatctgttacaacaaattcccaaaaattactcaaatcaattaaaaaacaagaaatcaaaagatcatcatcaaccagaaaaaaagatcatctagcggcggcttttttgtcgccggagtaataactcaaataccatctgacaaacttcttcaaaccggtttgcaaatccgtagtcggtttataaccaagctcacgttgagctaaactaatattagcatgagtaaacggaacgtcaccgtttcgtggcatcttaatcaaattcttcttcgccttcactttcaattgtctctccaatatcctcaccagatctgaaaccggcaccggcgacgtgtttccgaggttaaacactctcaattgcgccggacctctcttctt

SEQ ID NO: 133349 - DNA, 611 bp, Arabidopsis thaliana
  unsure (1)..(611): unsure at all n locations
nnnnnnnnnnnnnnnnnnnnnnnnnnnnnnnnnnnnnnnnnnnnnnnnnnnnnnnnnnnnnnnnnnnnnnnnnnnnnnnnnnnnnnnnnnnnnnnnnnnnnnnnnnnnnnnnacagaagatggtgaatttccattagactgtaaaagttgatcaatatacaaaacccaaaacgaatcctttttcaaaatgaagatacatcagagtcgatgacatgttctgcatcaaacacttactttgttcacaccaaaatgatcttgcaccattaatctcaaaagatgttcagtcataatgctccaatgacatggaagaagcattctccaaatctaataatagtataccttaccgggaaaccaaatcgagattcccgatttgaacaagaatattttcagaccgaagctccttatcggtcgcagaggtaagcctccttaggagcctttcggggcaattgtggatatcctgggggggataggtaaatttccctggtagccccaaatacaattggccatcctggaaaacagcggggtttgacagcaggggccattnggaaaaagggttcntggggaaaccggaagcacnctggnggatttgtttgtnttgaacctgggngnna

SEQ ID NO: 133350 - DNA, 423 bp, Arabidopsis thaliana
  unsure (1)..(423): unsure at all n locations
nnnnnnnnnnnnnnnnnnnnnnnnnnnnnnnnnnnnnnnnnnnnnnnnnnnnnnnnnnnnnnnnnnnnnnnnnnnnnnnnnccacgcgtccgaaggaaggttagagaccaagttctctctgcaaccttccctatcctttgcacagtagtgtgtattggctaattttaatcttgattttagttttttttttttttttaaatgtatgtttgtaaataatggaaacacatacgtggttggttatgctctccgtttgtatctctacatagacaggttcaaaagagagattcttcttcgtcttatataaatatgatttaaaaaaaaaaaaaaaaaaaaaaaaaaaanaaaaaaaaaaaaaanaaaaaaaaaaaaaaaaaanaagggggggccgttctaaaggatccaagcttacttacgcgtgcatgc

SEQ ID NO: 133351 - DNA, 668 bp, Arabidopsis thaliana
  unsure (1)..(668): unsure at all n locations
cgnnnnnnnnnnnnnnnnnnnnnnnnnnnnnnnnnnnnnnnnnnnnnnnnnnnnnnnnnnnnnnnnnnnnnnnnnnnnnnnnnctttttttttttttttgtgtgtgataaagaagattacagaaacgttacactactgtctttacacacttgagacatatttgctatatcgctgaagagagaaagattccgactttgtagaagaacaaagccctagtttggccttatacaacaattaatgtaggtcaagatcctcttcttcttcatgacagggtcatcgtcttgagtttcatggcgatggtgaagttgttggtggttgcgacgaacacttaccatgagttcttgttcgcttcccaaactagaatgtcttacaccagctttgttctgcttcctgtttgcgcgagctttagaaaagacaaccgagtagtttgtagcatcatttggtcctttttggtcccaccctccgaactgtggaactggagtccatgcagcattctcccttcttttatccataaatagatattgcttggtctagcagaaagatgttcttaaacattgatgaaggtgttcatgaccggacgcgtggnnnnnnnnnnnnnnnnnnnnnnnnnnnnnnnnnnnnnnnnnnnnnnnnnnnnnnnnnnnnnnnnnnnnnnnnnnnnnnnnnnn

SEQ ID NO: 133352 - DNA, 584 bp, Arabidopsis thaliana
  unsure (1)..(584): unsure at all n locations
cccaatngaatgggnagccggttnggataancttgagtaccnataataagccaancttattcaccatcnccaggggggggngggnacaccaccacaatctttctttcttctctcctccgtctccggcttctttctttttctctccgccgtcaccaccttctttcttcttctctccgccgtctccaacctcttttttcttctctccaccgtcacttccttccttctttgcttcgttaactccggcggacggagcctctttctttgcgtcaggagcggcagcttccgtcttcttattctcggcggctccgtcatcttttttggcgggaacaagaggctcgacggttcttttgagcttcttagtgagtagaggcacaagttctttaacgtctatcgttcctttaaccgtcaccacgtctttagctccgtcaatagccactgtttcgactcctttgattntcaatattattttcttgattntgaatacatccttcgcaatgtagtctgatctttaaaggcaccacgctctcttttggagctgccggagcaggagcaggaggagccgcctccttatctccaccatcggc

SEQ ID NO: 133353 - DNA, 706 bp, Arabidopsis thaliana
  unsure (1)..(706): unsure at all n locations
nnnnnnnnnnnnnnnnnnnnnnnnnnnnnnnnnnnnnnnnnnnnnnnnnnnnnnnnnnnnnnnnnnnctttttttttttttttttcaaactgcgcgtattctataccgcaaaattttacaaagatttggccactcttctcttaagtggaaaataaacagaattattccaaaccattaaaaactctgatgagaaaaacagagaatgttacaataactctgcttataatgaatacagacttactaagacctcaatcaccccaacttctttccttttggggcagacaaaaaaaactcgcaaacactaatcgattgtgagctaagaagacaactagaagtgatcactcagtcactcactcctcactaagtacagtgatcactcagtcactcagtcctcactaaatacaagtctgcttatgaatgggcacatggctgcaagaagtgccttgggacactcctcatgtggcagatgtccgcatcctgagattgctactagcctagagttttcgagttttgaagccatgacttgggaggacttgaggggaacaagtgcgtcttcggctccagcaacgactaatactggtaagttttccaccgccttgagaaggtgacaatgcatttttgagttggaggcaccatctcgggtgggagtctgcctatcttgtgaagggctatcccagcgttcanataaggggggcntntttngnct

SEQ ID NO: 133354 - DNA, 555 bp, Arabidopsis thaliana
  unsure (1)..(555): unsure at all n locations
nnnnnnnnnnnnnnnnnnnnnnnnnnnnnnnnnnnnnnnnnnnnnnnnnnnnnnnnnnnnnnnnnnnnnnnnnnnnnnnnnnccacgcgtccgcccacgcgtccgcccacgcgtccgcttttttttctcttccttcattgtttcgctgttcctgcgattctgaaactcctcaagctttccattcagaatcgtagcaatggcttttcctctttgattttgtttttgatccgtctctctctctctctctcattgcgtttaaggggtcgctttttttcctcttcatcctcgccgccggcttatggccaactcgccaccaccttcgtcgcgaaatcctccgaagttgttggtggattgttggtcgtttccgtttcttctctctatggttcctactccctcataatttaaggatctgtatcggaataaccgaaacgatctccggtttcggatttgaatattttgggggaaattaaaagaatggggaaaggttggttcatggtagagaaagctagaagatgcttaaggacggtgttcttcatggttgcgatgcttgtctcg

SEQ ID NO: 133355 - DNA, 513 bp, Arabidopsis thaliana
  unsure (1)..(513): unsure at all n locations
cnnnnnnnnnnnnnnnnnnnnnnnnnnnnnnnnnnnnnnnnnnnnnnnnnnnnnnnnnnnnnnnnnnnnnnnnnnnnctttttttttttttttaaaatgttgaactgaattttcttcgatgcgccgtgcttctaaccatggtgctctctccatttctatgttcaacttatgtagtactaaataactagttagactttcaacttaagcttaactgtggaattcatatttcgttttctctgcaaaagatcatccatcttttagtggtgtttagctgagaagatcattcgagccggcaaagtgattagatctcagcgaatactcttttatgagtttggagaagaaagaatcttctctctgtagcagtttggcaggtgaatcaaactctgcgattcgtccatcactcagaaccagaacaagatcactctctatcactgtgtggattctgtgtgcaatagtcaccactgtccgatctttaaactcttgattgatgatcttttgtattacaccatcagt

SEQ ID NO: 133356 - DNA, 525 bp, Arabidopsis thaliana
  unsure (1)..(525): unsure at all n locations
nnnnnnnnnnnnnnnnnnnnnnnnnnnnnnnnnnnnnnnnnnnnnnnnnnnnnnnnnnnnnnnnnnnnnnnnnnnnnnnnnnnnnnnnnnnnnnnnnnnnnnnnnnnnnnnnnnggaaataattctagtttcaaattccgttgggaaacaaactagatgtaatgtgtataaccatgtagattatttagctgtacaagtgtgagagaagagaaaccgcccaaaacaattattagttcgttctagtgtattactactaaacaaaattgaaaaatgtaatctctaccggcggcgggcagcttgactatcatttcgaatgcggtcagcgtacattgggagacgaatgatctctcttatttcctgaagcaaaacctcctcagggatgttatcatttatgctctttatcaccttacgagcagtgttgatatcatttggtgtagttttgtcaactctgatcctcatgctaaaccaaactttcttatccttatcccaagcacattctacaatcttcccattgtaacttgacgg

SEQ ID NO: 133357 - DNA, 514 bp, Arabidopsis thaliana
  unsure (1)..(514): unsure at all n locations
cgnnnnnnnnnnnnnnnnnnnnnnnnnnnnnnnnnnnnnnnnnnnnnnnnnnnnnnnnnnnnnnnnnnnnnnnnnnnnnnnnctttttttttttttttttttcaatgaatgagtgcaataggattgagtgacagtaacaaaatatgaattctacttacaacttggaaactcttgttagtatatcagcaatttcccaaacaaaaacacatctacgaaggtaaatggtcagcataatgccaagaacgcaatccagggaaatcttaaacaatggataagaattggatctattgtcacacactctctctctctctctctacaaacatttgcataaacttctactattactactactttccaatcaatacctgggaaaagaacacaaaaccaagctactcttacagagcacaagagaagaagttagataagaaaatgagaaacatacaaatttcttaccggattttatgatttttttcacgcacgcaagtggcttcaagtagtcactgaacctttgctt

SEQ ID NO: 133358 - DNA, 923 bp, Arabidopsis thaliana
  unsure (1)..(923): unsure at all n locations
nnnnnnnnnnnnnnnnnnnnnnnnnnngcagtaccggtctcgaattcccgggtcgacccacgcgtccgctaaaaccatttccgcggcggcgtttctcggaatcaatggcgagtctccgaagagtcctgctcaacgtaacttcctattgccaacgttctctcactcaatcgtcgtattctacgtcggggatgttatcccgatcggtggtcaagcatgcgaacaatctcggtcaaattcaagctagacatttcacgacaacgcttatgaaatcgggaccaaagcatagtggtacagagcaaggcgtgaagcgaaacagtgcagatcacagacgtagattgctcgcggctagatttgaactgagaagaaagctatacaaagcgttttgcaaagatccagatcttcccagcgaaatgcgagacaagaatcgttataagctctcgaaattgccgagaaacagtgcctttgcgagaatcaggaacagatgtgtgttcactggtcgatctcgttctgtgactgagctgttccgtgtttctcgaatcgttttccggggattagcatctaaaggtgctttgatggggataacgaaatcgtcttggtagctgcattatgtgactgatctatggaagaagctgattctgaagaaatgggagcaaggaatacaaagaacgtttgtggtaaatacagttaccaaagtagctgtttgtatgatggtggtggaaacattttgacaccatcacaaaacttagtttgcttttcactagtgatgctctctctttgttttacgatcttgctcagctattctagcaattctcgttgaataagttatacaaagtcacaaannnnnnnnnnnnnnnnnnnnnnnnnnnnnnnnnnnnnnnnnnnnnnnnnnnnnnnnnnnnnnnnnnnnnnnnnnnnnnnnnnnn

SEQ ID NO: 133359 - DNA, 529 bp, Arabidopsis thaliana
  unsure (1)..(529): unsure at all n locations
nnnnnnnnnnnnnnnnnnnnnnnnnnnnnnnnnnnnnnnnnnnnnnnnnnnnnnnnnnnnnnnnnnnnnnnnnnnnnnnnnnnccacgcgtccgcccacgcgtccgcttttgcttccatttccctcgccgtgggccgccacgtcatcaccgtcggcgccgcaatttatccctgaacttccacctccgtctcaatttgactactcgggtctaactaaaattcttaaaaaatcggtaatcggaaccctaaccggagctctatcgctcactctcgttttctcgccgccgatttcctccgttgctgctactaatgatccttatctctctgtcaatcctccttcgtcatcgtttgaatcttctctgaatcacttcgattcggctcctgaagattgtcctaatgaggaagaagctgatactgagattcaagatgatgacattgagcctcagttagtaactaatgaagggattgttgaagaagcttgggagattgttaatggtgcctttctagatactcgtagccatagctggact

SEQ ID NO: 133360 - DNA, 528 bp, Arabidopsis thaliana
  unsure (1)..(528): unsure at all n locations
nnnnnnnnnnnnnnnnnnnnnnnnnnnnnnnnnnnnnnnnnnnnnnnnnnnnnnnnnnnnnnnnnnnnnnnnnnnnnnnnnnnnnnnnnnnnnnnnnnnnnnnnnnnnnnnnnnnnnnnnnnnnnnnnnnnnnnnnnnnnnnngggggagaaaaaaaaattgaatcaaaacccaagcgaagccgtcaatggcggctttcaaacagacaagaacatgggctctccagtttctatcttaattattcgtttctcaaaaaaaaaaaagaccattcctttacgacctttttgcatccaaggcaacaaacataggcgaagctaaaagcttagtcccggttgaaactgccattatttcacaaacccttttttctttgaagcgccctccaaaatatgcgtttttgagaataggaagccatagattggggctcaattttggcgccttggaggcctaccctcagcttccgagactttaatttgtctaccggccaaatcagccccctccagggacttggtggctttttggccctcttga

SEQ ID NO: 133361 - DNA, 568 bp, Arabidopsis thaliana
  unsure (1)..(568): unsure at all n locations
cgnnnnnnnnnnnnnnnnnnnnnnnnnnnnnnnnnnnnnnnnnnnnnnnnnnnnnnnnnnnnnnnnnnnnnnnnnnnnnnnnctttttttttttttttttttgagtaaccaacctcatgatacaatcatcgcacgaagcacacaactctcgcaatttagacagttcgtacataagataaatttatagactgccacaatcatatcgagtatgaccaatttgatcacgaaacagaatcatcaacataactacaagcaatagcttcctaaccggcgaagaagctgctattaaactaccggtaagataagtttgtgtcgaaagccccacgagtctacctcttctttccctaatgtactcatcaattgcttcttctatttgcatccttgaagagaaggaagatacattaattataccgtcttgacctaaatttaacttcctccacaagcatctagccaaaacaacaccgtcctcaagcgcagccgaacatccttgtcctaagaatgggcccattaggtgcatactgtctccggcaactgtcacggtgccacgtcggaattttccagacagaac

SEQ ID NO: 133362 - DNA, 523 bp, Arabidopsis thaliana
  unsure (1)..(523): unsure at all n locations
cgattnnnnnnnnnnnnnnnnnnnnnnnnnnnnnnnnnnnnnnnnnnnnnnnnnnnnnnnnnnnnnnnnnnnnnnnnnnnnncttttttttttttttttaatggaacctcccatggaggagcattctaaagtagcatctacttcatcattctccatagttacaataaagcatgctttacaaaagggattgtgaaagtatcgctttaatgttttgtgggagaactttctaagcttggcttgaacttactctatctttatgtacccaatacaaagaaaacgagtaagaaaaaagatgcataaaatatcatcatggcactgcttccagtttttcccacaacctgaaagctcttctgatgactggatcagctgaaaatcctttctgcgtaatccgcaatcgcgattaacaggctactcaatttctcaccattgtcctctggtttcttaaaagtaagatctttcgtgtcgaacggtactatgtaatctgggagatcagaccgtaacagtgccaatttcttgctaagaa

SEQ ID NO: 133363 - DNA, 784 bp, Arabidopsis thaliana
  unsure (1)..(784): unsure at all n locations
ttaggacgactatagaagattctatgacgtcgcctgcacgcgtacgtaagcttggatcctctagagcggccgccctttttttttttttttttttttctataagaacaacactgatactcaaaaccgtatttccccatcggttacataatttgtcatctgcattatatcgcagaagagagtcgaaaatgcatcaaaatatataaaccggaatgtcagtaaatatgtcttcacctccatagactgaatcttaaaaagcagtctccttcgtcacatttactattcctaactccaggacagtcttcagcatccacttcttgttatatatacataatctccatagatagacagagaactattatataagagaaaaaaaagatacgagtcatgaaaatccattactttgccctacgatatgtagaagcttcttctgctgctgcctaattaaatggtaagcaaacagctttttaaacctgagtttttccacattcgtctcaggggatataatagtcgcttagatttccgaccagatagttaaactcttcacctactccatagtcatttgcctgctctactgtgttctgaaccattcccggtggcgacttttgtgctcacttttggtcttcctttgatgcancgtttgttgttgttggtggtgttagtggtattgttttctggagggaactcanctgtgagtcttnccatctgcttctgcagatcagccactgagtcgtttgagactttgccttttgaagtcttcttccgtaacaagcttgagctcgagcct

SEQ ID NO: 133364 - DNA, 695 bp, Arabidopsis thaliana
  unsure (1)..(695): unsure at all n locations
cgattatannnnnnnnnnnnnnnnnnnnnnnnnnnnnnnnnnnnnnnnnnnnnnnnnnnnnnnnnnnnnnnnnngaatgnnncttttttttttttttttttttttttgaaaagcatgaatagatttcattgtgaatttgtgatgggagaacccaaacgtcttgtgttgttttgtgttgaagtaattgactacttatcggtagcagtgctgtacaaaacgaaccagaggactgtttggcaaaacaaatgaatcatatatgaattgcgaaatcaaggtcttcgtatgcatcacttactaaatcaaaactatacatttcaagcatcttcttcatttacccttttctaattggaacttaaaactaacaagacacttcgtttcctgcatttgttgtagctttagatgattgcttctcgtcttcaacatctgagtttccaatcttgtcaaagtcatcctcaaggcttccatcaccatcatctggagcttcatcactgtcttctagatcacccaacaggaatgtatccagatcctgctcagaagacgcagtagatgttctacggattgcaacattcttttctactgtttctgatctccagacactggagccttttagcttcttatttcatggtctcctttggtctaagtgactctgtacttcctttatatggagaacctgagtgttccttgtgggaaaaaat

SEQ ID NO: 133365 - DNA, 813 bp, Arabidopsis thaliana
  unsure (1)..(813): unsure at all n locations
nnnnnnnnnnnnnnnnnnnnnnnnnnnnnnnnnnnnnnnnnnnnnnnnnnnnnnnnnnnnnnnnnnnnnnnnnnnctttttttttttttttactaatattctgtctagcttatattaccaaactagctttttctcattcatttatgatcacatcacgtccacattaaaataaaacaaaaaagggatcaattatcacaaaaacaattcctctagaaaattattcttttgaggaatatattacaaaaaccagaagtgttggcatctctcaagaagtaaaaaaaaaactcgagagagacacacaactcaacaattacaagtctgttgtataaatggaagatgatatacacttagctgggtgaattcttcctgcaaaatttgggaataaatgtacactcacaagatggtgttgatgtgaagtgctttgaggagagatgttgccatttgcttcaccagaacttggcctcctgaacgttgtccatcacgtcgttcttctatcagattctgcagtttttgtggaagatcgttctctacgatcagctgttttggcttcggatgcttctcgtaaacggccttgatgagttcaggaggtaagtcgacaatagcatttggtggctagttagcatgagaacggagcagtcattaacgctatgtctattgttgagatgattcggagatctcaaaatggtccaaatgtgacaaatgctcttggaagtctgaaaagtactattttgattgatcttctgaaacgctgctcactttggaacgtttggcagcaacagatgatcagcttacgacatatatatcagtactcag

SEQ ID NO: 133366 - DNA, 563 bp, Arabidopsis thaliana
  unsure (1)..(563): unsure at all n locations
cgattcnnnnnnnnnnnctatagaagaactatgacgtcgcacgcacgcgtacgtaagcttggatcctctagagcggtcgccctttttttgttttttttcaaaaaaatctccaacaaataatattcacgtgcaatatcaggctcatgacagtttcgattagagccacacatggaaataattaaaagtgaaagcgcgtctaatgaataatgtgttttacacctaaacctacgggtcctaccccaaaatgatgagacttaactattaccaagaatcctctgtttaaagttcatgtgtccttggtattcttctccggttcgatctcctgcgttgtacgttggccttcggtgatactagaccagcctgatggggttctgaccattgtcgctagtcaaaccactgcattcgctgctaccaaaatgttttgctttcgaacgccattttcttgaatttcttcaagtcttctttgtattgtgttgagctataatctgagctcccgtctaagctgtaaatagtactttgtcctggggcagctccttctgttaggtcatctatagatatatttc

SEQ ID NO: 133367 - DNA, 376 bp, Arabidopsis thaliana
  unsure (1)..(376): unsure at all n locations
gcggcgaagagagataatgagctgtgaggagtaataatggtgttggagttaattcagatggaaacaccgaagaagagaggaagaggaaggccgaagaagcctcccgtccggtgatctcttttcaaactccggtcatgattgttaaaattatggagacaaaattttaaaggcaagttttttttaaaggcaaaggaaagtttaaggatcagcgtttgttgtcttagtgtaaactttattatgcatttgttgttattaccgttgtgtaattgtgttatcttgatttactttgaaacattttcctcattacattaatttggcaattcgctcnnnnnnnnnnnnnnnnnnnnnnnnnnnnnnnnnnnnnnnnnnnnnnnnn

SEQ ID NO: 133368 - DNA, 931 bp, Arabidopsis thaliana
  unsure (1)..(931): unsure at all n locations
aatgtnnnnnnnnnnnnnnnnnnnnnnnnnnnnnnnnnnnnnnnnnncgtacgtaagcttggatcctctagagcggccttcctttttttttttttttttaggtgaaacagattgagttcatgggatataagaatcgtagacagtgtaagtgttacaacgtagataaacaaaggttgttttaagaatacaaaactatgaagacaaattacatgacaggatctgtaagaacttcttttatcttctcacgcttgcttctctcatttcgctcttaagcatgtcttcacgtttcggctcttgataacacaatggatgactcaaagggatactctttttagctctccctgagacgtgaggtggtaaagctaaaactagaaccataacatcatgtttaataccagcgactcattgcagtatcttgtgctgcagacactttttgtggtatatactgagtgtttggcttaatctacttggaccttcagcagcggtggcgcaatcttcatctcctctgttgcttttgcaaggttgagtcctctttgggtattgagacgcagcagctggatttctgaccatccttctctggtgttgttcaagagcttaacgcctgtggctgcgccgcaattgttatagcgtaacactgatccaactactttaccaggcctagctactgcagcaccttggattgtttgagggaccttgataggaatnctcgacattgcattttgggcttcctggctgcaccccgaggctctcgtctctatgctcacttgagaatcattagtgacttcactaactctgtgtgccaccgatgattggttaaatacaataccagcctgcaacataaagaagtttttagctgttcaaagatccaatgatacattttaggactaaactacctgtattttcttctgggctttcagggatataaaaaaca

SEQ ID NO: 133369 - DNA, 842 bp, Arabidopsis thaliana
cgaaattaagccctcactaaagggaacaaaacctcgcgctgaggcgggcggtataaaactagtggatcccccgggctgtatgatttcttggccgccaaaggttgttttaagaatacaaaactatgaagacaaattacatgacaggatctgtaagaacttcttttatcttctcacgcttccttctctcatttcgctcttaagcatgtcttcacgtttcggctcttgataacacaatggatgactcaaagggatactctttttagctctccctgagacgtgaggtggtaaagctaaaactagaaccataacatcatgtttaataccagcgactcattgcagtatcttgtgctgcagacactttttgtggtatatactgagtgtttggcttcaatctacttggaccttcagcagcggtggcgcaatcttcatctcctctgttgcttttgcaaggttgagtcctctttgggtattgagacgcagcagctggatttctgaccatccttctctgttgttgttcaagagcttcaacgcctgtggctgcgccgcagttgttatagcgtaacactgatccaactactttaccaggcctagctactgcagcaccttggattgtttgagggacgttgataggaattctcgacattggcatctgggcattcctgtctgcaccccgaggtctctcgtctctaatgctacacttggagagtccatcagtgacttcagctgaactctgttgtgccaccggatgatttgttatcagagtacaatacgcaagcccttggtaatgatgcatgctgttgcctctcagggggattatgagaagtaccattcttgtagtgttc

SEQ ID NO: 133370 - DNA, 654 bp, Arabidopsis thaliana
  unsure (1)..(654): unsure at all n locations
nnttaggacacctatagaagattcttgacgtcgcctgcacgcgtacgtaagcttggatcctctagagcggccgccctttgtttttttttttttttttttttttttttttttttaaacaaaatatcaaacttaaattaaaatcaaaaaaaaaattgaaactttacttaaaaattgtctctaacacccattttcgaaagaagcacatttactacaatggaggatagaaataggaggagactgaaaagccgaggaagagtaagcctccaacagttgcgaccgtacgttgcgagatccttgaagccagcatgcttcctccaacaactgctagtgaagtacacacagtgtgtccaatacttgccccaatggccactcctatggcgttcttgtgagtcgccaaagctattgtagcgatctggctacggtcaccccattcagctagaaaggttaagatgaaggactccagaaatatttggggtacaaaatcttgagaataaaccacggaaggggggcttcccttgacctgactcgagcttctcttcaacttcctccatttctttcttctgtttggactttgaatcaggagacctccaagcaatggagaggagtcgcaaaccacaaaatgcattgagcacctgtacagccctattggggggc

SEQ ID NO: 133371 - DNA, 550 bp, Arabidopsis thaliana
aggtgacttatagaagagcttgacgtcgcatgcacgcgtacgtaagcttggatcctctagagcggccgccctttttttttttttttggatactgcaaaattttatttaattagatttgttacacttcaagaaagtaaattgtaaaagcataggcgttggattctttggtttggccattttggccattgatattaaacaaaatatcaaacttaaattaaaatcaaaaaaaaaattgaaactttacttagaaattgtctctaacacccattttcgaaagaagcacatttactaccatggaggatagaaataggaggagactgaaaagccgaggaagagtaagcctccaacagttgcgaccgtacgttgcgagatccttgaagccagcatgcttcctccaacaactgctagtgaagtacacacagtgtgtccaatacttgccccaatggccactcctatggcgttcttgtgagtcgccaaagctattgtagcgatctggctacggtcaccccattcagctagaaaggttaagatgaaggactccagaaatatt

SEQ ID NO: 133372 - DNA, 750 bp, Arabidopsis thaliana
  unsure (1)..(750): unsure at all n locations
cggttctnnnnnnnnnnnnnnnnnnnnnnnnnnnncgtggcatgactgcgtacgtaagcttggatcctctagagcggccgtccttttttttttttttttttttaacaatgaaattttgtgaaactacaattaaaagttcaaaggtattttttttttttggattacaacattaacctatggagtctgtagccattttttaatttaacttttggcccaaataatacttctgccaagtctatacaagaacaaaaacttgaactctgttagagcggtgagaaatgtcttgatttgaagctgcataatctgtactggtttactctgtctggtcactgacacggaatagctcgatgagcgtgtttcggattttgattctcagagcagaggcttcatcgggtctaaaccacttcttgtcgaacattcccaggtctttccttttcagcctttgaggcgcctcttcaatgaaccgtttaatgaagaagagcacaaacggaccacaatcaaaatcgtttttctgctgcggaacctgaacaacagcttcgctgatcctacgagggaggtttttccatactttttctgagataggcagatccaaggaataggcatcttgattcaaataattccattcgtcttttagaaacctttttacattttcaacatttgattttctcgagtgaagtcctagagaatcaaggtgaagtatagtcaaccccgattcatctttcttatcagggatgcaaactattacaaggc

SEQ ID NO: 133373 - DNA, 652 bp, Arabidopsis thaliana
  unsure (1)..(652): unsure at all n locations
nnnnnnnnnnnnnnnnnnnnnnnnnacgtcgcatgcacgcgtacgtaagcttggatcctctagagcggcctcccttnntggggttttcctttttttttttttgcctaaaacaaaccgggaaatatatgtaaattactctctttatcttaaaatgtacaactaaaaatggtgaaatagttgactgctctcattcattgacggcattaacattggctaattcataattaataattgaaatctgcttcataatctctttaagtgcgatctcgtctttaagtatagatgtatgcgaaactccatcaatctctacggtgttcaagctatcgactttcaaagctgctaagctcgccaaattaaccgtcccatctccatctccatacttaatctctggttgcttatcgaatcctccttttccatacatcaaaacctccggtgtatcaactcctctcccatatatgcaagtgactggcactcccggagtcatcagctcctctgttaaaggcaacactcttgtcttgtaaggcacaactccttgtgagaatccatgtctgcaaaaaccgatccatctcgaagctgggtagtaacctggggagttccaacagcgggttagttctgccggaaacactttggagatggaagacccattggtact

SEQ ID NO: 133374 - DNA, 787 bp, Arabidopsis thaliana
  unsure (1)..(787): unsure at all n locations
nnnnnnnnnnnnnnnnnnnnnnnnnnnnnnnnnnnnnnnnnnnnnnnnnnnnnnnnnnnnnnnnnnnnnnnnnnnnctttttttttttttttttttaatcgaaactgatgctatattacaacttacaagtgaacaatggatagtacaagtagaatatggccaaaaagggttttcaccacttgtttcaacagtttcttactctagcaacaatgaagtttttagacaaatactggttaagtttcaagtctgagagaacctaaaacaaaaacagaaacgtaagagctagacatataacaaaaaaaattcccaccagaatcatgactcgagtttgtcacaagacaacagcgaggtatcgggcttaaacgatgcctctgaggagctttggtttctcttgtctgtaaacctgtacgcctgaacaaaataaaacgagctccaagaatttcgcgttgagcaattcatggtcacaaaagagcctctgactgagataatatcaagaggcagatcctgaaggtggagactggcggtctcggtcttgagcagcttcttctcctgatagattttgagagacggaggctggcanagcagctgggtcaagctcataccaacccttggttatgcctcttccttctgttcctgttaatctgaatgacggaatgctatgtgagaatctacagaattcatgaggtggaatctcacaagtgtttgactcattccttcggcatcggacagaaaacacagttaaagccttgcactttagacaagaaccaactgataccgtggctccctc

SEQ ID NO: 133375 - DNA, 651 bp, Arabidopsis thaliana
  unsure (1)..(651): unsure at all n locations
nnnnnnnnnnatagaagagctttgacgtcgcatgcacgcgtacgtaagcttggatcctctagagcggcctgccttnnngtgtgttttctttttttttttttttttttttttttgtgctaaagaacttccaactatatatacacttaaaagcaaactcttttcattggtgaaaacttcattactctcgcgaatttcactaaaaatttggaattttaagaacttaatccaaaagtccggttttctcctctgcatcaacgagtgagttagcagaggcagtacgaggcccgcttggggagaagctaagcgatctgctcagctcgttttgccaaaaatggttcctcaaggctttaagcttcgggttaaccgttgagaagctcggatccgacagcaactcttgcatcgctgtcttcccctctatgagactcaccacctgcgacattgtaggccttaaagtcggtgatgcgttagtgcacataattgccacgttcagcatcaacatggtttcctcttctgaggaatctgaggctaacgttggatcaaccagctctagtaagcttcctctctcttgcaaaacgtaagcccaatcaagaaggtaaacaaagtcctcgggtggcctaaagtttgtgttactctttccactaacgatttcga

SEQ ID NO: 133376 - DNA, 533 bp, Arabidopsis thaliana
aggtgacactatagaatgactatgacgtcgcatgcacgcgtacgtaagcttggatcctctagagcggcgcgccctttttttttttttttttcattaccgctggcggttgcggcagcggcagcggctgcggcaaacactaccgcctttatatatatatatttagtctttcggtctgatctttgagatcactttagttcatataacactacttttgaccgctaaagaacttccaatctattattatacactgtaccaaagcaacactctttttcatctggtgaaaacttcattactctcgcgaatttcactaaaaatttggaattttaagaacttaatccaaaagtccgggtttctcctctgcatcaacgagtgagttagcagaggcagtacgaggcccgcttgtggagaagctaagcgatctgctcagctcgttttgccaaaaatggttcctcaaggctttaagcttccgggttaaccgttgagaagctcggatccgacagcaactcttgcatcgctgtcttcccctctatgag

SEQ ID NO: 133377 - DNA, 550 bp, Arabidopsis thaliana
aggtgacctatagaagactttgacgtcgcctgcacgcgtacgtaagcttggatcctctagagcggccgctcgcgatcgggaataaaagatggaggaagaaagagaaaacactaactctatctacatagtttccgagctacttgaagaaattttccttggattgcctttgaaatcaatcctcaaattcaaaaccgtctcaacaacaatggagatccaatcctggaatcgaacttgttcgtggagaggcgtagaactcttcaaaagaaccacccgaaaatcctggctgcttataactgcgactactgcacgcggccgggtatcctccctatgtctcagttcgaaggggacgaagagatcgtttatcttcataccgacgccacgcaaccctcgatgacttgcgacggtttagtctgcatcaccggaacctggttgggtcaaacgttttgaacgtctccaccggacaactccgaagatgtctacccggtcagatccaggaccgcaagcaaattggctcttgggattcggtagagacaaagttacggccaagtat

SEQ ID NO: 133378 - DNA, 1117 bp, Arabidopsis thaliana
  unsure (1)..(1117): unsure at all n locations
cgatttcnnnnnnnnnnnnnnnnnnnnnnnnnnnnnnnnnnnnnnnnnnnnnnnnnnnnnnnnnnnnnnnnnnnnnnnnnncttttttttttttttttggtttcaagattgttttggaaagtgtaatttaggattttagtttcattgttgtaatgatttattgttttctcaaatctcaatcaaagaaggcaattttagctttgacaataataaacaaacacaagaaagtgcgtctctctatgccttatggttcttagccatctcgtccacgtccaatccacggccaggataggagaatcttgtcccattgcagtttggctgttcgaacaggtccgtgatcgacggctgttctcagacagtatatagctcttccaacaatgtctgctgttgaaactggaccaaatgttctactatcatatgcttccttagctttgagctcctggtttccagctgttacccaacactgattcttctcaagaacaaaaggctcctctttttcatcacccgataccatttcgaatccttctacagctgctaatcttcttaccagatacttatctgaatcgtttggatcctttaagacgacagcatctccaatgaatacaaccctggtattagcaattggtatcttacgaataagaagtgtgttttcatttgctgtcatggttggtgacatttctggtcctttatccgagtgtaagtaggttattttcccatagaacagattcttgcagattatttgaataagttcccggtcactcagtttattactcctatgactcttgagactgagagtgagggaatactcgagcttgtgagccatgtatcggaaccaagtcgagattgaagccatgaccaaaacccttaaaatgaatttcgcttttaaaaaataaatgctagagggtttcgaagctggcttctccgctttgtcggtcttctccgcctcgtcgccgccgtggtcgataggaacagaacagcaacaacacaaccctatgggtttggtttggtttttgcggacgcgtgggcggacgcgtgggtcgacccgggaattccggaccggtacctgcaggcgtaccgagctttccctatagtagtcgattagtgctgnnnnnngcat

SEQ ID NO: 133379 - DNA, 773 bp, Arabidopsis thaliana
aggtaatttattttagggtgccacaatagaaaagctatgacgtcgcaggcacgcgtacgtaagcttggatcctctagagcgcccgccctttttttttttttttttttcaaaccccaaatgcataaagtctttacgtggtttgtgaaaatagccttagtttgcattgaaaaatcgactaatttcctagaaagaggaccaacatagaacaacgaaacggccccaaaatcagaaacaatcgtatgaagacaaaagtagtgtgcgtatacataagtcgaaagaccatgtcagaatcgggcacatccggttcttattccgcttcatcagtgagatttctggataccaatgaggcgggcataatccacccataataaggaacccaagaatgtgttgcctgttctaactgcaaagcacaacgcactgagtgcaagtttgtgttggtgtagcattggctccaggagacgttgttcaatcacaccagccactatttggtaccttaggttgctagaaactgccatgtagacaccatatgcaacacttgtggagactatcggaacagtttcgacttcaccttcagaattctggtccacagcttttcgtgcttttatgaatgcatttgtaatagcagtaccaaccagcgatgatgtggtgccaacggcaaacagcttagctccattgcgcgttatagcacctagcctttgcaagagagtcggacgcgtgggtcgacccgggaattccggaccggtaccttgagggtaccagctttcccttagtga

SEQ ID NO: 133380 - DNA, 659 bp, Arabidopsis thaliana
  unsure (1)..(659): unsure at all n locations
taggtacnnnnnnnnnnnnnnnnnnnnnnnnnnnnnnnnnnnnnnnnnnnnnnnnnnnnnnnnnnnnnnnnnnnctttgttttttttttttttttttttttttttgggcatgcgaaataatttattgataatccgcaccgacttaatatacatatataaaaattggtcaaaaaccctaatcaagctttagaaaactctcacactcaatagtaatgaggaaaacatttcacatgacaactacttcaagcaaaaatctctagaataattaaaccaaagccttgcatgcaaaaaccacaaactaaaacatatcgattatcaggttcttaattacttactcaatacattaatcagaaaaataaacaagatgaaatccgtagaatattagaatttagaaataaataaaaatatatgaaaaagaagcaatgcaaaaaaaacacgcttgttaagaacaaacaaacaaacgaaaggacaaaaaaagaaaaataaatctcacagaatatatttgtttgggtatgtttgcctaggaatgatgactggtgcttccatcttcttgatgggtgagatgatgatctccgtcacggttttgctggttgttggtatggttccccgtctccgccaccgggcggaaagcaacattcaacgcccgttaaactccataa

SEQ ID NO: 133381 - DNA, 547 bp, Arabidopsis thaliana
  unsure (1)..(547): unsure at all n locations
nnnnnnnnnnnnnatagnaagactttgacgtcgcatgcacgcgtacgtaagctgggatcctctagagcggccgcccttnngggggttggcctttttttttttttttttttctttttttttttttttttcttctggggcctggaaaatatttcatattcagctgcaaatcttacaattttgaattcatcagaaaaatgaaggaattctaaattccaacaatttttttttcctggagatgtcagtcggcttttcctttgcctttaccatctgaaaccttatcaaaatcatatgctgatggtagcaaaaaagggctctgattcttctgaataaacttgaggaagtctgataatgtttgttgcatgcgactccatgtttcttccatgtttacatatgaaaaaagatctggcaacttgacaaaaagacggagcaaatgctcggcgcaataaacagttgaaggggaagtatcatccacgattgattcttgggattgccgcctctctttcttatataggagcatcactggcaatgccttggcgaaataactcct

SEQ ID NO: 133382 - DNA, 629 bp, Arabidopsis thaliana
  unsure (1)..(629): unsure at all n locations
ctatagnaagattatgacgtcgcatgcacgcgtacgtaagcttggatcctctagagcggccgccctttggtgttttttttttttttttgtttttttatgggaaatagaaacactcctttattctgtgaattttatttagccatagatgatgactagtagtaggatacagttatacatatacatgttgtataatttttgtaatcactgcacaaagccatataagaaaaaagaggccagctctggctctatcttcaaagcaaagccagagaaagatatagacaaacgaatcaaacagcttgcttctgtcctgaaaactcggaatcagaagaagcttttcatggtcttttaaccaaagagattccgttaggatcaccacctaactcttcgaacacaactataaggttttgagacttaagccatgaacgaggtacatggtaccatctttgtgaagcttcaccacaattacttaagcatttcctttgcgtcgaaagttccagcgtagttacaacgtccacaagatccttgagctttatatgcaggccaatgacggcccatatttctaccggttatccaacctgtcctttcccatggggtcaggctaagccatggncattcngctgggagaacgg

SEQ ID NO: 133383 - DNA, 939 bp, Arabidopsis thaliana
  unsure (1)..(939): unsure at all n locations
cgattnnnaaaaaaaagnnnnnnnnnnnnnnnnnnnnnnnnnnnnnnnnnnnnnnnnnnnnnnnnnnnnnnnnnnnnnnnnnctttttttgtttttcttgtttctgacaataatttgatttaatgaaattatttgataattattaacaacataacctaaaacttaaccaatgaacaattagaataatctaaaaccctatacaatgaaatgttaaagacaagtttatgttattcccctttttgtacaagcttccaagtcttatgaacataaaaagcaaacgcaaattttcttgcgtttttgtttccttgatgtcaaacgtagtttcttaccaaccaaaccacataagtcagctagctagctgagatcgatatccactttttccggtacacacctttctttttggttcttaccaagctctgttccaagctgaccctgatcgcctgcaccaaacgcgaatagcttccccgattccgtgagcgcaaatgtatgagcgttccagtatatggagttcgttagacttatctggaccatccgctcgttcacttgttttagcgatgttactaccgttggacttagcacgtttgcatgtcgattaccctgttcatcaaaggatggatggtgaccgagactagcggattcgccgcagccaaacgagtaaacatcaccatcgtctgagaccacaaaagtagtgtagtctcctgttgcgacatgaactgctttgacatggcttagaccttcaccaaccttagggactgattcacactcctcgtgaccgtgtcctaaacatccatatcttccccaaccccaagtgcacactcttccatcctgacctaccaccgcggcatgccaagcacccgctgcaactaccctaggttgaagattcaatatctgaaactgctcgatgacccgaggatacatctcatctgttcttcggacgcg

SEQ ID NO: 133384 - DNA, 470 bp, Arabidopsis thaliana
  unsure (1)..(470): unsure at all n locations
gacaataatttgatttaatgaaattatttgataattattaacaacataacctaaaacttaaccaatgaacaattagaataatctaaaaccctatacaatgaaatgttaaagacaagtttatgttattcccctttttgtacaagcttccaagtcttatgaacataaaaagcaaacgcaaatttcgtgcgtttttgtttccttgatgtcaaacgtagtttcttgccaaccaaaccacataagtcagcaagctagctgagatcgatatccactttttccgggacacacctttctttttgggtcttaccaagctctggttccaagctggaccctgatcgcctgcaccaaacgcgaatagcttccccgattccgtgagcgcaaatgtatgagcgtcccacttagggggtcgtagatcttccggccancgcccgtcactggtttagggggtacaacgtggctagacgttgatgcgt

SEQ ID NO: 133385 - DNA, 768 bp, Arabidopsis thaliana
  unsure (1)..(768): unsure at all n locations
nnnnnnnnnnnnnnnnnnnnnnnnnnnnnnnnnnnnnnnnnnnnnnnnnnnnnnnnnnnnnnnnnnnnncttggttttttatctctttttcttataatctcttttctttttggggtggagaaaacaccaattcttccttgggctcatatgaaagaacaaaaaaaatcgggcaacaatatgactccttggagtacacaagggaagttgagactagattctttcatgtacatattttatcaaagaggctgagaaacgataaacagagacccatataactcaaatgatttctacataggctcagttttaagtcagcttaaaacaggagcaattcttcagggcttgatctcaagttttaatgtcatccaatatatggtgattgcttatcttactaatgtttcatcaattgctcatcttgctagtgttccatcaagcttgggtttgacgtggtttaaacaatttctttcttagagcatcaatcgaccgcactttctcatctctcttttcacaaaagcactctccacaccagctggagaaatccttgtgatgagttttgagctctctaaatacagaacttctgcaccatagaagcatattgacccgatgcccgcatggtgtggctctggcaccatggcggtggcggccacggtgaaananagcttgtccaggnatatggcataatcanatgttcacngccttggtgcgggtcaanggtttcaaccgggccccgnaaaagnccnccaaatggtaccaanaaatcagggactcgnt

SEQ ID NO: 133386 - DNA, 582 bp, Arabidopsis thaliana
  unsure (1)..(582): unsure at all n locations
cgnnnnnnnnnnnnnnnnnnnnnnnnnnnnnnnnnnnnnnnnnnnnnnnnnnnnnnnnnnnnnnnnnnnnnnnnnnnnnnncttttttggtttttttaaaatcaacctgttgcagattatattgttacaactagatgcgtcttggagaatgcataaaagaaaaaagtcaaaaaaccgaattgttcatgagtaatcatagagcgatacactcttgtcatcagagacactagcaagtcgaccagcccggacaccggttccacctggtggtctaaaggccacagaccaaacctggtcattgtggttgctcattgtctgaatcgcagctctcattttaagatcccatagcctcacagttctatcgcttgagccggttgctatggctccaccgtctgggctagcatcaacgctcagcacccaactcgtgtgccctgacatggaccccaacagcgttttcccttctgcatcgtgcatgttcacatgcccatcatctgatccagagaagaggactctcggggtctacaggggggaacacaagggaccttacaggcatatttgtgacctctagctgggaagnagctttat

SEQ ID NO: 133387 - DNA, 982 bp, Arabidopsis thaliana
ctatgtacgtcgcatgcacgcgtacgtaagcttggatcctctagagcggccgcccttttttttttttttttttttttttttatacaaaagatgcaaactattatataattcatcacaaaaactaaaattccatgaaacaaaaacattaacccataatcaaagaaacaaacactacaacgtgtaaagtttctgcttggtagagactagagagagtcagagaagagacaagttcttaagaaaaggcagtggagatagagagcattgttgggcgagcttgtggatcagaatgtaaacacaaaagtgcaactttcaaaatctctaagacctcctctttaatctccggtgtcggttccggtagccggtggtcggaaatgcttttcagtgacagagttgcatcgggaggtgaggatgaaagagttgaaactagatctcctggatgctctcctttgatcacttcaagtgttagaactccaaagctatacacatcgcatttctcagtcactttcatcgcataagctagttctggagcaacatagccgtaagtaccaacaacggcggaccaatttgaagaatccggtttaagaagcttcgcagtaccataatcagagatcttcgcttcataatcctcgccgagaagaatattcccactactaatatcacggtgaacaatccccggagaccgatcatgatgcatataagacaaagcatgagccacacctttcacaacgttgatcctcttcccccaatctaacttcttcgcttcatcatcattctccaaaactttcctcaagcttcctctctccatgtactcgtaaaccagaaacgtgttgcggcgatgcgagcagaatccgaagagtttcacgacgttccggtgacggatctcggttagtgctccgatttcgttgtatagaaactcttgttttgttgatggatttcagattgataagtctgttggttcggggacgggtgggtctaaacggaa

SEQ ID NO: 133388 - DNA, 932 bp, Arabidopsis thaliana
  unsure (1)..(932): unsure at all n locations
cgattaaannnnnnnnnnnnnnnnnnnnnnnnnnnnnnnnnnnnnnnnnnnnnnnnnnnnnnnnnnnnnnnnnnnnnnnnnctttttttgtttttttgtaaattttacatttatttaaaagctgaaccaaatccaaacttaaaacattatttttttctttctagaaattagactaggaatttcattacctacaaaaattttggtttttatttggttataatataatgaattctagttgtttacttaatttgcaacaaaattttggttaaaaactgaaccaaatccaacccatagtcaaaaaaaacttcaaaccgaaacaaaacattttggtttttatttggttaaaatttaacccgaataaaccaaatctaaccataatttcaacccgacccgaccataaccgggtcaaatccacaaccaatttatccaacgggtcaaaaagcgtacctggagcaacatagccgtaagtaccagcaacggcggaccaatttgaagaatccggtttaagaagcttcgcagtaccaaaatcagagatcttcgcttcataatcctcgccgagaagaatattcccactactaatatcacggtgaacaatcgccggagaccgatcatgatgcatataagacaaagcatgagccacacctttcacaacgttgatcctctttccccaatctaacttcttcgcttcatcatcattctccaaaactttcctcaagcttcctctctccatgtactcgtaaaccagaaacgtgttgcggcgatgcgagcagaatccgaagagtttcacgacgttccggtgacggatctcggttagtgctctgatttcgttgagaaactcttgttttgttgatggatttgagattgatgagtctgttgtttcgcggacgcgtgggtcgacccgggaattccggaccggtacctgcaggcgtacc

SEQ ID NO: 133389 - DNA, 561 bp, Arabidopsis thaliana
  unsure (1)..(561): unsure at all n locations
cgattnnnnnnnnnnnnnnnnnnnnnnnnnnnnnnnnnnnnnnnnnnnnnnnnnnnnnnnnnnnnnnnnnnnnnnnnnnnncttttttgggtttttttttttttgagaagggaagagattatgaaactttagtactaaattggaaaagttgcagataacaagaaaagctaaaggcttcaaaggaagatagttacacattttagatagtgtctacttttaacttattacactttcactacatgctcgctacttctgatgccaaacttgagatgatttctgagcttcagaagaaggctctactcccgtagaaaacacgggagctagcactctttggcgtctgctgggaggagcttgagttctctgattgggttgggctatcgatgtccaaaggaagtttcatcttagccagtgactcagtgaattgctgcaagttttttgtgtacatgtcaacaatatcttgttgcactaccttttgctctggttaaatggtaactgtcagaaccggtttcacactgcttcttcatcaatcttatttaatcaccacttttgatgatattctgt

SEQ ID NO: 133390 - DNA, 559 bp, Arabidopsis thaliana
  unsure (1)..(559): unsure at all n locations
nnngacgtcgcacgcacgcgtacgtaagcttggatcctctagagcggtcgcccttttttttttttctttaacaggaaaggttttcttatgtgagcatatcatatggtttctctgaaaatgttcaactgcagatatatatcatcaaatacagacagacacagtacaaaatccggctgggccaggaacataactgcggatattctatacctaaaccaatgatggggggcaaaagctcttttaagatgatttttttagattgatcaaacctttttggttttcactattgaagaagttgggaacaatcctgtggtgtgacaggataagagtaaagcttctagcttctgtggagtggcgcagcacgtaaatcaactggctgatagctcactcgatccttgtgaggtaaaagctcctcatcatcagggtttatctggaatggcttcacaaaatcctcaaacattaacggagaaagatccttcattttctcttccacttccaatccagtaatccttgatttttctaataactcccggggtaagccaacgggccgttgcccangatt

SEQ ID NO: 133391 - DNA, 540 bp, Arabidopsis thaliana
  unsure (1)..(540): unsure at all n locations
aggggannnnnnnnnnnnnnnnnnnnnnnnnnnnnnnnnnnnnnnnnnnnnnnnnnnnnnnnnnnnnnnnnctttttttgtgtttttttttttttttttgggaagaaaagtaaattcaatttagtgctaaaccttactacatttattttgaaatcaaaattgactttggtacaatagtagatgagaaaaacttaactagacaaattatcggggtcacggataatcttcttggaaggaagaacaattgctgccactggtttatccgggaatccaccgccttcatcgatgatcaatctcataccatcgatgtgaagttttccatggtgcccgctaacaacaacagtatgtttatcatccagctcctgtgggatgtcccaaacgtttttcctaccacttagatgttgtatttttgagatgctagtgtcttttagctctcaaaagcttcagttgttcttctacgttattccctttctctaaaccagcatgtacggcgatcaacttacaatgcttaagcccttcctctgtttctatacaaacatc

SEQ ID NO: 133392 - DNA, 557 bp, Arabidopsis thaliana
  unsure (1)..(557): unsure at all n locations
nnnnnnnnnnnnnnnnnnnnnnnnnnnnnnnnnnnnnnnnnnnnnnnnnnnnnnnnnnnnnnnnnnnnnnnnnnnnncttttttttttttttttaataaaccttaccgtttttattgtctttttaccgtaagaaaaaaacaactcaaacgaacagagaaaaaatggagaattaattatgttttgtttttaaaagacgggagagacaagaaagctgttgggaattgggatgagctattttgtgccctttcactatttctcactcttatccattagtgggccataatcaaggcccacatactagtggatcaatatattaagcccagcacgttatcgatctcacgtgagagaaggcgacagattgatgatccttctcctccaccacccaaagctgagcctctttgtataacacatgtcgactagaaaggtcgagaagcttcttccatcattttcttcactcttgtcaacttctctatttctttcagaatctccaaagcaatgtcttcagaagttactgcttccaagtcttcaaattctagctttgtagctattttttcaa

SEQ ID NO: 133393 - DNA, 700 bp, Arabidopsis thaliana
  unsure (1)..(700): unsure at all n locations
gattaaaannnnnnnnnnnnnnnnnnnnnnnnnnnnnnnnnnnnnnnnnnnnnnnnnnnnnnnnnnnnnnnnncttttttctttttttgtttttttcaaacgaaaagttatataaactcgatagtagataaacaatgtgtatcacaacaacatagcttaaagtagttcctaccattagagcagtagagaggaaaacaaaggaccttataatcattcttttatataatattccaatttgttgctaatgcctcgcagattcttgagatacagtaggctgcgctcaatggatactctgaaaccgacacaaattcatcgatatagttgcagtctattttcccgtgtgccattgcgcctaccacaaaaactgtgtctctatcatcatcacatacagtagctaggtgtttctgcatattgacgagtttctcagagctatgcgagaagcctattctgtgggagttaaccggtagatgatgttcttcgatagggttcttgacacaccgtagaagcttctcacggctgttaactgcagtaatgctcagcttttgtagcagttgcaacatgattccggcaaatcgtttgaaagttcttggtatacgaacatgtggcttaacttcaaaaaggacacctttttctgttctaacataaacagctttcaacctcccagctttattaaccggactatccaaaatcataagaagcg

SEQ ID NO: 133394 - DNA, 531 bp, Arabidopsis thaliana
  unsure (1)..(531): unsure at all n locations
nnnnnnnnnnnnnnnnnnnnnnnnnnnnnnnnnnnnnnnnnnnnnnnnnnnnnnnnnnnnnnnnnnnnnnnnnnntcctttttttttttttttgactttaaaatttctgatttttctttagggctaatatacgtataataagaccatacgagatgcaaaatgttaataggtaagtctgaaaatgtaaaatacatagaaagacgaatataggacctcttaaatcttacaaaacatttgaaaccaatcagtcaaaaaaccaaccatgtcgttttggcaatcttctttgtacaccgtctttgctctcacagcccttaaaaaaagcgtctttcttctctttacacaagggtgaaggcagatcgtactgtggattggaaccgagatgcgattgtctgagaagcacactgctgaaattggtacttagcatatatattgcactttgcgaagccgatgatattagccacattgagggacaggctatcgccaacaacatgcagatagtgaagcttgaaatctaatcatagataatacccc

SEQ ID NO: 133395 - DNA, 691 bp, Arabidopsis thaliana
  unsure (1)..(691): unsure at all n locations
nnnnnnnnnnnnnnnnnnnnnnnnnnnnnnnnnnnnnnnnnnnnnnnnnnnnnnnnnnnnnnnnnnnnnnnnnnctttttttgtttttttaacttttaaccaagattttctttcaaaaacttctgatacatcattttcaagtttgtaagaatttagcatgcaaatacaataagttaactaagtttaaaggaaaaactaaaggaaaacaagaagtatttagccaacaacaacaccttgatgaagaaattacataatacagatagaattgacagacaaggccccgaatataagagggaactacagaattattttctcttttcgtatttttgattctctttgaaggggaaatttccccaaagagcaatttaaagttacaagaaagccgctaaaccctattaagtgaaattggatgcatattaagaaagaaagaaaaaagtgatggatcagaaggagaatggacttaagagagactcgtcaagttctttaaaacctgcgtatacaccatccgtcttgttcggtggcagagctagtctcctaacctctgtcatatacctgtttgcagcgtttgcaatcttatcacgtgccccttggttaagagcagctttgttctctagcgcaaacgagccgcctagtatcagagaagacctggtnggactcgaccccattctgtctgacaatacagacattgccc

SEQ ID NO: 133396 - DNA, 590 bp, Arabidopsis thaliana
  unsure (1)..(590): unsure at all n locations
tatagaagagcttgacgtcgcatgcacgcgtacgtaagcttggatcctctagagcggccgnccttttttggttttttttagatgtgattttgttatcttatttctcagtaatactagtgccgcactcaaaccctaaactctatatccatccattgcgacaaatcccaagggatgtgagcattgtcaacaatccatcgattaaatacatccttacagtccatgtttctcttgcagtgatactttatcgattaaatactacaacttacgctccatgttcgaattgtttttcagtggcagcttctgattcttggtgattatccagattttcttttcgctcttcttggatttcagcttttgctgcatcaactgcgccttctgtcgttgcttctggaatcctcagttctggtttcttcttcttcctcgaagatctacttggtttatcatccgatggtgtaccaagtaaaagatggctatacttcgtcactacccgttctttctcatcaagcattcccaaaagctcataagcatcagccacggtctgcacaatgtgcttgtccggagncttanggtcataactctccagatccttg

SEQ ID NO: 133397 - DNA, 519 bp, Arabidopsis thaliana
  unsure (1)..(519): unsure at all n locations
atagaagagctttgacgtcgcatgcacgcgtacgtaagcttggatcctctagagcggctgnccttttttgttttttttttcatttgacttgttatttagctcttacattttatgaaagaacatatacactttcttgtctgtaatttatatccactaattttgcgaatacaaagatttacaagaatacaaagatttacaactagactaattgtatagtctagtggttagcgaatatccaaggattggatagcgagtttggctgcaattgaggagatgttctcctttatgagtcccattgagagttctaatctctctatggtatctttcatatccattgcttttattttctcttgttgtaaccttgatagttccgacttcgtcgatccggagatgggttgaaatgctgaaaatgatagacgttcttggagagaaggtacgaatgattcgtcaaagtcgaccggcggctcattttcagcccagtttagagagttaatgaaacgagtttgtaccggcgagtct

SEQ ID NO: 133398 - DNA, 532 bp, Arabidopsis thaliana
aggtgacctatagaagactttgacgtcgcatgcacgcgtacgtaagcttggatcctctagagcggcctgccctttttgtgttttttttttagtctgaatgatttatgaacataaaagagaaaagttacgtcgcacaaatctgtaaaataagcgtgtggatctaaacaatgacaaggagacttttgactttttgttgttgttggtctccttattttagaatggaacagctttgtgaatctttctacagcccaaaccggtgaagaatctgaccggtattctcccaattgttttattttcctcaggctttcttttgtttcttcttctggggccgaggtggcgggaagatagaacggaaaagcaatgcagcagatattgctcctacgaaagaactgatccagtagacgtagatatggtcccatgtgttgtgggagctgtacttgtatgcccatccaaacgcaatggcaggattcatggctggtccagtgtatttagatcccgcgacaacaaatgagatggttgcaagagcaaagca

SEQ ID NO: 133399 - DNA, 546 bp, Arabidopsis thaliana
  unsure (1)..(546): unsure at all n locations
nnnnnnnnnnnnnnnnnnnnnnnnnnnnnnnnnnnnnnnnnnnnnnnnnnnnnnnnnnnnnnnnnnnnnntccttttttttgtttttttttttgggcttaactagactttctcaattgacactttgaagaagttctgaacttacaagtttcttacattcaaaaacattaataaagaactcaaagtgtttgaactatataatctcaaaatagtaataatccgttcatatataccatattatccttcatattaaattgtatgcatttatttaactgttgacccacttcaagcaaagatccgctttgacaggcttttgatcagaaccatatacttggtctatggaatcataagagtgaagagttgcttgaatattatcagtatcttggatcttgaataagatcctatctgtccaagctggaaccctgatcttatggcttgtatcatagtcgctgcttcctacattgtacttgtaggttggtttaaaccctaaagttccttcagagtaacctttgaatatttcgcctctctccgcttcttgcaagagttg

SEQ ID NO: 133400 - DNA, 610 bp, Arabidopsis thaliana
  unsure (1)..(610): unsure at all n locations
nnnnnnnnnnnnnnnnnnnnnnnnnnnnnnnnnnnnnnnnnnnnnnnnnnnnnnnnnnnnnnnnnnnnnctttttttgtttttttttttttagacgctctatctttcttaacaacaaaacaaaagatacatatttatattacaccaacaaagatcatagacgacaacaacaacaacttatgatctttctttttcactagtacaacaaacagagaccagaattttcccggtcaccagatcctaaaccccttcaaagaggttgttgaagagtgaccaccaagggacttgtcacattccgtttcccatctgaccaaactatatgaccagtctccacatttgtcgctcctggtgacaacttcacctctgtggtcttaaccctaacaacaaaactcagtttctgccccacccgtctgaacgatagcttctccggctcaaccgtcaccgtagtccctctaggcggcctaatcttaatctcggaaaccggatccgattcgcctacatttgtcacagtcctaatgaaatgggtcggcaattttactcccccaaatggngaancggcaggaacgnggggggggttnaatcccggggggcccggnngtttgacggaagcg

SEQ ID NO: 133401 - DNA, 549 bp, Arabidopsis thaliana
  unsure (1)..(549): unsure at all n locations
nnnnnnnnnnnnnnnnnnnnnnnnnnnnnnnnnnnnnnnnnnnnnnnnnnnnnnnnnnnnnnnnnnnnntctttttttgtttttttgaaaatactattattatagattatcttttcgagttttggtctacatacactgcaaattttaactttaaatacacgtaagatcaataggtttagattctttcttatcctttactaaaaagatattaaaacaaggttacaacaacaacaatcaacatagaagaagaatcatctcatcaccacccttagttggagaagagagagtgaggaagaactttgtaagggttgagaattccctttgggtccagcaactttttaatggaagccattaatgcaacagtttcgggtgatttgctgtagaagatttcattagctttcattacacctaatccatgttccgcactgatgctttcacggtgctttgatgtccactcatagacataaagctctatcnaaacctaaagcttatcgttatattccgcggctgagatgtttaaatgtagatttccgtctccaaggtgacctt

SEQ ID NO: 133402 - DNA, 542 bp, Arabidopsis thaliana
  unsure (1)..(542): unsure at all n locations
nnnnnnnnnnntatagaagagcttgacgtcgcatgcacgcgtacgtaagctgggatcctttagagcggccgcccttttttgttttttttaaccgttcaactggaatccattacatcagatcaccaacagcaacaaaacacaaaatttgaaaagccgtcaagttcttacatgatccatgcctactccgatagaaaaatggaaaagaaaaaaaagatcttccatttgtttagccttagagtacgtacatgcagcaaaagcatagtttctcttctgaaacttcttctctcactcaagcttgaatcttacgacgctgtctcagtcttccaccaatactactttgggtttggttcagcagacatctttcgcttgcttcttgtttctcggttctctttgtttgcagagttagccatcctctcagtttcactgcactgagcctcaagatcgatgatcacaggagttgctggatccacctctttcacatctaatggcttgagatcaccatcagtcactgaagtttggttgttcccagacgacaagaagca

SEQ ID NO: 133403 - DNA, 675 bp, Arabidopsis thaliana
atagaagagcttgacgtcgcatgcacgcgtacgtaagcttggatcctctagagcggccgcccttttttgtttttttttttataccaacccagccttatttataccaattcgatctcatctcattttgttaccaacacatctcaagtacactacaatacaagtcatcttcttaaccagacaagaatcaaataagaaataacagtttcaaattaagtgcgttctaacactctattctatcttcagttttccgggcttttctggtgtggaagaaaatgtttaattgatcaacgaaaagcagattcctcacctcctccaattgtttccggcttctctccatttccaaatccaatttctcgaaatgaacaatcctatctcggatcttcttcatctcaacttcaacagtctctttgattgctccttctacctcatgctcttccttttcaattaaagactttgcatctgcccaagctctttcagattcgtttctagtggtttcaccactcgatgcagcattggcatcttgtcgatttgggtctctactggcgtttttgtcagccttgtagtctacatcaaataaagctctcactggccgtcgagctggttgttctgcacatttggggccgccaaagctgaaagaaaaacaacctgagccattattgggttgcttgcatctgc

SEQ ID NO: 133404 - DNA, 510 bp, Arabidopsis thaliana
tacgactcactatagggaaagctggcccgcctgcaggtaccggtccggaattcccgggtcgacccacgcgtgcgcttctccggcgaagttgcgttagttaaacagagagtcatggccatgaaagctcccgatcccggcggatctggggaaattctcccgagcactccctctctttccgaaactacgtctggaggcgccgcagcagcttctaagtcggctcaattgccgtcttcttcttccgatatcgataatattcacgtacctagctactccagttggttttcatggaccgacattaacgattgcgaggtccggtcactgccggaatttttcgattcgagatcttcatccaaaaaccctaagttttatctctacttgaggaactcgattattaagcagtacagagacgaccatcctcggaagattagtttcactgacgttcggaggactctccggtcagtgatggtggcctctatttcggcgcggctttgattcctcaatcatggggac

SEQ ID NO: 133405 - DNA, 550 bp, Arabidopsis thaliana
  unsure (1)..(550): unsure at all n locations
gattaannnnnnnnnntatagaagactttgacgtcgcatgcacgcgtacgtaagcttggatcctctagagcggccgtccttttttgtgtttttttataacacaacgtaaccaaaattttatatgtacaccttaaacagtactgttacaaactccagtacaccataaagagacattgaaacacgaacaccaacaacacacaagtaacacataggcaaagtgcgtgaaagaccttatttaccatttacacacgtaaataacaatttctagaacagagcttttttttagctcatttttattagactgagactttgagaaaatattaaaaacttcacttgaaaatgggcttgacatggactccaacttggtgaattatgtctgcacccgctttgccatggaacccgacgaccttggtggccatcttctttgagtaggacgcttttggcactttcaagtccaaaaggcggagaggttcgttggttcgtcgtgaatctaagcatcgctacaatttcaccagcgaggaaacagtgtaccttattaggctgagtgata

SEQ ID NO: 133406 - DNA, 541 bp, Arabidopsis thaliana
  unsure (1)..(541): unsure at all n locations
nnttaggtgacctatagnnagactttgacgtcgcatgcacgcgtacgtaagcttggatcctctagagcggccgccctttttttttttttttctcttttaaccacgattttctttcagtatcttcagatcctttctgattcaagtttgtacgaatttagcatgcaattactctacgtcaactaaaagccaacgataagctagaggaaaacatgaaggatttagccgacaacatcaccttgatgaataactggcatcatacagatataatggacagacaaggccctcgattatatgacggatctacagaattattttctcttctggggggcgggattctccctgaaggggaactgtccccatggagcacttgacagttacgagaaagcccctaaaccctattaagtgaacctggatgcatactacgacacaaagaaaggagtgatggatctgaacgacgatggtctgaagagagactcgtccagcacttgagagcctgcgtatacaccagccgtcttgtactgtggcagagctagtctgctag

SEQ ID NO: 133407 - DNA, 669 bp, Arabidopsis thaliana
  unsure (1)..(669): unsure at all n locations
nnnnnnnnnnnnnnnnnnnnnnnnnnnnnnnnnnnnnnnnnnnnnnnnnnnnnnnnnnnnnnnnnnnnnnnnnnnnnnnnnnnnnnnnnnnnnnnnnnnnnnnnnnnnnnnnnnnnnnnnnnnccagaaaactctttattatgtcttggtgctctcaatcgcattggtataacatatatatatacaacctagattatgtttcacctaatttgaataaataaatattctaaataggaaatatatatatacttattcatggttatctatttcttattcaaattaggaaaaacatattctaaattgcatatatatacattggatcaatgctcttgagatcaacaagacataagaaagagttttcccccaaactcttctctagtttctacatcttatgagtcaagaatatctgagaattaactttgtaggttaactccttctggtcaggtcgaaatcctctaatacgtagctgttggtctccatcgggttctttggaaatctgctgatttgcaactttaatatcatcttcatctgaaaagatttttggaaccaattccacttctccggggatccctgatgagttaagttttggggaanagtggattggagcttaatctcgggtgggctggnngctctgaaggccaatgattgggagctaggtggtcccgggac

SEQ ID NO: 133408 - DNA, 426 bp, Arabidopsis thaliana
  unsure (1)..(426): unsure at all n locations
atttnnnnnnnnnnnnnnnnnnnnnnnnnnnnnnnnnnnnnnnnnnnnnnnnnnnnnnnnnnnnnnnnnnnnnnnnnnnnctttgtttttttttttgattatgaactagaatgtactattacattgcctactactactagaataagggttcttacaataacgttgcttatgccttatgttatggaaacaatgataggctaataggatctggaacattacaaagatacaaagaatttttccatagcttaaccaaattgtttttgattcactgatttgggttgagagaaggaaatgctggaatagaccgtagtatcagctttccggccattacctcttctccttaggattgaccctgactccgaggaagccgggttgaggggggagagactctctttgctggttggaagagatgggccttggatgtta

SEQ ID NO: 133409 - DNA, 816 bp, Arabidopsis thaliana
  unsure (1)..(816): unsure at all n locations
atttannnnnnnnnnnnnnnnnnnnnnnnnnnnnnnnnnnnnnnnnnnnnnnnnnnnnnnnnnnnnnnnnnnnnnnntcctttgttttttttttttttttttgaagcatgacagacaaatttacattacagaagaagccgtgaaagttctctaaaccagaaactgaaattgtatacaactcacatgaagaaaccagcttcataattttttttgtaaaacactcaaagagacttgtattcaaaagttgtcctcaaatcatattcatacaacatctaaagagaaaggaaaggagggttaccagtggactcggatttccatggttttacaaatcaagcttctcggtgtatagacagaggagaaggtggagtcagagcaacatcgcttttaacctcttctttctctctaggtgtctgtacatttgggctatgtgcctctttccaaaacctgctcgggctaggagaactagctccacttatgttcttaggggagctcccgagaccaaaccgaggatcaaacacaccgtcttcacgaggcaaaggtgataccaaattcggagataccatattcttctcttcttttctttggcagaatttgtcttccactatctcataagagtttgcagtcctaacttcttgtgctaaagagcaccaacaacaacataaccagagcgcacaatcagcaatcgcggctctaccgaaacagaaattattaactcggtaatttgaatcttcctcatctgaattctccagaatccaccatagagcanaccaacacacaaagaaagattccagatatccctaacgcctccctgaccgt

SEQ ID NO: 133410 - DNA, 862 bp, Arabidopsis thaliana
  unsure (1)..(862): unsure at all n locations
ttaggaacnnnnnnnnnnnnnnnnnnnnnnnnnnnnnnnnnnnnnnnnnnnnnnnnnnnnnnnnnnnnnnnnnntcctttttttttttttttttaagaaaaaaacttgcctattaattaatgagattaccaacaacgtagcgttgaacagtttcagatttgaccaatgaacccctgttccctcttaatagcatcaaatctccaagaattggtttaaaattaaagaattctgagtttgttttcatgcagtagagttgtttggagagcaaaagtctgagaggacatgccaaacccattgcagaaatcgctgcatggttacctgtcaaagatcaaaaaagagacagggaagctgcaactgtcttcctcacattcattctcatcctcaaagaattgggtgcttggtaagcatcccaagaagctctccttctccttcaagcacagacgacgcagcagcaagaccagattcagcaaagaagaacccgtttaccaccaggactctgctcacgccgccaccttgtccgacattgatcgttttcttgaggaaaacttcaaatccctctgcatcagagacgaccaggaggatgatcagcatcaagcccgggtgaccaaaaacatggagaaaagggagtcatcatcagacgacagtgatgatgatgatgatgacgacgactatcgtcacagattcgagaggacatggngacatgccgtctacgactccncgaaatcagccccggatttgctgagaacagagaggctatctcctccgnctggatcttcggagggcaggcctagcatggananncacgtcacatcgtcggagaggcaatcgagatccacccttgtgctgccggaaactgctcgcg

SEQ ID NO: 133411 - DNA, 795 bp, Arabidopsis thaliana
  unsure (1)..(795): unsure at all n locations
nnnnnnnnnnnnnnnnnnnnnnnnnnnnnnnnnnnnnnnnnnnnnnnnnnnnnnnnnnnnnnnnnnnnnnnnnnnctttttttttttttttacctcatgaagaacaacttcaaaaaaacacggacattatcatcatcacaaacgtgtaaaccaggctttctttttaaaccctggaaacaacacctcggatattttttttaaacattcaaccacacataacttagatgatcgaagataattacccatcgatgcattgaaacccttgacaaatccaaagccagattccaaagagaacaaggcagatacagagatcaaacatcaaaacaatccaaacatgtttcctccatatctgctttgccttttgtctatgatgatgatcatgaatcaaaccattcctcactcctttacctcctcctcctaggtccatcttcttctcattccaatgaccttcacttttcgcttacgtctgcaatctcttcttggtcttcaacaccctcaacggctttcctaaaagcgggatcaacgcaccgccttttcgtccctgggacgaatcccaactctgatattactctaatctccctcgctatactcctcggtgtccaaactccaattcaatcctattaaattacaccatagcagcaatctcacaaaactggatcagctttattgagacaggttagtcgattatcacgatccgagtaatccgctccatanaacttgagctgattcatcattgatagcatacaactcgttcgtacacctattaaatccgaatcaaacatcatcagataagga

SEQ ID NO: 133412 - DNA, 561 bp, Arabidopsis thaliana
  unsure (1)..(561): unsure at all n locations
annnnnnnnnnnnnnnnnnnnnnnnnnnnnnnnnnnnnnnnnnnnnnnnnnnnnnnnnnnnnnnnnnnnnnnnncttttttttttttttttagtctgatacagatgtactttgttcattcaaataatggtctacaaaaagtaatttaaagaatacaagttttgaagagttgttcatttcctctttctctgtttcaagcagcaacaaaaattgcactttgtatagctattacattgcattttctgacaaacctatttcacaaagatataaatatgaatgctacggcaagctaataattttacagatttctttgaagtgatcatggaagggactgtttgcaaaacttttttcaacgactagtttgctgcgaggctgtataaatttgtcgagatagcaataatgctagtggcaacagcaagaacaagcattattgcagctacgatcttctctcttgaggttgatacaccatggatattccttagaacaatggcggctggaaatatgaatgctatggacgacgtcccggtgggccgccctggnagtncaggccnggnccntcant

SEQ ID NO: 133413 - DNA, 548 bp, Arabidopsis thaliana
cgttagctatcatatcaccttctaaccccccccgatattattaggtcgacctatagagatctatgacgtcgcatgcacgcgtacgtaagcttggatcctctagagcggccgccctttttttttttttttttttttatatgtaacctaaacattcaacacaaaaattgtacagcacatttcaaaccatattaagcttaccaactctcactaatgaaaactacaaaagtttaaccaacggatctctacaatgaattattactctgaccaaaacttcacaaaggctgtcacgaaagatttcagaactgccaagagaggatttgtttcttgtcttcccatattagattcccctttcctcgattcaggtttaattctgtttaatgttgcattgctttctttttgagagctggaactatctggagcatcaattttccctttttccatgggtgccttcttctctacacttgcgacttcattcccggcatagctactcacagggtccacttttgctctgtcgtcttacgacttcccgactaagggctaaatgaggg

SEQ ID NO: 133414 - DNA, 402 bp, Arabidopsis thaliana
tttaggacacactatagaagattctatgacgtcgcatgcacgcgtacgtaagcttggatcctctagagcgtgccgccctttttttttttttttttgtgtgaacttttttttcttttaaatcttaaatatttgttactgataataaagaataaatttagccgggggttctccttattttaatgcaaataaaaatcaactacatccggcaaaacaaaagaaattaaaactcttgtgtttcacaatacatatcatcaatacaatccaaaatcattaccatcctcttcttcttcctcgtcctcttcatagaatttctcgccggtttgaaaatctgtcttcatgtcctttgattctacattgccttcttcttcatcctcttcatcttcatgttcattttcaccattc

SEQ ID NO: 133415 - DNA, 587 bp, Arabidopsis thaliana
  unsure (1)..(587): unsure at all n locations
tttaggacacacttagagatctatgacgtcactgcacgcgtacgtaagcttggatcctctagagctgncgcccttttttttttttttttttttttgaataacaatttttttactccaagcaaagaagaaagatagaaagaaagaaagaagtcaaaggttttgggacaagatgaagttaggaaagtgagtaaacgaacaagcattgtttttttctttatacaaaagatccgatctttctcggagaaatttcagtgattagattcaaactaaattcccaaaagaagttgaaagaagatgaaagagagagaagggtcgtcgatgtctggtctacttgtttgttagtagagctttattcttgtctggattggtgcacggcaaatcggacacatttgaagatctggtccacactcgcaacaagtctgatggccacaaccaaaggccatgtctttcgggttgctcaaacaaatcggacatagctggttatcagaagcagagcttgtagggggtgggacgggactagaccttacgtgatagccttcagttggatgaggaggaacactcggtttgaaacttggaagacgtgaagg

SEQ ID NO: 133416 - DNA, 543 bp, Arabidopsis thaliana
  unsure (1)..(543): unsure at all n locations
nnnnnnnnnnnnnnnnnnnnnnnnnnnnnnnnnnnnnnnnnnnnnnnnnnnnnnnnnnnnnnnnnnnnnnnnnnnnctttttttttttttttgatcaagaattgaaccaagcccaaatagaaccaatgtagaagattacaagaaagaattttgttcatgtaaaggatctagaagctacacctttggaacatacaattacaataaaacaatgggattatacaatgtatgaggttgcttttttctatcttccaattgtctatgattaacatccgacggagcaaagtgtttgtcttttctcttggtagaggcatttacatgtaatcactggtcgtgtcggcactaccagcacgttgcgatggatcaactccgacagttctcttgctcatgttagctctctgcactaacacaactagagcctgcacaacttcagacattggtggtctaaactccggctccggctggacacagagagcgataacatctgcaaatcgagaaagggatttgacaggataaagccctttaagagctggatcaaccattttg

SEQ ID NO: 133417 - DNA, 502 bp, Arabidopsis thaliana
  unsure (1)..(502): unsure at all n locations
nnnnnnnnnnnnnnnnnnnnnnnnnnnnnnnnnnnnnnnnnnnnnnnnnnnnnnnnnnnnnnnnnncttttttttttttttttttttggcctaaaaaaagttttccttcacatacaatgattcaagtactctacaaaatatttcaactttccaactccaaaaaaccagctatagcctatagtagaagaagaaaggtgagtttgagacgtaaataacaaaatcaatcgaagtcaagatttgttgtttcttcattttttccagacacgaattgtaccatcgaccgaagaagtcaacatacagtcttccttcgggtggtaactcacgcttgtcaccactaaatcgtgagctctaaatttcgatagcacttttgcatctaccaaatcccaaaagaaaaccaatccatcctctgatcctccaatcacatgtgcatccgaattcgtgaggcaacaatccgttttaaatgacttggaaatatgacctttatagacttggagtagctctc

SEQ ID NO: 133418 - DNA, 512 bp, Arabidopsis thaliana
  unsure (1)..(512): unsure at all n locations
nnnnnnnnnnnnnnnnnnnnnnnnnnnnnnnnnnnnnnnnnnnnnnnnnnnnnnnnnnnnnnnnnnnnnnnnnnnnnnnnnnnnnnnnnnnnnnnnnnnnnnnnnnnnnnnnnnnnnaaggtaataataatagatttataaacagcattttaatatactgatatattaaacatgagtttacaaagctaaacattaatggcaacaatttggaattccaataatcctgaagtcctcaagggtgggcaaatattttttgttcctttcaggttttgcttgaattagagtaaagaaaaaacacattttatgccatcttaatcaatcttttaggtaaacattgaaaaaaacgaaccagagctctccgttgaagccaccataattgaactttctggggaagccgttgaagcctccgtaaatgaactttccggggaagccgtctccgttgaagaagacaccttaatcgaactttccggagaagctgtccccgtgtaagccatgctaattgaactttccgg

SEQ ID NO: 133419 - DNA, 658 bp, Arabidopsis thaliana
  unsure (1)..(658): unsure at all n locations
nnnnnnnnnnnnnnnnnnnnnnnnnnnnnnnnnnnnnnnnnnnnnnnnnnnnnnnnnnnnnnnnnnnnnnnnnnnnnnnnnnnnnnnnnnnnnnnnnnnnnnnnnnnnnnnnnnnnaaggattaataacgttacccttatttatccgaattaactatagtacatacgtaattgcttacgtaacgttataggcgattattccatggggggatttgacccaaaaaaaaaaaaaaaaagataatggcgtgaaaagctcgttgaaagtaaaatattaaggcgttaataagtgttgatttatagaatattctctccttcaaatgggcttaacgacgctataacccccgtcaacagccagattctgaccgctaacgtaagccgaatcatccgaagccagaaacaaagccgcctttgccacatggcgagccttaagcaccacacctttgagaatccccgtggctgcgctatattcctccaccatcctcaccgtttcctcgtcacggctatttatcgccgtcgccaccgcgtatggtgcaacgccgttgactctaatcccgtacttccctagcccgccacaagccgatttaaccagcccgagaagagcgtgcttagacgccgtgtacgcgtgaggtcctggaccaccgatctccgacgcgacgctg

SEQ ID NO: 133420 - DNA, 511 bp, Arabidopsis thaliana
  unsure (1)..(511): unsure at all n locations
nnnnnnnnnnnnnnnnnnnnnnnnnnnnnnnnnnnnnnnnnnnnnnnnnnnnnnnnnnnnnnnnnnnnnnnnnnnnctttttttttttttttacgaataggtttggtttatgtccaaactttttaacattattcgtcatcaagaactttcttattagaaggaaaaaaactttaattcgaaacaagtgaaaattacaaaacccaaaacaatgatgataatacagctacgtaaccacagcgagtttctccatacagtgttatcgctctcttgacttcaaagagtattgtccatacaaaacttacacattgtcattacgcctgtttattgaacgagtatctgtttgggtgttgagggttcctctgctttatttttccgttgttcactaggggattgcttgctactagtactgctctcaaacagcttgctgctctttgcgattgtaaggataagctcgagatggtttcgctgttgttcctgcatagcaaagcaacaaccagctttcatgagctca

SEQ ID NO: 133421 - DNA, 648 bp, Arabidopsis thaliana
agcatgacctcgtacgcacgcctgcatcctttaaagcggccgccctttatttttttctcggtttttaccattttaacccacagataaaaaattacaatgtcacatttgaagcaaagaacaatgaaggaagaagattgcattcatctacttctgcgaaagcattgtctcaagaaaaaaataagagatgagccaacaacaatgcaaagataaagcaaatttcatatgtttgatgcactcaaagccataactttgcattgttcattcaaagctagaagctgagcctctttcttgtcgagaagtgctgtcaatttcacattctcctccatcagtttctgtacttcaacctccttttgtgccttctccccttctaattgtgtcggcttagtgaccaaccgttcaaagagctcctcaatggttttgaattgtctctcggacgaaagaagtgtttctcgaacattggtaaaagtactgacgtagcttttaagcgactcgaactctctctcaacgcgacacaactcctcttcgttttccacagctttttccctctgcctcatcgtctcttcaactaattcctcaatcctttcccgcatttcgtttagaacactattagtcccataagcaaatcgttccatctcttctaacttcacg

SEQ ID NO: 133422 - DNA, 558 bp, Arabidopsis thaliana
cctttccaaaataccccccaccccgctataattgaggtcgacctatagaagttctatgacgtcgcatgcacgcgtacgtaagcttggatcctctagagcggccgccctttgttttttttttttttttttttttttttggcacaccaaaatcttgatatactcttcaatcatataatgaaaaaaaaacatatatcattacagaaaactcaactcttaagaggttacaaaataggataaattgaaccaaaaccggaccccataaagaaaacaaaaaaatgatcaaatattattgattcatgcatgacacatacattctttacatcttgggtaacggtaaacgctgcgtccattaggtctagcgaatacatgtttcgtctgtctaatcgcttttcttactcttttctcaaacacgttccactcaatcgtactgttcttcaacaatatgtccgaaagtctccgtttgttcggtcttatcggcggcaatttccctcctccgtaataaatccgataacccgatacaagagatgataactgactccctgaatccgtcatcgcaaa

SEQ ID NO: 133423 - DNA, 607 bp, Arabidopsis thaliana
  unsure (1)..(607): unsure at all n locations
caacgaacacttgatctccctcttctccccccccccggtattttattgaggacacactatagnagatctatgacgtcgcatgcacgcgtacgtaagcttggatccatctagagcggccgcccttttttttttttttttagaaagataaaactaatctttaattcatcttacaaaagagcagaagtccacaaaaaaattgcgggtttaggtccttttgtttttagaggttactggagacagaagaaagactttttaagtacctgaaaatccttacaaaagcataaaaatctctcgttcattcatcagtgccctcagcattaccagacttgagatgaagatgcttctctcgcttttggaaatctgtcaaacctttcccacttccagtcacacccacttttccaaatggatcctcaggtgatttaaatatactctctttcttcctccctgtgaagaaccctacctttttagttttggctttagtcggctgaaactgttgccaatcattctgtttcttgttctgcacaacctcgagttgctcaaaccttgccttggatttgaaagcatgtatcttcttacgcttagctatttttacatcctcgggatcatt

SEQ ID NO: 133424 - DNA, 528 bp, Arabidopsis thaliana
  unsure (1)..(528): unsure at all n locations
ncttagaagatctatgacgtcgcatgcacgcgtacgtaagcttggatcctctagagcggccgcttttttttttttttttttttttttttttttcatgccaatggagggaacaaaactgttcttccagacgttaccaaaacaggtgtcttgtacactttccgcggtcaagaatcatggcaggctagtcccaaatctcttttacatccgttcattactacaatctattaataacatggataaatacatatatgttcttcactctattgcctgttacagcctatgactggaattggtggcgaaaagtgtaaacgatgcggaatctatgagcaaggcagcctcgtttcagacaaagagttcgatgtatgggaagttcgtcccactgatttctctgctagccaagtttatatgcattttaaagaaaaggagattaatgctacttttgtctgccacggttgcgccaagttccactccggtgagtaataactaatttccttatttctgtttcctgaagatgaacttggacttgac

SEQ ID NO: 133425 - DNA, 515 bp, Arabidopsis thaliana
  unsure (1)..(515): unsure at all n locations
gcccccagaccggaattatatgggtctacnnnnnnnnnnnnnnnnnnnnnnnnnnnnnnnnnnnnnnnnnnnnnnnnnnnnnnnnnnnnnnnttttttttttttttttttttttttttttttgagataatgaaaacgctgtagcgacttatgattcacatttgaacattattgtacctgattttgagttttatgacagtaacaccaacaagatgaagatgtaaaaaggaaaatacatccaattatcgttgagttgagtttagttccttagtccctctttttgttgcatttgagatatctatttctttcacctcaggtggaaaatgaagcttatcctcccaatctatccatgaatcatcattatcatcatcatcttcgccttcttctttgacattaccgaatgtgaatcctagatcaatgacttcgggtttttcaactggttcttcggttagaaatagcgagaagttggagaaaatgcttttacctgttgactcaccaaatttgttgcagcctggt

SEQ ID NO: 133426 - DNA, 602 bp, Arabidopsis thaliana
  unsure (1)..(602): unsure at all n locations
atttagctgacactcatattaaagctatgacgtcgcatgcacgcgtacgtaagcttggatcctctagagcgggcgcgctgtggtttttttttttttttttttttttttgttcaattgtccaacatatacaacaatttatttaatacattggtggggtttgggacaagaaaaccattcagatatgctacgatgacataataaacagaaagcaaaatagatatgctcaaagtgcattaagtttatgacatgtcaatcaaataaatgcagcaagggaatccacaagactcagaagaaaaccgtctgagccatacttagctaccaatgataccgaaaccggaagattttcgtgtagccccaatggtatgctcacctggacggaatccagaaacgcctgcgatcgacaacaagctgaaggctctgctgcggaaagattcaagtgcagccacattagcttggagatgcggtggaggacctggtaccgttggaatcccaacacccttttccccgggaaatttaaaagccggttanttnagttttcggggcgggantnggggnttccccgggggttttnangcccccaatnngnngtttncgggaaactg

SEQ ID NO: 133427 - DNA, 681 bp, Arabidopsis thaliana
aggtctattgcccaacagaatcaaccctctatttaatacattgttgggggggtggcttttaaaccattcagatatgctaccatgacataataaacagaaagcaaaatagatatgctcaaagtgcattaagtttatgacatgtcaatcaaataaatgcagcaagggaatccacatgactcagaagaaaaccgtctgagccatacttagctaccaatgataccgaaaccggaagattttcgtgtagccccaatggtatgctcacctgacagaatccagaaacgcctgctatcgacaacaagctgaaggctctgctgcggaaagattcaagtgcagccacattagcttggagatgcggtggaggacctggtaccgttggaatcgccaacacacccttctccccgagcaaagttgaaagagccgttatcagttcagatttcacggaccggcaatggtcgatcttctcgtcggatgttctgatagcttcctcaattcgttctgatattccaggaccaaactctggcttcaccgtcgagatccatgcaccgtggtttatcttgaattcatgtctttgtaacaatctcattgaactcgatagggccatgatagacgcaatgcagaactcttgttgtgtagtgacatagacacaagtcatgaaaagtttaaggcttaaaacattctgtc

SEQ ID NO: 133428 - DNA, 508 bp, Arabidopsis thaliana
  unsure (1)..(508): unsure at all n locations
tttaggacgnnnnnnnnnnnnnnnnnnnnnnnnnnnnnnnnnnnnnnnnnnnnnnnnnnnnnnnnnnnnnnnnntttngttttttttttttttttttttttttaatggaaccatggaaatagtagagcttggaacattctcagacatatatcataagaattttattcttcttctgaaggcaaaaaggaaatttagtaatacaatagttcagccgttggtagatcacagaagtcattgatacactcataaaagcttgtgaatacgaaccaaccttcaagttgcttcatttgggatccgaagtccgaaccccctgggcgcttaaagaattctctgaatccgtagggactcatatcataattggtaaggtacaactttcactgaataccgagtgatatttggatcctgtccttttccttcattaccggcatgttgggggctatggaatattacaaggaagggatttcattttttttggggagttatgccaaatccgggatccttggaacac

SEQ ID NO: 133429 - DNA, 498 bp, Arabidopsis thaliana
  unsure (1)..(498): unsure at all n locations
ggnaaggtttcagnnncccgggaatggaaactggtcctggttttttattataaattctcaaccatgggcattggacacatcacccgtgaaccttaataataggccccatgagcaaacataggcccaatttaatccccaaaaacccggaaagaaaacacacatgaagacggtctaaaatataattttcttcccattgtacatactattatttaaagatgattctttcggtagcaactgaatcttaaacatttcaagatccactataccaccaaaatcaaatcaatagaactcgaaaaacacgagcctgatgccgatatatgacttgccgttttgtctcctccttgcttctcatggccaagctaaacaaactgttggggagattttccaaactgaggttcctctgtctcttccttaaatggctttgtctgcattttttctgccggtttcattcccttgaagattttttttatgaattatttggttcaaggttttgaattt

SEQ ID NO: 133430 - DNA, 513 bp, Arabidopsis thaliana
  unsure (1)..(513): unsure at all n locations
nnnnnnnnnnnnnnnnnnnnnnnnnnnnnnnnnnnnnnnnnnnnnnnnnnnnnnnnnnnnnnnnnnnnnnnncaagaacgttttaatttgctcttctcattacataaggtgagaaacaattatttttgggaggcctcaaagctccatttttgaattacaagaacaaaaattaattgaaaaaataatagtaatttacaagacaaattttgccttaatatatagtacttgatgcagaacaaattttttaccaatcgagtttaatattcctttcaatgtaaagcttgtcaatatattctatgataggtcgcgatgcttccatgtacctcctcatgttcttctcaaccgattgatcagtttcattgagccgtaagagaagttgatccctcgtcggaagtgtatacattccggcgtaaaccgcggttctaacggcccacgtatggaacggtgcacacacttccgtgtaagccgttgtcgcagcgtctttcaacgaatagtcatctgcgatcaaaaatt

SEQ ID NO: 133431 - DNA, 514 bp, Arabidopsis thaliana
  unsure (1)..(514): unsure at all n locations
atttaggacgcactatangagatctatgacgtcgcatgcacgcgtacgtaagcttggatcctctagagcggccgcttttttttttttttttttttttttttccatggttaaacattgagattaaaagcctcaattatttcaaacaatcgaggtctacatctcgcacaattgttcatatattggatctagaactatacatgatcaaacattgatatcaattactagtgtttttttctttcatatttgaatttgctataatcagcgaccaagctctcaataaccctatgcttcatgttatccaccaaaccggccaaaatcgcattggccatgtttctcctaacatcttctggtacaagcgcgagaactgaaggaagcacgaagctaatggtcgtttctagtcgacctttgagcctcgtgtgccttccacgccggtctgggtataatgctccttttactccaagagtgaaatcagttggttccattactcggccaagcccttgaagctcccatttcg

SEQ ID NO: 133432 - DNA, 524 bp, Arabidopsis thaliana
  unsure (1)..(524): unsure at all n locations
nnnnnnnnnnnnnnnnnnnnnnnnnnnnnnnnnnnnnnnnnnnnnnnnnnnnnnnnnnnnnnnnnnnnnnnnctttttttgtttttttggtttgtaaatttcttcccacaaaaaaaagtgtctttgtacatagttctttcgattttaaataaaaccgttgttgttggttccacaaaacactataaagcggcgtatataataatatacataagattgaaagagggtccaacctgagaaacctaagcaagacaaatatttcatgaaactaacacaagcttacgcatcggataagtctcttggtcgccaatctctaggtggaaccgtggaatggactggctttcgtggttgtctgtctgaaaattgtttccgaggctcttaccacccaagaagatctgacttctccctcttcttcccaagaaactcttacgagtcactaaaatggagattcgagtggttcatcccaaacatctgcactcccattcgagacttcctccacatcttcctccattgacaacctcacatac

SEQ ID NO: 133433 - DNA, 683 bp, Arabidopsis thaliana
  unsure (1)..(683): unsure at all n locations
cgaatttttttaggaacnnnnnnnnnnnnnnnttgacgtcncatgcacgcgtacgtaagcttggatcctctagagcggctgcccttttgtttttttttttttgaaaagaaaagattagtgaaatggtatattaacttgtataggtgcaaaaccacttatggtaataacaaacttttttctgtatgagaggaggttttaatcaaatctcaataacaaccctcgtaaaacagtcactaactgatttattcgtttagaattgctgcaaaaataaaaccttcttcaatttgtctttaaaatgcatcaagccatgtcttcttttgagctcgccaaaaccgattaagcaaccacacagaatctgctgccacggcgttcccatcttggttccgattccagctgaagtaagcatgagttctgtttttaatctctagcaacccgtgcccaaagctagcttctcgaaacgcggagtattttggttgtggctgcatcatgtcggtaagcaagccttccgagtttccgccatccccgattgtgatgtatataggagctgactcatccgatattggctcacacaatccattgacaatgttgtaagcaatattagaaacacgttccgatctctcataggcatgaacatgacctgcaacacaacatcaaccttgtatttgacaaaccattgttcgtac

SEQ ID NO: 133434 - DNA, 493 bp, Arabidopsis thaliana
  unsure (1)..(493): unsure at all n locations
gcgtacgtaagcttggatcctctagagcggctgctttnnttgggggtagggcgnttnncccttttaacagtataaattggatttcttgatttatgtattctgcaaccaaataaaccaaaaggtaacacaaagaaggcataatcaaatcaaacaactctctactagtctaatcacagaatctgatgctttctttttctttccataaaaaacacaggcaacaaaagagatgtggatgaaggaatgttacaaaacagaagaggttttattcactttcaggtgaagagtcctgatcaagattcgttcccacaacaggaaccgggtctggcgcacgcccatgaaccctgaaccggtagaatgccggggtgccagcccgcctcccggcggaagccggggcccgccggcgcgccggactaggcagggcgcggttgggcttcaggacggcgcgtaccaggagaccgccgcgccacgccgtagccggggcccgccgggcgcc

SEQ ID NO: 133435 - DNA, 523 bp, Arabidopsis thaliana
  unsure (1)..(523): unsure at all n locations
nnnnnnnnnnnnatagaaagactttgacgtcgcatgcacgcgtacgtaagcttggatcctctagagcggccgccttttcgttctttttgttgttttattactaaagatggaacacgacgaagtacccaaggttccacttctattccaaaatatgaaataacatgtttacatataaattataaatatcagagtgagtccaataattggttctgattgagataagctgtataatctaaaacctcagacaaacacaatttatttgactttaaaccatcaaagtatcctaaaggaccaacaaatctaaacaaaaactaaacttatcttggaaaaaagcaaataaagccacacaaataaaattcccaagtctcagagaacagagtcatagccattgatctaatgtacaacacccaaaagaagagaagattgattgtttgggctaagaaaacagaaagagcgtaaccaaccccggaggagagagtttcagataaccttctttttttagaaaaacggttgtaggggaaag

SEQ ID NO: 133436 - DNA, 526 bp, Arabidopsis thaliana
agctctctacgactcactatagggaaagctggcacgcctgcaggtaccggtccggaattcccgggtcgacccacgcgtccgcccacgcgtccgtacggctgcgagaagacgacagaagggggagcccaaacaaaaacaaattgtgagagatggcggtggccaaacttcacggcggaggtatggcggcgatgcgtcttcttctacttccttccccgatgacgcaccggcgaccatcaacgcttccgagcactgcctctttatctccacggagatacattgtcgcgttggcggccaagagaagccctaagcgtctcaaatactctactcctcgtttcaccaaggagggggaattggtgtacatcgaggtcgatccttgtggtgttgattcctggaaactccaacctgtcattgaccttctcaaacaaggagcttgttggtgttattcccactgataccccatatgccattgcttgtgattgtaaaaacccttccgctgttgagcgtcttcgaaggattaaaaagattg

SEQ ID NO: 133437 - DNA, 423 bp, Arabidopsis thaliana
ggataacacttttctttccatattgatgtttgacatacagaagtctaaaccaaaaaagctcaactaccatataatatatccatcaggaggacattccaaattctgctacataacctcagaggggtttttcacaacaatataaacgtaatgcgtttcaaaagagccaattcacactaatgttaccaagccagatcaaaagaggaaactgggctaaagcaacaaagatcaagagatagtgatgcctgcttgagtcataactcctagattctgcaaagagaactcgcttcattggcttcactaagaataccccagtgcataagcaggtccacggaatcaaaacatagtaagagtatccccagattatcttgccaagaacagctagacaaaggcctgtgaaagtatagcctgcatatgccacaatat

SEQ ID NO: 133438 - DNA, 546 bp, Arabidopsis thaliana
  unsure (1)..(546): unsure at all n locations
nnnnnnnnnnnnnnnnnnnnnnnnnnnnnnnnnnnnnnnnnnnnnnnnnnnnnnnnnnnnnnnnnnnnnnnnnnnnnnnnnnnnnnnnnngtcaatggtagaggttgctgccatttgaatttaactcatatctcttatattttacattagctttcatcttacttctgctatggaatttctaaatagaatctatatatatgaagattatgaactaaactcttccatgaagctgtttagatcgttgaaggaagaccctccttcttccacggcagctttagccatcgccgctagcttctttgcccgtctccgcctctcctctgctgcttccccagccaaaacctccctcaccgctttatccactttctctctgctaatgaaatctcccatcataactttcatatgcttgctcgctcccacgctcactcctgttctgagcacttgcgtaaccaatttctcattgtagaattgctccgctcctacaggccatgtcaccattggtagccctgcagccactccttcaagaagcgagttccagccgcaatgggt

SEQ ID NO: 133439 - DNA, 516 bp, Arabidopsis thaliana
  unsure (1)..(516): unsure at all n locations
nnnnnnnnnnnnnnnnnnnnnnnnnnnnnnnnnnnnnnnnnnnnnnnnnnnnnnnnnnnnnnnnnnnnnnnnncttgggtttttcttttttttttttttttcaagatattttgaaattccttcaaaaaaaaaccaactgtacattttcattaacacaaattacaaactaaataaagccgaataccgattaaaaacataaaaaaggaaaatgaaacacacttaaaaagagtttaaacaaccttctttcaaaaaaaaacctactaaaccggaccaaagcacaaaccgtactaagagggattaaagtaaattaacaaccaaatctcatcgcttaataacatttatgaaaagacaaatttaccccttataccggtaccctaaattaaccgccgtgaatcagaaaactctcatagattgagtagatccggcggactttgaacaccagacttgggcgaaagctcattttccggcgctgattccgcattcggctgatccttcgacggtggcaacttgggaatc

SEQ ID NO: 133440 - DNA, 533 bp, Arabidopsis thaliana
  unsure (1)..(533): unsure at all n locations
ttaggacannnnnnnnnnnnnnnnnnnnnnnnnnnnnnnnnnnnnnnnnnnnnnnnnnnnnnnnnnnnnnnnnnctttttttttttttttctaaacgtttctcattcttgttatcattatgtgtaacaacaaaacacataatagtttaatacaacttaaactccaaagagttatatatgaatatctcaacaacaaaatactaaatcggccagttttaattaattacatgaccccaacgaagtcacctactatcatctctgtaacactaaagttcactgaaaattatctacaaacttcatcttcgtttacatgaaaaaatcattttcagatctcatcaaggtcactgtctacatcatcatcatcattcggcctctcgaagttcatcataaacctcagtgagtctccttcctctacttcccattgcttcttcagcgcattgatcgctctcgaagcagctgctgcaatcgccgggttactgtcttcagcgagtctctgaaatgctcccattcctgcatttcctagtgtccacatgg

SEQ ID NO: 133441 - DNA, 637 bp, Arabidopsis thaliana
  unsure (1)..(637): unsure at all n locations
gctatgacgtcgcatgcacgcgtacgtaagcttggatcctctagagcggccgccctttntttttttttttttttttttttagactacaacttacttttataaactttgttaattgtcataaaaataaacatagatccgagtaaatatagatatcaggtacaatgaaaatcaacaaccctttgaaatagaatagatccatacactcttactttgacaaaatagaataggcacacacttatttgactatgattttgttaattttgaaatcacatttatagtcttcaattatgttgtaaacaacctaaactttcacaatttcgtccaacaatattttgaaattctctaaagagcttcctttcatggagaaatcttcttggagtttttctttaagcttcttggcattagccttcatcgtcttaccatcatcatgaacaaaaacatcattcaaacacttctcaaatccttctttcgtgaagactccattatccatcatcactccaaccttccacacaacctccactgctcttccgttgagcctattatccgccaaaatcggtctgccgatcattggtacacctgccgacacactctccaacactgagttccatccacaatgtgtcacattcacacccattgc

SEQ ID NO: 133442 - DNA, 509 bp, Arabidopsis thaliana
ctatagaagagttatgacgtcgcacgcacgcgtacgtaagcttggatcctctagagcggtcgcccttttttttttttttttttttttgtaatattcgaatattaatatccatacttaaagattcacatcaccatgaaaagccgaacccattcaagatcataaaaggaaaaagaatgctcattgcattgtctacacacaatcatgacgcaacctaaaaaccctcttaggatcgtttcaacaaatcgggggcgcatccacaaaaataaaagcgaatacactgaacatgtcataaaagaagtaagcacctttacctacaaaggctctctctctttctacaaaagagttccttttctctctaaacgttatgaaacttaaaccggcttggttcagaaatcagaaccaacgcatgcatgttcctggctggtttttgctaaaagatcctttacttggtgttacattgatcctatccgcattatctgctgcccatttgccaaaatccggaagaagaa

SEQ ID NO: 133443 - DNA, 814 bp, Arabidopsis thaliana
acactatagagatctatgacgtcgcatgcacgcgtacgtaagcttggatcctctagagcggccgccctttttttttttttttcttaattaacagtagtagcataaataattccatcaacagataaaagattacaaaatttaaaaagacaaataaaaaatgtcctttcccaaccaaataaaaaaacaaaaaataaaagacaatgagagaagttctttgacttgctctatattttggctcaactatacttgtgtgtttcttggccaatctctgtctccatctttagaaaggactaaagaaagagaatttttgagaaaccaaacctatgaatcatgggaaagtgaaagatcctccgatttgagtggaaccagcaggtggattaatggcaacccaaagcagagatatggtgatggcaacaagtccagaccagacatatacaatggtcggagtccttcctcttcttcccataagccctttagcgaatggataaagatgagccagtacccagaaactgaagaacactcctccaatcaacttactccactgcggaatcacactgtatatcgtcctgctaaacccgaccgcgatggcgattaggttcaccatcatgattgtgattggtgggatcatgagggatgtccatttcacaatgtagagatccgcaaattcgtcgtctacatcctctcctccggatttagatgtcaatgtgaatgagatttcgattccggcaacaactttgagcagcccttggataaccgcggctaagtgagcgcttgttcctccaatgagccagaactgctcgtttcgccaccattc

SEQ ID NO: 133444 - DNA, 545 bp, Arabidopsis thaliana
  unsure (1)..(545): unsure at all n locations
nnnnnnnnnnnnnnnnnnnnnnnnnnnnnnnnnnnnnnnnnnnnnnnnnnnnnnnnnnnnnnnnnncttttttttttttttttgaaaaagacttgagatgtatttatatatttgtcaaaacttattcccctgaaacatgggaacccactccttccagagagaagaaaacgaaaaaaaaaaaaatctcgagtgaacaagattttgagtaaataatggtacattgcatggtacattgcaaagagagagggcttagcttattataagttaaaagatgatgaagaattaaatgagagcttgaacacccgctctcaacatctctctgagcctccaaatgggataaatcgcatcttcccctaactctgctgcatccacttgttgcatagcccagtcgtagtacactgggtgtattgtgtcctggcctccttctttgatttttccatcctgatcacggacgcagaagatttcttgcgtttggaacctgacgatgattactggagtagctcccatcatctttgtctcttgaatatcaacttcagatacatgca

SEQ ID NO: 133445 - DNA, 544 bp, Arabidopsis thaliana
ttaggacaactatagaagattatgacgtcgcctgcacgcgtacgtaagcttggatcctctagagcggccgcccttttttttttttttttttttttttttttttttttggatttccaacgacattactggaaaaatcaagatcaaggatgtaggaagtaaatgtcgttcttgttctaagatgatcagaaaacgattcacaattatatgttcaacgaaataaacggagatatggagtgaaacaaacacaactttcttctaccgacaacatcctctctcaggagacaactctcgcattctccgagtttcaaagcgcaggccattctttacggatgtcaaagctgtagttgatctccaagtagcacttattatcatcatcaagaaacttagttcttgcagaatatgatcctcgagcaaacatgccagaaggagtgggctcttctggcatcacgtggttgtatggctccaactgaggactaaaggttccaagcatttccttagctctgaccactttgacaccggtcttccaaactgtattggtgtacct

SEQ ID NO: 133446 - DNA, 659 bp, Arabidopsis thaliana
  unsure (1)..(659): unsure at all n locations
nnnnnnnnnnnnnnnnnnnnnnnnnnnnnnnnnnnnnnnnnnnnnnnnnnnnnnnnnnnnnnnnnnnnnnnnnnnnnnnnnnnnnnnnnnnnnnnnnnnnnnnnnnnnnnnnaaaaaaaagaaaaaagggggacctgcccatttattcatccacgctacatcaggtattaatacatgactatgaaactaataaattatttacattaaaaagaacatagtttattatggaattagccggccgcaaaggcaaattagttgaaaattaaaaggcctatttacattaaaaaggtacagatgacccatctcaccagaaggggcaccacccaacatagttttgacagagattctcatgggaaggggctggtctgattagctcttgaacctgaactttcacagacaaaccatgttcgacttcatgagaatctcctccgggcaggttattatgaccagcaaggggattgctcggaattgcagacgaagaataatcacgccctgtaagcttatgactcatacgtgccataacaactacggcacgctcatttaaaacttcattagcatctccaagcatatttacagcctgaagaatctacttctctcgagtactcctttgaggctgaggaagatctatatcagcgggatcttcatcttcttcgtcaggc

SEQ ID NO: 133447 - DNA, 509 bp, Arabidopsis thaliana
  unsure (1)..(509): unsure at all n locations
nnnnnnnnnnnnnnnnnnnnnnnnnnnnnnnnnnnnnnnnnnnnnnnnnnnnnnnnnnnnnnnnnnctttttttttttttttttttgaaggaaagcctgagtttttgttttatcagatgtgcgtccccttaagaggaacaaaagacaatgtaagttttgtttagataagcagagaaaacacacagattaaagatgtgtattaggtttttagaaatcccatccctgaagaaaaaacataattcaaaactaagttcttttaattaagtcatcttcttctttccttgcattgattccatctttcaactcaagttaattgtttcccccgaagctccatcaagggcctgtttcttttgcttgatcttcttgtctctgatgatcttctgccttgtctcatagaacttgcaatcatcaagtatacatgtcttgctcatataactccttgaagatctttatgatcttggtcccatgctccagattcaccttttgagtgtctctggtattagtgacag

SEQ ID NO: 133448 - DNA, 592 bp, Arabidopsis thaliana
  unsure (1)..(592): unsure at all n locations
tttaggacnnnnnnnnnnnnnnnnnnnnnnnnnnnnnnnnnnnnnnnnnnnnnnnnnnnnnnnnnnnnnnnnnnnnctttttttttttttttttaaattgcaattaagctgtcttctcataaaaatatcaaaagataaaacattttaaagtaaatttgtaaaattcagctcgtttctgtagtaaataggatattgagattaaatgcaaaataatgtaaaaatttgagtcttctgatatgactaagcaagaagaggtggagatcaacatgcttttatggtcatcagtcatccagttatgtatcacaccgaccttaaagcaccggcttgcaaagaatcttgcagagacgtgacagcgccgtcgtagtttaaaaaacccatgaaccaaaactcatgattgtctaccgaaatcacctgtatgtacttctctgcaggattgactatgctcgctgatggattcactgctttaagttgatgtaatggaattactaccttgtaatagctccattcggtttgatcaccgtttttataggagagagggttgtcactacagtaagcaagtttggcactggatatatatagaactcccataact

SEQ ID NO: 133449 - DNA, 506 bp, Arabidopsis thaliana
  unsure (1)..(506): unsure at all n locations
gggactnnnnnnnnnnnnnnnnnnnnnnnnnnnnnnnnnnnnnnnnnnnnnnnnnnnnnnnnnnnnnnnnnncttgtgtttttttttttttaagctttaagcaaaaagctcataaaatagttaccaatagccttttacatataagtggaagactggaagtattcagaaatacataagcaaaaccaaaacaaacctaacacaccaacaacaactagaccacatacaaaaaacatttacaagcaaaacacttttcaaacaaatactgttaactccaaatatcttccacaccagtttcttgatcaatgtgctcgaccaacagctttcttgtatttgtagcgttttgaaatccagaggtacactaagaagttgaggaaactgagagttgccaacaagtagaaaaagtaatcaatatggcctcggttcaagttatccggtatccaacccgggttacacgtcttcttcgttttcttcatcacaaccgggacaagaactgtgctcaaatagtt

SEQ ID NO: 133450 - DNA, 519 bp, Arabidopsis thaliana
  unsure (1)..(519): unsure at all n locations
nnnnnnnnnnnnnnnnnnnnnnnnnnnnnnnnnnnnnnnnnnnnnnnnnnnnnnnnnnnnnnnnnnctttttttttttttttaaaaccatattttttttttaattcagcagttgacattttgtaacaaagtttaatgtttcaatgggacatcaagtatcacttggtcaggatactcctttgcatttcctttaggattatcttcaaaccgtcggagactaatctgtttcatctcaactcctccacctccggcctccacctccatcgccatatccgccagtatcctccccaccgccggcgccatcttaaaaccatgaccggaaaacccgccgcctaccaccacatctctcccaaactcccctccaagaaaatcaatcacgaaatcctcgtccggtgtcatcgaatacatacaaagctgagtcgccacgggtccttcggaatcaaccatccctccaaatctctcctttatccactctttaagctcctctaacttcactcctggcccccatggcctcttatcc

SEQ ID NO: 133451 - DNA, 610 bp, Arabidopsis thaliana
actatagaagatctatgacgtcgcatgcacgcgtacgtaagcttggatcctctagagctgccgccctttttttttttttttaaggtatatttgatgaattgaccaaaacacaagtgtgtttaaaaatcttactgagtaacatacatatcctttcttttcttttcctgtgttttgacaggtttccagcatctctgtctgtctttacactagtaagtataattttttctatgagacttataatgttcaataattttatgatatttagagaattagtgacgtttatgatgatgttttggtggacgaagaaactcctccggttttctcaagatcccgttgtcttgctcgttccattttccgctttcgccattcttccaatgctttcaagctcgatgcatcgtttagcgcacggaaatccttcagtcgtttagagagatcaacggctgtagtctgcttcacatctttctgctgctcggtttcttgtcccgcagatgcctcttgttcgatttctcggacctatcattcatttcaagcggacgcgtgggtcgaaacgggaattccggaccggtacctgcaggcgtaccagtctttccctataaatgagtcgtatagt

SEQ ID NO: 133452 - DNA, 523 bp, Arabidopsis thaliana
  unsure (1)..(523): unsure at all n locations
ttaggacannnnnnnnnnnnnnnnnnnnnnnnnnnnnnnnnnnnnnnnnnnnnnnnnnnnnnnnnnnnnnnnnnctttttttttttttttttgtcaaatccacttatttacttttacttgagtgtcacaatgtctatctgtctgcgactatgcctgtaaaaattgatcaaatatctgaactattttctcaaaaatatgtcggattatatgattacatctgtcgaaatctcaaacacaaattgtaacactagaagccatccccgagagttctccatcatttactcttttccattcaccatctatcataaggcagcttctactttcctcttcatcattccacatcagattctcttctgctacagtttcagtttcctcatatgcatgttctatttccatctcagcttcttcctcgtatgattccaatgtcacatcatttgattcagaatctcctgcactcttccttgctcgcttgcatggcgatttctccaattgatttctattacactcagctcctctcttcgca

SEQ ID NO: 133453 - DNA, 587 bp, Arabidopsis thaliana
gacactatagaagatctatgacgtcacatgcacgcgtacgtaagcttggatcctctagagttggcgccctttgtttttttttttgagtgatttcttttgtgatttttttttgtaatgaaagaattgttattttacgacaatataaatgttatagagaaaaaaagtaacacagaagagagtttggttgcaaatgcttgtatgataatttaccttcatgaacaattcctggagctgccactgctattattattattgatgtcttcgatcatcattcctttcaaactcttggccaaccaaatagcggtttctcgaggcgaaactttgttcttcccaaacggctgcaacacaatggctagctcttcgagcctgctctgttccagcaaatccgcagatagttccaatagaccttcaagcgcttctgctctctgtctgaacgacttgatgtccaacgtctctttaacaggtggagtcggagttgtttcctcttcaggcacgaatgagttagttctggtctcagctggtgaagaatccgagcaggagttaaagctctttgtttctgagtaattggtgatggggtctggtttctt

SEQ ID NO: 133454 - DNA, 530 bp, Arabidopsis thaliana
  unsure (1)..(530): unsure at all n locations
nnnnnnnnnnnnnnnnnnnnnnnnnnnnnnnnnnnnnnnnnnnnnnnnnnnnnnnnnnnnnnnnnnnnnnnnnnnnnnnnnnnnnnnnnnnnnnnnnnnnnnnnnnnnnnnggaaaangagtaatcttgagaaagtgtgagctttgtttatttacaaaaaatcatctgtatatctttcatctacaaagtattattcatatgcgtttggcctaaatcaacgagcagaaagatcctgaagaattttctggcaaaaaaggaatattccggctagctctcagactgcaatgatacttgtataatcagagactggcgtgaggtgaagtcgcacctgatgagaggtcttggagccgaactatttactattctcggaatggatcaatcgattatcttctctccggttgaaaataggttccaaatgacggtcccaacgaggtaaagaccgaccgaaatcgtgaaaacgtcatcccaagaaccgtgttgtagtatgtgaccagtcgcagctgtgccaagaactccggcaagtactccag

SEQ ID NO: 133455 - DNA, 568 bp, Arabidopsis thaliana
tttttaataaaggtcctctgtcccaggcttattgcatccgcaaatccatgagtacaatcctttttgaacagagaacatcgaaagcttttcttgcgtttgtttttacaatcgtttgagaattaacaaaaatcattaacttatatagtttccaaaattcaaaagttcaaaacgcattacgaaatcgaccgaaaacaaaaatacaaatcgataaaacttaggtgcaagtttcacgggaaattccgagcctggaatttggaacgtcgatgagaactcggtggttctgttgctgcatactagcgatgacgttaaggacagagttaacgttgaccggagctgcagccatggcgagggaactgaggttacctgcggagcttgggatgagagggttgtctggaggcagagtcacgttcatttccggcgaacctaaacggcaccgacgggaacacgaccggaccccgaagtagattggggccaaacctcctagggaaagttgcgtttgggtttttaaacaggtttcctgagaccggtttttaaccgccaaggaagcctgggttgacatagccttggg

SEQ ID NO: 133456 - DNA, 522 bp, Arabidopsis thaliana
ttgacgtcgcatgcacgcgtacgtaagcttggatcctctagagcggccgcccttttttttttttttttatataatatatttatttgatttaatttatgaaccacacattttacatattagttggatattctacaaggacatgacttgattaatcaattaattaaatatacatcgaatcacattgctctctcctcttgatcttcacctttagcccaccagccatgtgagcggttagaagaggaacaaagaccggccggttattgcaaaccggtataatcttaaaccgactcaaaactgaaccaaccacgtatttcatttgtgtaaaagccatttcttttacctatgcaaacccttggtccggcttggaaaaccggaaacttgaacgaactcacacttttcaaaacccggtttgtaccggaactcggttcttcctcaaaccaccggtttggtttaaaactcgggccaaattttaacccaaaactttttcaatccttccataacggaaggggaaaaaagggactt

SEQ ID NO: 133457 - DNA, 523 bp, Arabidopsis thaliana
atagaagagctttgacgtcgcatgcacgcgtacgtaagcttggatcctctagagcggccgccctttttttttttttttgcttcttatgtttctttttactagtgcatgaatgcaatgtttgggtttaacttaactacaaaataagaagttgaaaggaagaaactaactttaaaacaccagagcacaggagctcaaaattccaatctgggggctacaacaagaccttaaggcatggtgtgtggagcaacaagacaaatacttcccacatcatatagcctaattgttctgtatttcttcacttatattcttgactaaaagagggatttctatcagatcctaaatcacatctaaccccaataatcaaggctgctacattccatctctatgtgatgtcgttctctagatatatcagatcacttacactgttttgatcggaaattctcagtggataataacgaagttaccagattcttgagccgtttagcgcctggaccaggacttgataacatgagggccaccaata

SEQ ID NO: 133458 - DNA, 549 bp, Arabidopsis thaliana
ctcgcccgccgggggagggccctacccacgccaacggaaataataggtgcaccttagaagatctatgacgtcgcatgcacgcgtacgtaagcttggatcctctagagcggccgccctttttttttttttttttcatgaaacttatctgatttttaaaattagtcattacattcaatcacgttaaaaacttataataattattttctattttcctcctctcatatatacaaaaagagaaagaggaaaaagacttctccaacaatggttgctaaagccaaggcagagaagtgatatatagtgtgacatattgagtgcagacaccgtacgagatgacgtagtcctccaagtgaactggagacaagctaagcacaaaccctaattaagactgaggctcctgagaggaagaagaagaagaacaccaaaggctgctgtatcttctctccaagcgtactgtttgacacagagacattatcctccacgctaaccatcgggaggctcacgagaaattcctgtgtccaaatgtgggaaaacctcggagacaaaaccatc

SEQ ID NO: 133459 - DNA, 510 bp, Arabidopsis thaliana
cttagaagatctatgacgtcgcatgcacgcgtacgtaagcttggatcctctagagcggccgcccttttttttttttttttagtgtctctgaaacattgaattcatttatggtttcatttaaatctttacaaaaagaactctgtaatttctgtagtttatgcagactatacagcaacaataaaaagaactctcaaaactcatttcaggtcacctattcgtttttgcatacgcatcaatcaaaagcttcttgaatctatggagatctaacctcactttctggtcgttcaggtatatcccctttgtgaattgccatcctttcttaccgatgctgcttggatcttttagaatcggatcatctttatcatatttttcatacaatgagctctctcttggaagaatcttattaaccagttgtaccctaagacccgagcttatttggccggttctgccataattagtcctttgctgccccacctcgttcctagtggtattgacctcgactaaacatac

SEQ ID NO: 133460 - DNA, 515 bp, Arabidopsis thaliana
  unsure (1)..(515): unsure at all n locations
nnnnnnnnnnnnnnnnnnnnnnnnnnctatgacgtcgcatgcacgcgtacgtaagcttggatcctctagagcggccgccctttgttttttttttttttgtccatgtttcacagaatctggccttaagcaattttatcatatttaagctacaaatccataaccgagtttaacaaagataaaataaccagaaagttacattgaaagataaaaagggaagaagacaaaattttgaggggggggagcgctaaatcgaaaacaaaagaaggcattggcaatagcattccgattttaaaaaaccgataaagctatgtatctaatggcttggtcttagaagcttcaacgaacatagaagcacccttattcaaaaacttagtcttgtccaacacaaagtccaactccttagctggcaacaacttatacttctcttcaacaatctttttactctcaaccgaaaccaaactccattgctggttcacataatgctcatcaacacccaaactagcaattatcctaac

SEQ ID NO: 133461 - DNA, 619 bp, Arabidopsis thaliana
  unsure (1)..(619): unsure at all n locations
nnnnnnnnnnnnnnnnnnnnnnnnnnnnnnnnnnnnnnnnnnnnnnnnnnnnnnnnnnnnnnnnnnnnnnnnnnnnnnnnctttgcatggtttgcttatacaaatacgacattgcgtgtaatatatggcataacataattccccgatgttcctgtacatcaatcagaccagtgaagttacactggttttgaattgagaccgaaaccaaacgggaacaatgggtcatttgaattggcatgagcatctaggggcaaatgctcaacgtgtttgaaccagctcactggcaacttccccttgaagtcataatctccaaaaacaacgtcagccaccccttgcccttctgttccaggcagccaagcagcaaccagagcctctgtcttttcaagaaccggcggctccaaaaccacaggtcgtcctgagatcaatatcaccagagtcgggattatctctgcaactgcggtgacaatgtcagtaccatttaaagggattctgagtccgagttatcccccatcggctctgcataggggggtccccgactgnaacaatggggtagagnatccttcacttggggtaaggttccttgatggggttcccatgntnctngggtcgcncantgggc

SEQ ID NO: 133462 - DNA, 774 bp, Arabidopsis thaliana
  unsure (1)..(774): unsure at all n locations
nnnnnnnntcgttcgaaacnnnnnnnnnnnnnnnnnnnnnnnnnnnnnnnnnnnnnnnnnnnnnnnnnnnnnnnnnnnnnnnnnnnnnnnnnnnnnnnnnnnnnncggccgcttttaagcatataaactcatacatctcttcatttgattctccaaaagaataatcatatagagatttgtctctgtaactatctacttagttagactgcgaacgatcttttggtttagacaaactaagcttcttctaggcaatggcgacattcataaattgaaaataaagaaagggttctaagtttttattggttttatcttccttggactagaccactaaagacttggctgtttccagcaagagtggcttcccattcaatggaagacaggagtatctgcgagagcgatataaccacttgcttcatgtttggtcttagaatcggatcatcatccacacattgctttgccaacgtagcaatcttgaacaaacagtcatgcgggtataaatccatcatgttggggtcaacaaactccttcaaactcgacatgttcatagagtctggtgagttctttagcactgctaacataatagatgccaatggacgtctttctggattcttagttccaatcgcctccgttcttataacagcttctcttccggatataatttcgaaaagaacaacaccaaaggcgtaaatatcacttttcgaggtggcaagaccgtcgcttagatattctggtggcagataaccatatgtacccactactttaggtactgatatt

SEQ ID NO: 133463 - DNA, 615 bp, Arabidopsis thaliana
  unsure (1)..(615): unsure at all n locations
agaaatttaatccactagtattaattgtgtcacatttgtttctcaaaaatagaaaaaaaaaaatcaaatctatgtgatttggagtttataaaaatcatgaaatcttttctttactaaatgttcttcttcactccttattcattaagcatccacaatttcccatcaatattgttttatactttatatacttcttcaagtcaatctcagtctcatttcgaacttcttcccaacaagtaacgacagtttagaaacctccacacttagaaacctcggatcatcattgtccgaaaccgtctttataagagagattctaggactcctcaatctctcacttgtcctaacctcggacggttttcacggtctccacggttctcggaacccaacaaacggtcactttcccggagggctccatttcattttcgacggcatactctggggggcaccacttccggatctccagtacaacggggtttccggggcacatagcccgggacttaaagggggccatcacgggttcctcctcagggtccaccggaaatttcccggcacaagaaagtcgcggggatgtcaagcgggngggaaaacagngggaaggggctnnggggccagggaagc

SEQ ID NO: 133464 - DNA, 494 bp, Arabidopsis thaliana
ttaggacgcactatagaagagtcttgacgtcgcatgcacgcgtacgtaagcttggatcctctagagcggccgcccttttttttttttttttttttttaggcgatttcgattttattgattcaaaaggttcgaacaaagacgtaccaaagccaagaagaaaagaaaaaaactacaaaacagtaaaatgtcaaacacaagttatgcaaaatcacgacgacagttatgtttttgcttttagttataaagcgcctcaattagagacagcctcttctttcactgaaggacaatgcactattgtgaagctgccaccattcatcgaattctgctcttcaagctcctcttcttcttcttcttcgtgactactaaaaccgatggcatcaaatatcatagtgttaacttctctgaatctctcctctgataaagaaacttcagctagtaacctccatgccttctcttctgacgctccttcatagtcttctttcctcttcaacacc

SEQ ID NO: 133465 - DNA, 263 bp, Arabidopsis thaliana
ggttttttttttgaggcataaacaaagaatttgtatttgtcccaaaatggggactttggtgaaagtgctacataaagaattcatactaaaggtactgactttgtatataacataattgttcacaaataccccataacatcttatgcattttttcttactattgggtgggggatatataacaagagttaaaaaaatagagttgtcaaaatatatgaaaagaaattaaaaatggaaaaaaaaaggagttcctttcttcttgcgat

SEQ ID NO: 133466 - DNA, 485 bp, Arabidopsis thaliana
  unsure (1)..(485): unsure at all n locations
acgtcgcaagcacgcgtacgtaagcttggatcctctagagcggctgccctttgtttttgttccttttttttttttttttttttttttttttttttttttttttttnnaaacttcaaagaccatcacgaattccgatctttacccaaattacccactttggttaagggtaaagctaatttgggaatcgaaaggccacaccaccttcacaggggcggggccgggcctttttgcctggataattccataagctggccccgacaaaaggcttattttgggaggaaaccacttggtggccactcgatgcttttgcacaaccctcctggcacaattagccccatctcctgataaacagggggggcccaggggaggagaaccttaggggggccttcttcactggtcaatgggaacggcactttttcacaaaccctaatttttggacaccctgaaaacctttttgatttttggggcccctgaagaaagtcatg

SEQ ID NO: 133467 - DNA, 516 bp, Arabidopsis thaliana
  unsure (1)..(516): unsure at all n locations
atgaannnnnnnnnnnnnnnnnnnnnnnnnnnnnnnnnnnnnnnnnnnnnnnnnnnnnnnnnnnnnnnnnnnnnnnncttttggttttgtttttttttgcgactcaagtgattattctttatacattcatattttttgagtatacaattattcaaaactaaacttgtaaccttaccttttcttcaaccgggttatcactaactggatgtgcacttcaaaactcttctgctgaccgccaaaccaggaggacacagtctcttttggacactcactctcaggaggttttaatctttaagagttgatccaaactcaccttgcagctaactggggaccttactctgcaaaaccttgtattttctattcccaccatccacaggacagggcaaaccccgggggcttccacggggatttacagagacataaaaaccccactcaatagccatctaaaaggttttgggattgggtctgctccttgggggggaacccaaggcctaaaccaaaggcatgataacagac

SEQ ID NO: 133468 - DNA, 591 bp, Arabidopsis thaliana
  unsure (1)..(591): unsure at all n locations
gccgcanagtgacgtttcatacaaatnattacaatacagaagcccttgtcttcgccggcatcgacgaacgtttaaacaaaaaaaaaccaaagacgacagntaaaacaaacaaacaaaatacaagccttgctttaattaatgtctaacgtttatcgacttttatttgtgtacatttcaaacatgtgacaaagtttggttccctatattgggtgatacttatctaatttgattttggttaaagagtgtctcgaaaaacagggtaatatgtgtcgatctcgagtctttctaaaatctgctgagttttccatagatatgaagagtgaccttccaccatatcggttacatccacgttttcgataccagggatacatattgggttgggattccggctaatccctgggaaattaaactagcacgaaatgcgataccaagggtccaatcatttgtggcataaccattgatgaatcttccagcgaccatcttccctacgtctcgccagttttcactattgattgaaatgggtgctccaagaagaccatctctcccaactcattgtttggcctnctcagcaggntgggggattgagagnac

SEQ ID NO: 133469 - DNA, 490 bp, Arabidopsis thaliana
ttgacgtcgcatgcacgcgtacgtaagcttggatcctctagagcggctgtcctttggggttggttcctttctttttctttgcaaatttttttttgggggggatccatttcgaaatttcaagagaatataaggaaaagccccaaatgttatagacttgacccaagcagagccaggaaaggttcttatatacaatgcgccgcgggctattttccctaaagaggaggaccgaccatgctggaagttagagatgtagtaaagaatccgcttcttgtcgccaggggttaatgagaaagaaggggtttagagatagagccactgcttcctcggtttttaaggggaggggaagaattgctttcttggataatgggggctgcactttctttggtacccaaatatatcttcagcccgaaaaaaacaattcagaggggcgcaacccagtggggttgaaacttttaggaaaaattcgcgctataaaggggggaaaaaactc

SEQ ID NO: 133470 - DNA, 502 bp, Arabidopsis thaliana
  unsure (1)..(502): unsure at all n locations
gaaatcaaagcaattcaagatcaaaacacaaagggatttgtctgttcaatatttgtatgtatacatactgattactaaaatctgatcatacgaaattcaagaatcacacggtgcacaaagcaccactagtagtagaagtaattctgcatcaaatctggttagaaagaatcaagaaaactgtatattttctggctaatgaggaaagtccttcactggaacttttaaatccgaagaaacagtagagccaaaaatggtgtcaggatgagaagaaaggtggatacatgtttcctgtgactgttgctcgtgggtagtacagaagggagtgaacattcctggcccgttgaagagtactttggtggggaacccatctttggaaccacctttgatcccgggagccagttctgggngaaggngnaacccgctgnggttcccggggatcccaaagcttcnccngggtttnccgcctttcnngcagggnaantccnccnggggccnccntaaa

SEQ ID NO: 133471 - DNA, 546 bp, Arabidopsis thaliana
  unsure (1)..(546): unsure at all n locations
nnnnnnnnnnnnnnnnnnnnnnnnnnnnnnnnnnnnnnnnnnnnnnnnnnnnnnnnnnnnnnnnnnnnnnnnnnnnnnnnnnnnnnnnnnnnnnnnnnnnnnnnnnnnnnnnnnnnnnnngatccaaaaaaatgtgacaatatttactaaaaatcagggttacaaatcttggtttttactcgtttgttacatgtacagactattcttaaaaactgggtctggctctctctctctctctgttaagaattacataaatagattggcacaacaattacatatgtataacctctgtagctcgcatcgcatcacatgacgatttcgaattgaactccatataaagaatgcctctctcacgcaatgagagagcatatcaaagtctgctttagctgcttttctttattgcatttcttcattgagctttcttcttttgttgtgttgatcgcgaaatgcatattcagattctctgctcgttgggtttatttttccttgagagaagagttgtctatcgatgcagcacgagctgcttggaactgtatagtatacttt

SEQ ID NO: 133472 - DNA, 519 bp, Arabidopsis thaliana
ctatagaagactatgacgtcgcatgcacgcgtacgtaagcttggatcctctagagcggtcgccctttttttttttttttttaatttaaaccggaatctatttttgttggttcggtttgaattggttcatctaaattaaacacatgctatcaaaacatacccaaaacagaaccacttacatttttgggtttttaacccttacaaaatttgtacgcatcttcttccacctttaaaatcttcctcctcccagtggtgtaatctcttttccttgggcatgatttttatgtcacttgtgtagaattcattacctctgtgcaaatcgatcttcgcaagagaattggaccatggtggaagaaaatctggtttcatggactaagctaacttctcttctaatgatttcaccacagagatattaatgactctctggtaaccgccatgggaactcgcttgtgtctattccagcttggtgaagctcatcaacgtattgtaatgcttcccgacattcctctctgtcatcata

SEQ ID NO: 133473 - DNA, 537 bp, Arabidopsis thaliana
  unsure (1)..(537): unsure at all n locations
cgattgtannnnnnnnnnnnnnnnnnnnnnnnnnnnnnnnnnnnnnnnnnnnnnnnnnnnnnnnnnnnnnnnnnnnnnnnnnctttttttttttttttgaattcacttttttcaagtttggatacatgtaagaaaataaataatttaaaccggaatctatttttgttggttcggtttgaattggttcatctaaattaaacacatgctatcaaaacatacccaaaacagaaccacttacatttttgggtttttaacccttacaaaatttgtacgcatcttcttccacctttaaaatcttcctcctcccagtggtgtaatctcttttccttgggcatgatttttatgtcacttgtgtagaattcattacctctgtgcaaatcgatcttcgcaagagaattggaccatggtggaagaaaatctggtttcatggactaagctaacttctcttctaatgatttcaccacagagatattaatgactctctggtaaccgccatgggaactcgcttgtgtctattccagcttggtgaagctcatc

SEQ ID NO: 133474 - DNA, 549 bp, Arabidopsis thaliana
  unsure (1)..(549): unsure at all n locations
cgatactattaggacnnnnnnnnnnnnnnnnnnnnnnnnnnnnnnnnnnnnnnnnnnnnnnnnnnnnnnnnnnnnnnnnnnctttttttttttttttatatgcaaacccatttgcattcatattctttaaaaaaaaaaatgtatcatgtatatatccaaaatttcttgtattcatatttttacaaaaggaaaaagggagttaattttatatccatgcaatatgcgtgaatataattctctagtattgagggtatgtaattaatagtcttaaagcaaaacattctacagctcgctgctgtaactaagcagggccatctctttattgacataatagtattaataggtttttgacctctgggtctaaatctacgagtccgcattggcgctgtcggagcttttctcttccgaggaataggctgacggagcttttgcctgcggattttgagtgtgtcttttgatagttggtagattgatagctagcactgccggcttgtcctcccatagattggcctccgaaagttccaccttccatcgagctttcacttgcac

SEQ ID NO: 133475 - DNA, 549 bp, Arabidopsis thaliana
  unsure (1)..(549): unsure at all n locations
cgattgtannnnnnnnnnnnnnnnnnnnnnnnnnnnnnnnnnnnnnnnnnnnnnnnnnnnnnnnnnnnnnnnnnnnnnnnncttttttttttttttttttaaggaagcaccgacacttaaattctcactttgggtcaaagtattgttttaaaacaagaaaaaagcctcttgaatagtaacaaaaataagtctctttgttttcaaactaatctttctaatagaagaagctcattcatcttcaagtttcagttagtttcctttcacaaaagaaacttgggaagagaaggccatggccagccattgttcgtcacccttctacttaggattgttaatagtcagagcttaggcttgagtcttttcttcttccagttgttctccgtttccttcagcttcatcatcttcaactcctagggactggtttaggtactcttgagcgtcttctaatgcagattcatttgcatcggttgcatacagtatcttcttcactgctaccactatcggaagatcatctagctcaggagtttggcagagtatctctacatcccggag

SEQ ID NO: 133476 - DNA, 870 bp, Arabidopsis thaliana
  unsure (1)..(870): unsure at all n locations
ttgtataggacgcactctatactaaactgtgacaccgcatgcacgcgtacgtaagcttggatcctctagagcggccgcccttttttttttttttttctagaactagtagcttattatatatagtagtcgactgtttcataagctacaaacttcatgcactaaagtaaaaagttggttgcattacttaggaaactaaagacagacaagagcagaggaagaggaaagaaacctcctcattcttcatttcaaaccaacgaaacaacatatatctaaaaaaagttaacatgaaatgtcgaaagaaagacttactacctttataactcctctcactccatccttttacgtttgtttttcagttttgaaaacatttgctcgatatctgcagaagttatcgcctttgatggcccagcagactccattaaaccctggagtcccgcttggaagtctttgattccgtgaaggagctcaactttggatacgggggctaaattattcagaagatcaagtgcttaaccttcttggtgctccagttcctctggtctcttttccttcggcttttttttnnatcacaacattggggcctctgcattaagtaaatagctaccttttcttgtttaacattaaaaggacttttcccattcgcataggaggttcttcaagttttgggaaaaacaaagggttttttaaacctcggacccaggttaaatatgcctatataccaacccgctggggaacttttgacaagccacgatcttttgaaactttccgncaacaagttttcggtttatactggtttaagtgggcgggttaaattctggtctttcaaaatttttcgcaaaattctcgtctaaggcctttaagtggccagct

SEQ ID NO: 133477 - DNA, 650 bp, Arabidopsis thaliana
  unsure (1)..(650): unsure at all n locations
tannnnnnnnnnnnnnnnnnnnnnnnnnnnnnnnnnnnnnnnnnnnnnnnnnnnnnnnnnnnnnnnnnnnnncttctttttttttttttttgattgagaacacacaatacatatctatgtatgtattcaaatacacatacatagcctactaaaagaatgttctatgagctaaaaaaaagaacgaaacattcctacacacaaatttccgtaaaactactgcaaatttcggaatctacttacattacaacatacacacacctataaaacagtacacaatatacatacatacatatataaataaccaatgactgtatgtatttaatgttatatgtctgaaatagagattgtataacctacctgactccaagtgcttgcgcactcatcatgatacaagaacgaacaccacggaaaagccaacgatcatcgatttcaagaatcactccaactatctgaatcttcatcctcgtcgcttccagccattgccatgcgtattgtatttgctttctctaagatgggggtaccctaagctggtctaggccagctggntgctgggccgggttgtactgcgggttaggttgcgggtggtccgattggganaacgancttgncctgnttggttgatgggggggcncccagggttctnnctgggg

SEQ ID NO: 133478 - DNA, 520 bp, Arabidopsis thaliana
  unsure (1)..(520): unsure at all n locations
cgatttnnnnnnnnnnnnnnnnnnnnnnnnnnnnnnnnnnnnnnnnnnnnnnnnnnnnnnnnnnncgtggagaagcttgatctttataatatattgtaacaaaagcttagagatgtcttacgataaaagaggccaatgtttgcaacaagaactgaaaatctaaagctacatcaataaaacctgtttggatacaagacattgtgctgaatacgaccaaaaggtcaaggattcgggtgcctgaaatgatgtacgtctgacgcattcaatgtttgtgcataagtcatagtggcactaggccactctgtataagaaggtgccgtcatagctgggtttaaggggtgtccatagtttaggctggcttgagttcttggcatctgtgggaaaattgcgtcatggaacggaagcggaatcggtatcggattgaagttttgtaccggtggcgcaaccctcacatacctgttacggtcataatcaggatcataacgatccttctctctatctctaataatggcaacccgag

SEQ ID NO: 133479 - DNA, 717 bp, Arabidopsis thaliana
  unsure (1)..(717): unsure at all n locations
ggcgaactatagattagctatgacgtcccatgcacgcgtacgtaagcttggatcctctatagcggccgcccttttttttttttttttaattaaaatctcacaacaactgaatcacaaatcccatagctatataaataaaacacagaaaaattaaaaataaatcaaaagaacccttggagcttctcctctttcctggtctttgataaaagtcttctcctttcttcctacttgttgttaccggtacgtctctatctcccctatcaattttcctttgtcatttcaatgaaaattgtctttatttctcaagaaaattaataacattctcttttctctctgaaacaacacaactactaactcgggacataagtctgccccagcccagcccactgatgaagaaagacattgtctgaagaaacaggtagatgaagtaattgttcttcccgtgcacaaagtcatagcatccgcacacgaacaagaaagccgcaaatccaagctccaatgtattcaatcgatcaggcaatttgaagattcttgggaaccttttgatccctttagtgtttcctttagcgctctgaccgcttccaagcttagcagtcactacccactcgttagcccttcctgcctcaaacagaccaatgagagtggcctttgtccggtgcagcgacatcacattctcgaataganctccaatagancagcagatgaattnaccttgga

SEQ ID NO: 133480 - DNA, 356 bp, Arabidopsis thaliana
attgaggcgaactatagattagctatgacgtcgcatgcacgcgtacgtaagcttggatcctctagagcggccgccctttttttttttttttgctcatataaactgatcacttgattatattgtaagattcggaagaattacagataaacgagatcaaagcggtttgtggcactcacaaaaattgaaaaaacaaaaggcaccaattctcttgtccccttgccaaatactaatcttcttcttggggggtgatgtatcctaagtatgtacacaaaatcactcaaaattccagacttaaacatctcgtaccaatctgaatatgcatctttctagtaatactccttgacctagtagttgtt

SEQ ID NO: 133481 - DNA, 590 bp, Arabidopsis thaliana
  unsure (1)..(590): unsure at all n locations
cactatagatgactatgacgacgcatgcacgcgtacgtaagcttggatcctctagagcggccgccctttctttttttttttggtcttgtttcttgactctcgattttttacttaaaaagtggaaactttatgacacttaaatgtgtgtattggtgtaacctatacatttttctttttcttttcttctcaagtctatactctttaaaactataacaaagcttgctttctctctttttatagtttaaattccatttaaggaaatgtaccggtcaagcgaatatggtcgagggttcgcctcagaccatgcttaagaactgcttggttaccttgcctgaacccatccccatatgccgatgaagaatccgactcgatttgatgcttgaaaaactcaccagtttcttctcaaaatcagacctctcacctttcttggacgatgctgacaccacagcagatgatgaagaagatgcgatgtctactaatgtagagccagcataagtctcagantccaaccaaatgtgtgctaaaacttgnnatatccnncgtccanntctgggnctaaggnttggganacccattagtcggaggccatg

SEQ ID NO: 133482 - DNA, 322 bp, Arabidopsis thaliana
  unsure (1)..(322): unsure at all n locations
gggtataataagggggggggttttactttttaggcattcaaaagatacatatgatttagtgagcatgccatcgagccttacattgtattgaaacattaaaacctctttgcgccttaatttgtattggtaatatgccgaacgaactcatcgatgtttacattagacgaaccgcttttcgcaacagctcctcgactgatttcactaaggtcacaagcccttcttctcatctctttcccttcttcacncnctctaatccataaaccnccttcacgacttccctgatcnccnctctcccccaatnaaaaactcattccnttttggg

SEQ ID NO: 133483 - DNA, 726 bp, Arabidopsis thaliana
  unsure (1)..(726): unsure at all n locations
nnnnnnnnnnnnnnnnnnnnnnnnnnnnnnnnnnnnnnnnnnnnnnnnnnnnnnnnnnnnnnnnnnnnnnnnnnnnnnnnnnnnctttgtgttttgatatttttaaattttattgttctttttggaggggatttaactcatatatgcattatatatatcccatatatataatctttctacaagcaataacaacaaagatcatcaacaaaccaatcatgtggttctattactcacaaataaaaccatttccctcaaccaacccaatgaagaagatacaaacatgaatagacaacatgatcaaatgaggccagtgctacggaacgggttgttatgttggtttaccgagaaatcaccataaccggaggtatttggctgctgtgaaaccgggttaaccgggaatcccccaaaatcaccaaatggattactattattagtgggagggttggactgatgctgatacgttggctggggctgatgctgatatgtctgctggtaagcaccgaatgggttgttcaccgcttgctgctgaggtgggggagctgtgccattggacgatgcaaacgggtcatgggacgcaaatggattgggacctggtgcaccgtagacgggccgttggaaccattgaagggccaccaccgaaanccggcaagngaccgntcaacccccancantttcccgnccgggggnccggatccgcggncgggggaaagttcccaaggggngttt

SEQ ID NO: 133484 - DNA, 553 bp, Arabidopsis thaliana
  unsure (1)..(553): unsure at all n locations
ctatagnagagttatgacgtcgcctgcacgcgtacgtaagcttggatcctctagagcggccgctttttggttttttttttttttttttttttctgaagaattgaaatatatgagctaataatcgttaagcaacattcgggataacccaagaaaatacatatattcctaaacaaactcctgtatagtttactttatatatatacgtaattatctacctttatgcttacactgagcagtaaaaaaacagagtgaagtcattataacaacgaaaaccttttcttttctcgaaatagtattattgattccagagaaaggtaaagaaagagaagaatgtttcctctggaactctaatatgattaatccctcctttttatctgaagattttagcttcccctgtttacctgatggaacaagagaatgacattggaatataactggaagctgggaaacatcgaatatctcccatgaatctttcgatctgaaactctaactttcgcgggctgcaaatccgttgggacccgtcgaatatcggtgtcaaacaccatttcngggg

SEQ ID NO: 133485 - DNA, 578 bp, Arabidopsis thaliana
  unsure (1)..(578): unsure at all n locations
attgaactgnnnnnnnnnnnnnnnnnnnnnnnnnnnnnnnnnnnnnnnnnnnnnnccgttttgataagaacagaacggttttttctttgcttttagcaacaaaagaagtagggtatctatataatacatatatagtcacacataacatgaaagtctacgcacaatttgcacaagaattaaaacattttctcttagaggaagccacaaagaaatagagggtaaacacttacattgttatacatgaagtagtaaacacttcctcttctcaggccactactgctctctttcctttactgcttttggtgttatctttcttctttcttgaaacgcctgtgattggatgacccagaggacctgaccacgtctggacttgtgttggtggttcggctttggaaaaattgaaagaagaggatgtgaaggatgggaccatatctcgtgggataaatgtcgggtctatatgctgtgaggcacccaatggtacacccattgctccaccatcttggtgtggtggcggaaacttctcgctcttgctctttgcatttgcgtgtgtgattaatctccttctatcgacatttgac

SEQ ID NO: 133486 - DNA, 628 bp, Arabidopsis thaliana
  unsure (1)..(628): unsure at all n locations
aattgaacnnnnnnnnnnnnnnnnnnnnnnnnnnnnnnnnnnnnnnnnnnnnnnnnnnnnnnnnnnnnnnnnnnnnncttttttttttttttttctcgccgcagaagatatgtgtctgtgaattatatatacaaaaatatacagaaacttaacaatggttttttttttcatgtctatttaaagacactatattaaaaaaaaaaaaaaaaatcgtgcatataacacgaagtcattcctaacaaacagacaatacagttgacttttcggttctagcagttctttggtctgtggtattttggaggcagagacgggcagggctcgttcatatgtgggtatggctccattgtgttgtaaccgggaagttccttcctgtatttcccaagtatttgacagtacggaagcttcacaacgtcattgtcattgcaccatttgggaaaacgacttgcattactctcgaaaaacttgagcatgtaagcatctttgatcgtggatcccgtgacttgaatgggacctagagattggatcgaaagcccagctccttggaaattccggggnaaaanggtnaagccgtgatnccnccgganaaccancacctgtcagacgcagaaccgcnaaggggcncncttcg

SEQ ID NO: 133487 - DNA, 722 bp, Arabidopsis thaliana
  unsure (1)..(722): unsure at all n locations
nnnnnnnnnnnnnnnnnnnnnnnnnnnnnnnnnnnnnnnnnnnnnnnnnnnnnnnnnnnnnnnnggcttggttttttttttttagtttagtattagctttttttctttcttttggtaaaagatccatccttttcattacgtacaaagaaactattaaccagtcttaatctcaaacacacacaaacgattctgttaaagaagtcatcttttaagaatacataactaatctatcttcactcatacatgatcatcataaagtttgggtggactcttcatgttttggagccatggagtgtgaagaatctgaaggctctctcgtaggactcgatactgaaggttttcttgtaggacttgaatttgatggctttgttgtaggacttgaatcctggtggggccatatgagatggttggttagggactagtgggaacccgatgatgattgcggtgattgagggtatcacgcttggtaaattctctggaagaagcatgcttggttgactcttatcctggggtggatgttcacatactcatcggtttcgtcaaggatctcttcctgaagaagctcttcgataacatcctccatggtgataactcctacaacctcttcattggtagggaaatcaggtatgggagtattctcaatatccaaaatgcagaacgaacaacctctatgtcgcttcttagctggagcagccaatagacttgtttccctgacccttgct

SEQ ID NO: 133488 - DNA, 727 bp, Arabidopsis thaliana
  unsure (1)..(727): unsure at all n locations
nnnnnacactatagttgagctatgacgccgcatgcacgcgtacgtaagcttggatcctctagagcggccgccctttttttttttttttttttttattgaaaaatgttattacgataggatctgattccagtcaaattaatacacctaatccattacagattttactaccattttaaagtcacgtgacttttacataatctaaaatcaaaagagcgaaaaataaaacaagaggtcggtacggttcggtttagcattattagaaagtagaaaccaaaccaaactgaatgggataacgttcattgatcagaataggtaataggtcatgtttctggtaatagctgacgtttctgggaaagtcttctgtagattcttgcaccttcgaactctggcgtggatctctcgttctggtcttatacccatcgggttttccgtttaccacccatcctctgggtcaactgtgtccatgtgttgaagaacatttgatccctcgtccaactgatctctcatgtcttgagccacatccagcacatcggattgcacaaattttttccccccgggtttaaggtttgaagaatggaattcaccaaggcttttgaacaacactctctttgatgacgtttccgaaaagaggatccgacccagattggacatttccaaggtccaggatggtcgtatagatgttaaaaaaacatggctttgcaatttaggtgtcgtttaaagtccagct

SEQ ID NO: 133489 - DNA, 685 bp, Arabidopsis thaliana
  unsure (1)..(685): unsure at all n locations
nnnnnnnnnnnnntatagacgagctctgacgtcgcatgcacgcgtacgtaagcttggatcctctagagcggccgcccttttttttttttttttttttttttttatcttggaaaaggaacaaaaggtctcttcattctgaattttgacattacaactccaaaatttccatttcaacagttcctaggttctacaaaaaaaaatggtaaacagagataaagatcgacaaagaggcaagcacctagcggttctgcatgtagtcgaagctcaagggttgttgaacgaactgtgcctgaagagagccattcctgaactgctcatacggatgagcatacatcatagctgcattaggccaatgcatatacattgcatccattgtggtgccatagggactcatgattgagctaggatgtggtccgaagccaagaggagcaggaggacttggaatttggttatatccagtgaatcccatttcgtagtatggtgtcggtatttgctgaatgttgaagggtggtagattgaagttctgattcaccggaaggctcctaatggacctttggtgtctgcggccataatcagggtcaaaccgatctttctctctgtctctaaatattgcaacacgagatgttggaccactttccctgatgcttaagttcttcttgacctcaacgnaagcattcttagatac

SEQ ID NO: 133490 - DNA, 606 bp, Arabidopsis thaliana
  unsure (1)..(606): unsure at all n locations
tgcactatagatagactatgacgccgcatgcacgcgtacgtaagcttggatcctctagagcggccgccctttttttttttttttacttaattacatgttccttataaaagaagcatataagaaacaataaatcaaaacctattacaaaacctgttctctcgtttttgtaaaacttgtatagcaatgaagatatctctagtttttggttcatgaatcagcttcttcgtttcttgtgtgtgaatcataaaccgacggcaggaaattcgggttgaaaatgacggtttagtctcaaaactggttgatcatcactcggacctggtgtttgtgaaagaagagagtaaaccagctgcttgagccggtagtatatcgccaaatgtcgacatagcggctgctgatctgtccttggaatattcccacttgtccatcagttaataattgatcccagtttcaatgtgctttcccgcatgaaagacttaaaagccacgccgaaattgggattttcctccaaaccacttggttgggatgcccccggttggaaangccnccagggtcctgcgngcacctttgtgacngaaaggnccattgnnccagtnangggggggnngt

SEQ ID NO: 133491 - DNA, 742 bp, Arabidopsis thaliana
  unsure (1)..(742): unsure at all n locations
nnnnnnnnnnnnnnnnnnnnatgacgtcacatgcacgcgtacgtaagcttggatcctctagagcggccccccttgggttttttttttaataataatgtgtatatatattaataatgaaaatctttttttatcttgacagattaaagaagaagaaaaaaaacagagcattgctccaaaattcaatgtgaaggtaagtaagtaaataaataaaggtaaaaagagagagggggtaaaattagggaccacgaccagagacaaagcagaaacagccaggtctctgaccttccgggatcattccaccgcctttggtggtgtcgacagcttcaagcaaactcacaacttcctccatctctgggcgtttctccggattagcttcccaacatctcttcattatggtcccccatgctgttcagacaacatcttggaatatccgggctcacattctgacgaacaacagcccaagaaacctctgccaacctcagatcacgataaggcatatcacaacaataaatgtcccacaagcatatccgaaagctgtaaacatcacatcttctgttggatggcttgccatcaagaacctctggagccatgtatccaagagttccaggttctgcaagtcatgtctttttggattctggagctttcaaacttttagctaccccccaaaaaatcaagccaatccttttagaacttccctctggaatgaattcccaaaagaggcagtaatttcccccctggtttt

SEQ ID NO: 133492 - DNA, 753 bp, Arabidopsis thaliana
  unsure (1)..(753): unsure at all n locations
nnnnnnnnnnnnnnnnnnnnnnnnnnnnnnnnnnnnnnnnnnnnnnnnnnnnnnnnnnnnnnnnnnnnnnnnnnnnnctttttttttttttttcaaaaaatatgttatatgattttccaatgtatattggaccaaacgacaatattcatattcacagtgacagaaataataataatgtgtatatatattaataatgaaaatctttttttatcttgacagattaaagaagaagaaaaaaaacagagcattgctccaaaattcaatgtgaaggtaagtaagtaaataaataaaggtaaaaagagagagggggtaaaattagggaccacgaccagagacaaagcagaaacagccaggtctctgatcttccgggatcattccaccgcctttggtggtgtcgacagcttcaagcaaactcacaacttcctccatctctggtcgtttctccggattagcttcccaacatctcttcattatggtcgccaatgctgttggacaacatcttgggaatatccggtctcagattctgacgaacaacagcagatgaaacatcagcaaagctgagattcaggataaggcatatcacaccattaaatcccccacaagcatatccccaagctgtaaacatcacaccttctgttgtatggttgccatcaagaccnctgggccatgntccagggccagttcccagcagctttggtcgggtnatcaggacccaanggatctagnccngaaccaaggntncngttcaacggt

SEQ ID NO: 133493 - DNA, 691 bp, Arabidopsis thaliana
  unsure (1)..(691): unsure at all n locations
nnnnnnnnnnnnnnnnnnnnnnnnnnnnnnnnnnnnnnnnnnnnnnnnnnnnnnnnnnnnnnnnnnnnnnnnnnnnnnnnnnnnnnnnnnnnnnnnnnnnnnnnnnnnnnnnnnnnnnnnnnnnnnnnnnnnnagggaagcataatctcaaaaatttgcctccaataaaattcgtttggacatgaattccttaagtatgggagaatactacgtttaccccacataataggttaatctaatttaaattaggggaaattttccaccaatcaatttattaattacttaaaacaacaaaaggggggaaaaacaattaaaaacacatttttccctcaaaatacccatagtgggctacaactggagatttcttgtttcacaagacacaagaaaaaaaaacctaacttagaaatcattagaaggaaggggttcatgtccattactaccgataaagatagtgtcataaacaatagctgcaatggctgccccgataaaaggacccacccaatagacccattgtttcgtccaaatccagtttaccacggccggaccaaatgaaaccggggggttcattgtgcccggtcgaagcccccccaccagaattgttgctcaacgattaacccattcggcatggcgcaatggttccatatcaccttttttggatccacgggaggagcgaaaccggttaactaaccaa

SEQ ID NO: 133494 - DNA, 607 bp, Arabidopsis thaliana
  unsure (1)..(607): unsure at all n locations
nnnnnnnnnnnnnnnnnnnnnnnnnnnnnnnnnnnnnnnnnnnnnnnnnnnnnnnnnnnnnnnnnnnnnnnnnnnnnnnnnnnnnnnnnnnnnnnnnnnnnnnnnnggcagatatgatgattctcttattaaccaaggtattgacaaatacatggacaaggtattgtttagtaaggaaatacacaaaatctacatgaatgaataatattctcaaaacattcatttagcaaaccataatccatattgttctaacaacaaacaaggtaaaataagaaaatgcttgagtgatttagtcactcacgcttctttaatccaaactttccacttgggattctactgagaaacccagtatcaagcttcttgtaatgactatgaaacttcatgatcatagaatccataaaaccatccacttcgtcttcgtatctctcatacagaaccggcattgtgtgtgccccaacaaacccgatatacaaaacagttgggaaattgcaacagctcccgacctttgcagctacccatagtccgattacagccatgaggaactgtttcaaattccctttacaagccaagtcctgaagaaacaacaaaccgcggttaacttcttttc

SEQ ID NO: 133495 - DNA, 607 bp, Arabidopsis thaliana
  unsure (1)..(607): unsure at all n locations
nnnnnnnnnnnnnnnnnnnnnnnnnatctaaactcatcgacgaccaatctatttcacttgagttactggattgttctatctgttcatgtctagatgggggctaagtagctctttgaagcagaaaatttagttcaataggaaaatatttacaatcagatgtgtacatatatttgtggaagataaatatgtgcaaagcagaacagagtatttagtattttaccaactactagacttaacctttgctctgaaaaattgaatcatgtgcttatagacatcttctttagcacttgagccaagcacaaagtcaatgtgaccataatcctcaagatatagtaactctggactggaaggtagttccgcgagagtatgttccacatctgtcacatctgctaaaccatcagttccaccataccccatccacattggtaatgatgccgggatgtggcttagtatgaattctagaggtttcgacagcccataagtccggagatttttgaaatacccgtagtcgttttgcgcaaaggttcccttccgaatcatttggaaaagatgtcgaatattcttgacagatgatgggtgaaggctcgaatccagatagtattctatt

SEQ ID NO: 133496 - DNA, 763 bp, Arabidopsis thaliana
  unsure (1)..(763): unsure at all n locations
nnnnnnnnnnnnnnnnnnnnnnnnnnnnnnnnnnnnnnnnnnnnnnnnnnnnnnnnnnnnnnnnnnnnnnnnnnnnncttttttttttttttttgtatgaaccgagcgaaattttatatcaatacctttccactaatattgagcctagtggtgaatggcccaatgacaaaatcccaagtcaaaaacattagctaatataagtagtaatctgtgtcttggagatagaaccaaaaagaaaaaacagagagaacaaaaagacttagcagagctcttgaaaaagagactatacatatatcaaatcaaagcagaagaaggattatactctatatctctgtgtgactgacttagagacctttaccttcgtcttcgtttaagattcggttacggaagtcactaaccatgcgaggcagtccctccctcagagatatctttggttcccagttcaactgttcctttgctttgcttatgtctggtttcctcttgtgaggatcgtctgctgctggtttgggttgaactctatggtcgcgcttgggtcgatcacctccttaaccacctctgcaagttcaagctttggggattctccagggttaccaaggttgaggggccctactgaccgctttccattaaagcgacaagtccctccaccagccagaaacatattgaaagctacgagcctggtttccatcacaataagcaggcttaggggttggcatggtgggaaagtntaaaangccntnaggatnggccatgngaaaggatnacc

SEQ ID NO: 133497 - DNA, 774 bp, Arabidopsis thaliana
  unsure (1)..(774): unsure at all n locations
tgnnnnnnnnnnnnnnnnnnnnnnnnnnnnnnnnnnnnnnnnnnnnnnnnnnnnnnnnnnnnnnnnnnnnnnnnnnnctttttttttttttttcaccaaattcaatattgtctcctccttcaagaacctttccttcagactctatctgcacagaatctccagtatctttttcttttccagaagactcgatattgtctccttcttcaagaaccttcctttcaggctctatctgcacaggatctgcagtatctttctccttttcagtaaacacaatattttctccttctcctccttcaagaacattccctgaaaccttcccttcagactctatctgcacagaatctgtagtatctttctccttttcagcaaactcaatattgtctcctccttcaagaacattctctgaaactttcccttcaggctgtatttgcacagaagaatcgggaatatctttcttcttcttctcagcagatctaagggtggctttctttgacccgttcgaaagagaagaccttttgagactaggactgggcttctcatctttaatctccaaaggcgacccctcctttgagccgcttctactttttctcgaattgagatttgctttgtcactctcatttctcaggggatctntactaagcgtggaagccttcctcacatttcgtttaggtttatttctttcagctgtaaaacggctagggccagttccactagttgtgccagatggttncttgatacttcgctttggccttttcttttctgcttcaccactgc

SEQ ID NO: 133498 - DNA, 676 bp, Arabidopsis thaliana
cactatactagagctatgacctcgcatgcacgcgtacgtaagcttggatcctctagagcggccgcccttccttttttttttttttttttcctatccaaaaaaattttaaaaaccagaaaagttcaaaaaaagttgagcagcatattattgttttttttcttatgagactgagtatcaatcagttcatatccaattctcgacttttcacaaaaagggaaaggaagagagatgggcttgcaaacacatctttctttctctctcttagtagcatctctcttacactccctctctgctcctctctgatagagtcatgctctcaatttgagacaccagtgaggcattgttgctagcccccgcagctggaccggaccttgaaggctcacgaggcaataaatacttgtcccaatctcctcgcctccttaatgtttcaccctgaatttccacgacttctgaacttctcagggcttccatatagtctgggatgtattggccaattccggaaggcctctgaatgctgcttttactctaacaggaaacccaacctttataattcatctgatccccgaaatgtcatttctcgtaaggttatcaaccctgaaaaaatttccacttggggcatatctttatggaccaaatgcgtcaaaatggcaaaaaccttgggtggaggggggaaggg

SEQ ID NO: 133499 - DNA, 677 bp, Arabidopsis thaliana
  unsure (1)..(677): unsure at all n locations
aaatataaattaaaagttttttaaaaagacatattcacgaatgataatcaaagagagaagcaaccacacatcagtcatgaaaccattttctgtcttctttttttcttgttttattactttcatttccatatgaaactcctatgctcttacagagaaggagacacatattgtctagacaagctaaagatatcttttccttcaaatggtgaagtccaatctggagaggtagctgcttgttgtgtttccacgataacaccagcacctgaattctccatagatacaccgttgctgttgttgagtctacctcccatggaaccatttagactgtaccggttcatgttctcatcatatatttggctgctgctctttaacccggaccagtttccattgactctactattttgtgataaactttgatctagactccagtctatggtttgtgtagtccactggaaccgccagagatccaatctatagggggaagatgcacccggatgttccagctggaaccaccgcagggggtaatcccagcgaggacgcgcagatattggggggggtgatgctgtattttagccatggccgcatcccctggcaaaacatgggncatggtgtgaagaccgtcggttaacnangggaccgtngtaangtgatgggccncanggaanngtnnancctnt

SEQ ID NO: 133500 - DNA, 508 bp, Arabidopsis thaliana
tggacacctatagaagatcttgacgtcgcatgcacgcgtacgtaagcttggatcctctagagcggccgccctttggttttttttttttaaacgcaatgcccatttagataaaaagtacaccaaaaacacacacacaaaagtcagcttcaaatagccatccacaataagcctttgcatctacacaaattcagcttgtgctaagctttctccaaatctttgcgtttgttttttacgcgggataaagctccaaagccttgcctgcctttacaaaaaaactgacccaaaaaatgtgtcgtccgtctcctgcacaactactcctctagatggcccaatgactctttctcagttctcacgcattctgtttttacactttgatcacaaagtcacaatgttctagcgggcttcagaagagatattcccaggcaatggcgtccctggaaacccttcttcgatatcttgagcccccggtttcttttcacatactcatcagcgttatggggggggtcat

SEQ ID NO: 133501 - DNA, 710 bp, Arabidopsis thaliana
  unsure (1)..(710): unsure at all n locations
attgacgtgcacttgcnnnnnnnnnnnnnnnnnnnnnnnnnnnnnnnnnnnnnnnnnnnnnnnnnnnnnnnnnnnnnnnnnnnnnnttcctttttttttttttttttcggccggagaaaacttttcaggtttgatattctaaaaaagattaacataagaaatctgtagctgtaaaactaatgatgagttaagcatttagattacactgaatgatgaagattctcccaaactaactttttatttttgttttgtttcttccttggggatctgttgtttgtctacacagctgagttgagagtcttccatcagaaaaatagttaaacagtaaagagagaagtcctgaagaacctcaagataagagctcgttctctctatcactgttaactctgaaactccgagattatccagcaaaagaccaatactttcaattatcgattttgggacgctttggctgtggagattctagttcctcacatttcctggtttcttcttctggaacctccttcgaatcagcagtcttcttgtcttcttgttcagatttggctgcggaatctgatgttgaggctgtccctttggtaagaccagagttttgcttctcgaacatcatttgcaggtacttgccttgttcttctattcggagttgcaggtttctttgaatctcgagctggcggccgcgaattcgatatcaagaatatcgatacggtcgacct

SEQ ID NO: 133502 - DNA, 523 bp, Arabidopsis thaliana
  unsure (1)..(523): unsure at all n locations
nnnnnnnnnnnnnnnnnnnnnnnnnnnnnnnnnnngccgcgtacgtaagcttggatcctctagagcggtcgccctttgtgtttttttttttttttattttttttttttttttttcaaaaaagaatattcatatatgcatatataaataggctgggaaacaacaatacacagctctcaagtattgggtttttgatacaaaaataaccatcactacattttgacatcgtactctttaaggacaggactcgagaaggataatgacaaaaaaagaatgcccaattgctgcgatgcctgcctataatgatgcagtgatgggtaatcaatcctgggaatacatactctatccacaactatttgcctccaacttgggcatcatctttggctatttaacgaatgccaaatgtatcatcttttgggcggcacacgaaaaacacatttcaaaacatagcccccatgatttcctcacaagagttcttctgagttaaacttggtccatgcttccttgagcatgtcaaaaactttc

SEQ ID NO: 133503 - DNA, 515 bp, Arabidopsis thaliana
  unsure (1)..(515): unsure at all n locations
nnnnnnnnnnnnnnnnnnnnnnnnnnnnnnnnnnnnnnnnnnnnnnnnnnnnnnnnnnnnnnnnnnnnnnnnnnctttgttttttttttttttttttgtgaactgagagagataagaactggagacacagttcatatgttttatcatgttcagagcaaaggagacacagtttagagaagagatcaaacaacaagtagattcttttagggctggtggaaattcataacatgatcttactcgggggaaaaagcatatgagacctgacgaaggaaatactttgatggtggggactacatgaaacttggggaagctgggcctttggagagaccaagccgaacttccatcccggggggaaagtctactggtttcagcgtctcggattcgcgaggatcatttcagttatccctaaaaccaaaattatgtagagctcctgtgtagacttccaggccaagcattggaggaaggaattgggtccagaaggtttctgaacccggaaaaggttttgttatcaagat

SEQ ID NO: 133504 - DNA, 445 bp, Arabidopsis thaliana
  unsure (1)..(445): unsure at all n locations
taggacnnnnnnnnnnnnnnnnnnnnnnnnnnnnnnnnnnnnnnnnnnnnnnnnnnnnnnnnnnnnnnnnnnncttttttttttttttttgattctaacatttaattatataaagtagaagctaagaaaccgtaagacatatctacatcactgatacaaattcttcttgaggagtgttccaaggcaagcatactaatacatagttgctttccaaatgatgaaccctacttttaataaagggccctctctctatatgtaactcccactaaagaacatagacggcaaatttgttcctattgattcacgaagctataagatcttttgtaatgtctactagaatcacgcagcgagtaccagaactttgatggttcccttgactattcgcaggcaacatcgngggactatcactcttccaacaaccccactaataaagtaggaacctgcc

SEQ ID NO: 133505 - DNA, 487 bp, Arabidopsis thaliana
  unsure (1)..(487): unsure at all n locations
cactatagaagatgcttgacgtcgcatgcacgcgtacgtaagcttggatcctctagagcggccgccctntggtttttttttttttttttttttttttttttttttttttttttttttttttttttttggaaaaaaacatagtctttcaacgggtttagtcttttagagttcaacccttacattactttataaggccctactctggggagaattcacattccgaaccctggctggggaaccaccctttacagaaaaaaaagccaaccttcttcagagacaactaaggctgtttcccctacgaaacctaaatcagggggaaacctgggtaaaccggaagagatagggggttcggtttagtcaggtacagaacaaaccggatcatcctaaagcactttgtttcagctcggagccttttacttttttttcatctcccaaagttggttggttggttgttgttgcggtaaacctacttgttttttgccttttc

SEQ ID NO: 133506 - DNA, 510 bp, Arabidopsis thaliana
  unsure (1)..(510): unsure at all n locations
nnnnnnnnnnnnnnnnnnnnnnnnnnnnnnnnnnnnnnnnnnnnnnnnnnnnnnnnnnnnnnnnnnnnnnnnnctttttttttttttttttttcaacttaaaagcttctgattcatatagagggtctccaaagacaaaacacaacaggcaacacaaagcctaaaataccaaaagctacagtcaaaatgtcaaataccgattctaccctcatcttcttctccttcatctctctcttctgcgccataaactcttcgggtctcttcttcgattctacttccctcctacttccatttacccttttaccctccatgacactccttaaaataaccaaactgtccctcccgtttaaatgcgttccctccatcttctctaccttgagactcacttccctcacgtgcatctcctcctcaccgcacgtgaccatccgtgatcacacactccaccgcccccaccaccgtcgggaatggcgcctccacttctccgcttatccagttcctctgcaccgacacc

SEQ ID NO: 133507 - DNA, 501 bp, Arabidopsis thaliana
taggaaccactatagaagattctatgacgtcgcctgcacgcgtacgtaagcttggatcctctagagcggccgccctttggtttttttttttttttttgaacttaacgattcaattcattgcaaaagaagatcaatcaacaagaacagagtacaaggtttcaacaatctgtctagttatttcagcaaaagtgatatgattatttcataaatgatcatccaaagcacatctcttaagagggtggaaccaccaaaagtccaaaacgagcaaagaaccaggctttatctctactgcttcaaatctgcagagcatcagcaatggatccagcgaggctcaagacttcgaaaggagccttgtttccgatggccttaaccgcgtgtggacaagaatccgtgatccagaagtatccaaacgcttcttctaatccgttcttcttgtgggggaaacgctcccacgagctctttgggaagacaccatgagttacataaccactcaccttcaca

SEQ ID NO: 133508 - DNA, 680 bp, Arabidopsis thaliana
  unsure (1)..(680): unsure at all n locations
cgatttactannnnnnnnnnnnnnnnnnnnnnnnnnnnnnnnnnnnnnnnnnnnnnnnnnnnnnnnnnnnnnnnnnnnnnnnnnctttgttttttttttttgtttttaaaagaaaaatatttattaatttctcattacttatttggttgcatctttacaacaagggattgtataacttatttatgacacttcattattgaggagacttgtttaatcataaacaaactaaacaagacctaaattaatgtgttgtagtgttggagattactcttctttcttctggatagtctcttactcaacaagagggtttgactttctcaaactttctgaatgactttgactttgactttgaccatgaccatgaaccattgtttcctccatgtgtggtattctctcgtgaacaaagaatctcataaatagaagatgaaacttgaattcggggagaccaaaactatcacgagttgtgacgctgctgcagcaagtaattcttcagctttatgaccaaagcgaagaccgcaaagcatggtatatgcatcacagccactcccaagtaccataagggggcgtatggtgacgaaagatcaaaaaatggggccccgcagtcttgccgtatggtttcccttggnagcccgnaaatcagnccnagtcaaggnggatccggnccnggggtnccaaggntt

SEQ ID NO: 133509 - DNA, 481 bp, Arabidopsis thaliana
  unsure (1)..(481): unsure at all n locations
taggaccactatagaagagtctatgacgtcgcactgccgcgtacgtaagcttggatcctctagagcggccgcccttttttttttttttttttttaatttcgaagaagacaaaaatatcaataaatatcatcgagtgagttcactcacttctgactgtttgttacaatatatatttacatttacatagttattccttgtatagatcgctcgactgatctatggctggcctatacagatattggttttatttacaacaaaaacaaaagtagtattaacatagggcattattttagttatgcctttgatttcaatttgtgttcattttgccaacagaagatgaagtagttgatgatgactttgtctcgctctgaatagcggtctctacgaattgggttgtgacttgttcccacttagtaattgttgccttaatctgngtttgttgtgctggtgtgcatgtcanagatccttctttcttgccttg

SEQ ID NO: 133510 - DNA, 515 bp, Arabidopsis thaliana
  unsure (1)..(515): unsure at all n locations
tttgggacgnnnnnnnnnnnnnnnnnnnnnnnnnnnnnnnnnnnnnnnnnnnnnnnnnnnnnnnnnnnnnnnnnncttggttttttttttttttacagagcaattgttgttttgttatgggttttgaataatggagtgaagaaattatgacatttgtacaaatgaatctttttcatgagattaataaattcccgagcaaatcttgtttccaaaaaagacaattgaattttatcttcttcttttgtctctcaacaatacaaatatgtgaaaacgttctctgtttttgctttttgtctttttttgctctccccattgattgattgattgatctttgtctctctctctgtgttattatgtagtgatcacttcattgtttggtagttaaaagcgttggaatttgtccgtgattcacgaaatcaatcttgttcagcctgacacaacacagtacttgctctggaagttcctctggtgattgagcctgatttgtaatcccaaatcaagaatcccgttcttga

SEQ ID NO: 133511 - DNA, 518 bp, Arabidopsis thaliana
  unsure (1)..(518): unsure at all n locations
nnnnnnnnnnnnnnnnnnnnnnnnnnnnnnnnnnnnnnnnnnnnnnnnnnnnnnnnnnnnnnnnnnctttttttttttttttttgcaaaagtcattaattaaacagttttaaaatattcacttgcaaaagccattgatttttttaattacaacctcacaagacaagacaaaaacccaccaatattttaaaccttaaatgaacgtaattaacctcctaatgggctacaaatgcttattaaactcttgtcgtttttattacattctttgaccgtatggtcttctagttcttcctcatcgctgccgcattgcttgcaaaccaccttgcacttaaccacactcccatagacataaaacccgggctgaaccatagctctaaccagactcttaaaccgttccccaccggtttcctccatgtaaatcggatcaaaccggtcatctttctccacacgaaagatttgcaaccccgggttcactgaattagccaaaagatgaaccaaccaaacactctttgacgcacc

SEQ ID NO: 133512 - DNA, 784 bp, Arabidopsis thaliana
acgttcgttacactaccagacgagctatgacgtcgcatgcacgcgtacgtaagcttggatcctctagagcggccgccctttttttttttttttttttttttgttaccaacgacaaaaatatgtatatatatatattcaagaacaatgacaggaacaaaaggttattcaacataaaaacaacccatatatgctaaattcagcaataaaccccccttaaaatattgaaagaagaagaaaatacattaaaaattattgttatgctttagagtctccaagctgaatttagcatatgttcccatccgtcttgacaaccacaaccctctctctttaatcacctgaaattgttgcccccaaacgttggtgtccaaaaatcggctgttgtttcgttagccaccggaaacgtgcttgatattgggacgagacatagaccatgtcctcttagttcgtgattctcattttcatcttgactcttcgatttaccagatatctacatgaatccatactgaaattagtacttatttaaccatgattatagcacgaagactccaacttggacaaaactaaaacactagatcgtgtattgaacctgctgttgttgttggttcgaggcaccttgtttcatgtatggagtgcttagaacagtgacttggtcgtgaaggaacttgatgtactctatagcttcttggagaacagatgcagtatctgtctttccgaaaggtgaaactagttgttgtaatgaagttatctggtcccttagattctcttttctcacctttaaagttgg

SEQ ID NO: 133513 - DNA, 664 bp, Arabidopsis thaliana
  unsure (1)..(664): unsure at all n locations
nnnnnnnnnnnnnnnnnnnnnnnnnnnnnnnnnnnnnnnnnnnnnnnnnnnnnnnnnnnnnnnnntctttttttttttttttgtaaataagagatgttttgatttattgacaaattcttacaagtttagggtaagcttttgttcaataagtttctttggtatataataaatatgaaaatggcaatcaatagatgcgaaatttattcccacgtcacggcgattgggcttctgacgttgtatttgtcacatatccaaaccaaaactccaaaggaagacgaagacgaatttctcgaagcttctgcatcatacgtcaccgtataactcaacctctctctggccttctggaacttgagcacctttggttcaactctcaccttcacaccttttggttcctcaacgtgcaccatatactcacaagtcggtgacccaacgttagtcacagtcctcttatatctcaccggttttcaaaattcggcgccattaacggagggttgancgcgaacgagggntagttcaaatcaccggggctcaaaacgacgggngttactagcacacgtgtagttagtgccggggaacaagagtatctctcacccgnggagtcaagtgnacaagtagttggatatcgncggngggggatngnanncagccggggttnccgccggga

SEQ ID NO: 133514 - DNA, 625 bp, Arabidopsis thaliana
  unsure (1)..(625): unsure at all n locations
nnnnnnnnnnnnnnnnnnnnnnnnnnnnnnnnnnnnnnnnnnnnnnnnnnnnnnnnnnnnnnnnnnnnnnnnnnttnnnnnnntagtattnnttttatttaatttattttttttttgcacttaaatttcagattttattgaactggttgatacagttgagtttgcaacataaaaaaaaaacaccattacaaaatctacgaaaatatccctggaaacaatcctaccctctgtgtcttgggtaaaggagatttatccagagaggattaaatatgaaagctgagctcattcctcattcctcactcaaatttggccttaggtttctcttgttcttcggggagagggttaaacacaactttgaagaaccaaactgcaagcaacgtagcctttacaggtccaagccaatacacaagtaaatgctctttcgttatatgttcaccgcgtgcataagcccatcccataacagctgcgggggtcatgcatccaccgggtaagatcagagccaagaatatgaagaggttacttagcaagctaccggtccaggcttcatgaagaacttcccggggtttcctngtagcccatggnggcgtcatgagatgtagaccctctgtaaagncgggggatgnna

SEQ ID NO: 133515 - DNA, 475 bp, Arabidopsis thaliana
tgacgtcgcatgcacgcgtacgtaagcttggatcctctagagcgggcgccctttttttttttttttgcgattagattatttggtaaaactaagaaatgaagattaccagagaaaagattttaattattgacgcttcctttggtagagagagtaaccaacgagcgcagacatcaaaaatgtccatagtaccgtattgatggtgtgccaacgttcgagtcgtttaattcttgattgcatatcttctaaaacgttgtctatggaagaaccatctcttcttggtgatgattccgacacactgttactacttccctgcgattgtatgaattccacaagctcttgcaaccgcgctgcttgctgtgtatgtattccacttgaacttctctggaccggtggcagtctttccaacactatttgaagggaactctttggtgtgtatgaaccatctagtttgagagctgaaccagcagccgtcact

SEQ ID NO: 133516 - DNA, 526 bp, Arabidopsis thaliana
  unsure (1)..(526): unsure at all n locations
gtacnnnnnnnnnnnnnnnnnnnnnnnnnnnnnnnnnnnnnnnnnnnnnnnnnnnnnnnnnnnnnnnnnnnctttttttttttttttttattgaactagtaaaaaatcctttataaattaaaaaaaaaaaacaaacagatcgtatgctctcacaactcaatcaaaaatcatctcaaataggaaattaaatttgaaaaaaagaaaagaaattaagaagcatcatcatcatcatcatcatcatcataattcataaaatatagtaatgataaattaagaagaacactatggttttcttttgcccacgtaaacctgtaatactccatcagatcctccagccactagggtacactggtccacacctgattgcctccaacagacgctactcacgaaaccgcttatccgaaccagaattcataccaactggttcaaacccatctaccccaaacccgcttcccccatctcctatcggacacaaacaccctgtttgttttccgatccacaaccaaacaacgcgccgtttctccac

SEQ ID NO: 133517 - DNA, 560 bp, Arabidopsis thaliana
taggtacactatagaagattatgacgtcgcacgcacgcgtacgtaagcttggatcctctagagcggtcgcccttttttttttttttttttctaggaacaatcaatctcattcattcatttatcagtaaatacacatattgattttgtaacaaattcctttcacaatacacttaacaattgtcttgagtggacgacattgaattgaaacacgagtacaccacacatgcttcgtcagcttcgacaaaataatcaaaatagatcaaaatacaataacatgacccaaccagaatacaaatcaaacaatataatacatgaaaaacaacaataatcttaatatttcacttcagaagcctaaccttttctgaacattctcaaaccccaaaagcatccaattattataaatctttcaatgcttccaccaccttcaatctataaatctcttatagtttcttcttaaattcacaaagaaacacaagcctttcatattaaagaagaaaaaaaggcaaataaaatattttcagtttcatcatctgtttatgtaacacacaaacacactcata

SEQ ID NO: 133518 - DNA, 704 bp, Arabidopsis thaliana
attacctatagacagcatgacgtcgcatgcacgcgtacgtaagcttggatcctctagagcggccgccctttttttttttttttttctttttttttctaagagttctacttcaaaccaaatcctccggttttttttgtttttctgttttaccttttattatgttacaacactcaaaatcaacacaacccaaagaaaaatgttcaaatcaaaagaaatcacacaaatctgttaaattcctttctcccaactgttgttgccatggaggcagtggaaccaatgctcaaatttcctactgatttaagtgtcttgtgcttctcaagaaccacacctccaggtgaaccaggacctctgtggctgctgctgttgctcatgaccaatgaccctttgttccatctaaacgtatcttgcgtggggggatacgacattctcctcttctcgctgactggtgtacccatcactctctcctttggattgctgtttggtctaacttttgctttggcagagactgttggagccatgtatctagggaatggagggcagcttgtgaggctatcatcatccttgaaaggagaatcttgacctcttagtctttcctttgagtatcttgatgcccctgtgtggatgggtctggagggagtgtgaaaagtggatcttgccaacctgggtgttgaagggtcaaagtggtttgccaagcccgatttggg

SEQ ID NO: 133519 - DNA, 803 bp, Arabidopsis thaliana
  unsure (1)..(803): unsure at all n locations
gctccgccaacagcgcccccccngggggggggaaatatttgggaacacctatnagagttctatgacgtcgcatgcacgcgtacgtaagcttggatcctctagagcggccgccctttggtttttttttttacccttgtgaatttgcttcaagtgtcaacttttttcattagtattaccaagtctaatgctcatatcatttctaagagttctacttcaaaccaaatcctccggttttttttgtttttctgttttaccttttattatgttacaacactcaaaatcaacacaacccaaagaaaaatgttcaaatcaaaagaaatcacacaaatctgttaaattcctttctcccaactgttgttgccatggaggcagtggaaccaatgctcaaatttcctactgatttaagtgtcttgtgcttctcaagaaccacacctccaggtgaaccaggacctctgtggctgctgctgttgctcatgaccaatgaccctttgttccatctaaacgtatcttgcgtggggggatacgacattctcctcttctcggctgactggtgtacccatcaactctctccttttggattgctgttttggcctaactttttngcttttggaagagactttttggggccattgtagntagggaattggaggggaagcttnttgagggtatnaatcaacccttgaaaggngntttttacccncttaggnttccccttgaggaanttnatgccccgnntgnntgggcttgggggggttnaaagnggcctnncggctgggggttaaggcaaanggttcaacccttta

SEQ ID NO: 133520 - DNA, 615 bp, Arabidopsis thaliana
  unsure (1)..(615): unsure at all n locations
ttaggtccaactatagaagatttatgacgtcgcctgcacgcgtacgtaagcttggatcctctagagcggccgcccttttttttttttttttttagtattaccaagtctaatgctcatatcatttctaagagttctacttcaaaccaaatcctccggttttttttgtttttctgttttaccttttattatgttacaacactcaaaatcaacacaacccaaagaaaaatgttcaaatcaaaagagatcacacaaatctgttaaattcctttctcccaactgttgttgccatggaggcagtggaaccaatgctcaaatttcctactgatttaagggtcttgcgcttctcaagaaccacacctccaggtgaaccaggacctcttgtggctgctgctgttgctcatgaccaatgaccctttgtcccatctaaacggatcttgcgggggggggatacggcattctcctcttctcggtgactgggtggacccatcaatttcttctttggntttcttgttttggctaacttttgcttngganngnctttttggggccatttnggttagggattggggggaanttntaggggntaacanccttnaagggggnnttnncccttac

SEQ ID NO: 133521 - DNA, 510 bp, Arabidopsis thaliana
  unsure (1)..(510): unsure at all n locations
nnnnnnnnnnnnnnnnnnnnnnnnnnnnnnnnnnnnnnnnnnnnnnnnnnnnnnnnnnnnnnnnnnnnnnnnnnctttttttttttttttaaccaggtgcaattggaatatctttggctaattctttgatacacagttgttgaaaggtaaaaataaacaaaagttacagtaagaatctaaagtaaataacaaaactcgcatttgatggttcgcaagtcgccttgtatttaggtggttcgtagccgcttaaaaatgcttctaaccgtattgttgatccgtctcatctaaccgaatcgattggtgacctccaaaactgtgttgtcactaactagtttgtataggatacaaaaccaaaacggagcagtttagtgaaatggcagataatcaacaccagctcttattcaggaaaacacttcccattctacctattaaccgtacttgttggagagtgctctggcccaggggctttggtctttcgaccatattatcccggcccccgagcattgcaca

SEQ ID NO: 133522 - DNA, 464 bp, Arabidopsis thaliana
actatagaagagtctatgacgtcgcctgcacgcgtacgtaagcttggatcctctagagcggccgccctttgttttttttttttttttttttggacaatgaaatgattggatttttctccatttttactgtttctcttctccaaaatgttttattattttgatatatccttagctcgaggtcttgtaagaacttctggtgacatttaaccaaatcaaaacagatacacttgaaggtggtagctacaaaattgaaaatcgagctaatgcattggtacattctaaccctctgactcgaagaagatatgattttcgcagcatcaaactgctatgatcaatgtaacatcagtctttgaggttggctccattctgtttccgttgaatccactgagcacatttcaggatcagttgttaccaaggaacttcacttctttgggatccgctcaaaggcagatatcatcgatgca

SEQ ID NO: 133523 - DNA, 534 bp, Arabidopsis thaliana
  unsure (1)..(534): unsure at all n locations
taggacnnnnnnnnnnnnnnnnnnnnnnnnnnnnnnnnnnnnnnnnnnnnnttactgtttaggttcatactaaactgtgtgtctttgtcttaaaaaatgttttccttttcccttaacaaaaaatctacaaagtctgaaactctcagcaatcagataaaaagattacaagaaaacctcaaagaggtatacaagtttctttcttaaaacaatctcaagaaaacagacgacatagtcttttaagatggtttgaacacatgctgtctctcttcctcactcgtccagcaggccagcttcctttaatgcactcttatactcttcctctgagttccacgacttgatctccttaacatttgcttcaaaatacttctcgatcttctccatcacctctttatcccagccatcatcaagcagcaagttgaaaaccgctcctttgcgaccaaaccggccagctctcccaaccctgtgaaggtacacctcataatctggctctccagtttcatatttagggggaagattataattgacaaccaaatt

SEQ ID NO: 133524 - DNA, 493 bp, Arabidopsis thaliana
  unsure (1)..(493): unsure at all n locations
gacnnnnnnnnnnnnnnnnnnnnnnnnnnnnnnnnnnnnnnnnnnnnnnnnnnnnnnnnnnnnnnnnnnnctttttttttttttttgataacaatgctaatgttctattcataggtttgtcgcagcaacacaaatttcataaagatagcaaagattaagagttacaaacaacctgattgaggcaaaaggtgtccaaataatcatattacctcgtttaagcccacacgattataatttggatctctagttcatgaatctgcaacagcaatagcagtaggggtaacttgtttaaccctcctttgatgaacatcccagttataaacacgtgcaatagttacctgagtaactgtgacttgatccctcaagaactgtaaatcagctacaagaacctccaggctggctttagcattttccagattgtttttcagaagagctgaagcctcttcacaggaatattccagcatgacattagctcccaaccacaaacacactg

SEQ ID NO: 133525 - DNA, 506 bp, Arabidopsis thaliana
taggaccactatagaagagtctatgacgtcgcctgcacgcgtacgtaagcttggatcctctagagcggccgccctttgtttttttttttttttttttttttaaactccaaagagtgaaatctgtttaaagagtgttacatcatttaaccagtttcataagtacaacaatgcgtgatctaataagatgaatcatcattctcctatttcatctaaaagaactcgacatgatcagcaattgctctgcatactagttttgattccgcagccaaatttaggcttttagctatggcaagcttggttcgtttatgcgtagatgttggctcatactttttcacctcctcatcctctttccctaacaacaaagcctcccttgcaggaatcacactctcccaccagaactcccttaatacatcatgtatgattctccaatagcttcggtctctcatcacacggaaaaccgtgcttccatttcgtgtccagcagtataagttgacccattcccggtc

SEQ ID NO: 133526 - DNA, 716 bp, Arabidopsis thaliana
  unsure (1)..(716): unsure at all n locations
tnnnnnnnnnnnnnnnnnnnnnnnnnnnnnnnnnnnnnnnnnnnnnnnnnnnnnnnnnnnnnnnnnnnctttttttttttttttgcagtatcaaatttctccatatattgaccaacaatgacaagaaacatctatggaataagaatttgacagttaaaacttatcttcatgagaccaaacaatgaagcacaaggaacaagtgcagggtaaacaaattgcattgtgtttgtgagagtatttgtatatcatctatatgtttcctgtaatcttgccaaactgtgattccgttcactcattgattttcctagctctatggtttggtttccatgtgcattcttcgaatatcaaacttgtctactgactccagaggagagactgtctcatttctgatccttttaatcttgggactcaacagtcccctgtggctaaacccatacagcttcagcacttgattatctgcaaaattaaaagccctctccatgctcttgaagcatctatcgactgcgtaatcagcatagctgccacacggtttgcaccctacaaaatgtgtcacaaagggccatctttcatcgcccaatcctggatgatacttctctatcatctcttcatacctggcaaccaaaccttcccaaaacccgtgcaagtagtattgattctccacataaaccttctctatccatttttccttctgcgaaagcaagagatatatcaacgct

SEQ ID NO: 133527 - DNA, 588 bp, Arabidopsis thaliana
  unsure (1)..(588): unsure at all n locations
acnnnnnnnnnnnnnnnnnnnnnnnnnnnnnnnnnnnnnnnnnnnnnnnnnnnnnnnnnnnnnnnnctttgtttttttttttttggtcatcatccacaataatcatcatgatataaaccgatttatgtcgaatgattgaaagttacatttactctgcatactcgtatgagttgaaacgagacagagaaacacaacacaaggctcaagttttcagatagccacacaagtcggggcccgaaacagagagtgtgaaaaactgaatcctacctactactcacccaccgccatgaatgggattccccagccaccatgtcttgaaaagtaatcattatctagtgaaatcgcaagcgtaaggacaacagctctttctgacaaagtcaatgggccgtttcacttctaactcttctaccagtgtcgcagggccggtcttggctgcagcatcagcttttccaaatcggatcacgtactgcccagcatctgtgaatatctcaaagccaaaacctctccaatcacgatctatttgggctaagacttccccatcagcatccttcactgtaaatgnggggngtccaaaacccaggattttct

SEQ ID NO: 133528 - DNA, 501 bp, Arabidopsis thaliana
actctagaagatctatgacgtcgcctgcacgcgtacgtaagcttggatcctctagagcggccgccctttgttttttttttttttcttcgcccccgaatttattatgattggaatgtaaaacgaaatcaattcccggatatacagtataacgaggaagaataaattcacaaacagattttgttgacaaaagtagttgaagaacagagtaagcaaaaaaaaaatcgaacgaagaaaagaatcataaaccaacaatttaagacaaacctatttcagaagccataaaccaaataagaacaaactaatggaagatatcaatcaatatggtgcaaagagatgtcgtgtatatgtaatagctagattttgcaatacctcagaaaggtgtaggaatcaagaagatgcttttctttaatttcttgattcacggggtccttttttttttgagaagaatccccaacttttaccaaacaaagggctggctcttgtttcttgtctttcgtcttc

SEQ ID NO: 133529 - DNA, 514 bp, Arabidopsis thaliana
  unsure (1)..(514): unsure at all n locations
ttaggacnnnnnnnnnnnnnnnnnnnnnnnnnnnnnnnnnnnnnnnnnnnnnnnnnnnnnnnnnnnnnnnnnncttgtgttttttttttttatataagatgggtagaagaaaataacatattctatacataaatcatcctttggccagagaaactctcagacagttttacacagcattccaagaagacaatggtggagtgtcggagtttttgaaggttggcactgtggccatgtgtctgtctcctttcacagactctggttgggcaatggtctcaagctcagacatctcttcaggagtgagtttcactgataaagctctaatgttctggttgaggttttcaatcttagtggttcctggaatgggacaaacatcatctccctggtggtgaacccaagcgagggctagttgtgcgggagtgcaccctttcttctcagacattgcagaaactttctcatagagaatcttgttgtgatccaagttttcctgttggaatcttggtagagcctttctgaa

SEQ ID NO: 133530 - DNA, 582 bp, Arabidopsis thaliana
ttaggacaactatagaagagtcttgacgtcgcctgcacgcgtacgtaagcttggatcctctagagcggccgccctttgttttttttttttatccaaagagacttaattttattgcataagttggaattgttgggggaaataaattacaagtattaagagaggcttcacaaatttgccaatctcagtatattttagccagtgctaccagaaagctcgccagagaaggcactaccatacgatgtggaaccggttggtgtctgtgatgatgttgcgatccctcgagctttccgcatctgccttagtctgaaaacatctgtgggcaaaggctggctttgtacagttgctgtatcatcttcttcttgcctgtctgaatcttttctctttggagctcttctggctcttggtaatctttgagacacaccgcgggttggacccgagggatcgttttgacttggaggattgcctttagcagcaaaactctgctttacagtttgacctgttggaaagtcgctctgcaaacatatcgacagaacaacatccacattgggtgttggaccgttcacaataggcaagttagctaaa

SEQ ID NO: 133531 - DNA, 495 bp, Arabidopsis thaliana
  unsure (1)..(495): unsure at all n locations
nnnnnnnnnnnnnnnnnnnnnnnnnnnnnnnnnnnnnnnnnnnnnnnnnnnnnnnnnnnnnnnnnnnnnnnnnnttatattnnttatattttcnnnnnnnnnannnnnggnnnnncggacaaaattctattataatgggtccatatatcaaaaacttgtcgaaaaagttagcgctggaagccaagtgaacataaccagggttcaaaatgattacaaagctcaaaatttaagataaaccctaaaaccatacagattctaaagagaccgagacaaagcaaaatctgaggtactgggaagagcgtaaagtaaaaaacttctaagcagcagtagcagcctttggctttttaggcatacggtagccaccaacgacacatgcatggtcacgctcaaatggctcaagcgtcacttgctcagctggtttgaattgctcctgttgaagcttcttcacttaagtctggaacacagcttttgctggaacgggggagtccatacagt

SEQ ID NO: 133532 - DNA, 567 bp, Arabidopsis thaliana
  unsure (1)..(567): unsure at all n locations
nnnnnnnnnnnntatagctagactatgacgccgcatgcacgcgtacgtaagcttggatcctctagagcggccggccttttttttttttttttaatactaatacgatgtggtgatatatcacaaatttatgtcacaaatttaccaaaaactatttcaaaagcttttgatgggtgatcaagagagtgcaacattatttataggatatgaaagtaacttaggcaatctgcaaaacccaatctttagtgtcttggatagaaccagtttgtattccgacaagaatagatcgaagttgctgtgtaacaatcccatctccaactttgtactcagtccttgtgttcttaaaagtgatgcttccaacagaagcaactccagcggcagttccagtgcagaaaacttcttcagcttccttcagttcttctaccggaacacttcgttcttccactttgtaaccaagatcaagggcgatttcgattatgctcttacgtgtgatccctccgagaatcgttccgctcgtagctggtgtcactattgtattgcccttcacaaggaatatattagcagcagaga

SEQ ID NO: 133533 - DNA, 432 bp, Arabidopsis thaliana
ctatgacgccgcatgcacgcgtacgtaagcttggatcctctagagcggccgcccttggtgtttttttttttttttttttttttttttttttttttttttggggtctgaaatagctctttttaggggattatataaatgcttcttcatatgctggatttacagaaaatagatgagagcttgtgtttctagatttcagaaggggcgggggaatcttcgatgattgggatacaagatccgacagattctcctttggacatagcctgcccgagcttcgatcgggctttctcatggcgacctagtaccagtgtggggttaaggactgaccaccttacctgcgagtccgctttcttttgtgtgaaccccaaactctttaccaaaccatttaacttgctgatatcggcaaggcctccttcagcataaccatacaggaga

SEQ ID NO: 133534 - DNA, 716 bp, Arabidopsis thaliana
  unsure (1)..(716): unsure at all n locations
aacacgagcttgatgcacgcgcacgcgagcttggatcctctagagcggccgccctttttttttttttttttttttttttttacaaagaaacataactttataattatttatccagaaattctggaagaaaataaagcctatcacgaaatgagtataaaagtgataacggcaacaaatacaaagcagagagatgtcattaaattatacatcatcataacccaattacaataaagtgtctttagcgcacacgcatgcatatagaggagccattatcatactgtatactaccacaaagattctactaattaattaattatcaccagctaatatattagcaatcaaggaaatgatttgaaaagccattaacatctcgtgggtccaagccaatcctcacaagaacacctttggcatctttagggttcttcatgaaataagcaacttgtggcaccggtggacacagtggggccatgtaatccgctggctcgccgccgttgccaaagccaacattgtgaaatggcatttttgtccagtcggagattagggttagctctttgagaggagggagatttccgtcattactacctccgagtgctctcatgtaagaagttatgtaacctgggcaatagatttcttgctctctgatctggtgactattgactcaggtagctcnaagaatctctggggggagccacgagcagcacttgcgtgccgaaacc

SEQ ID NO: 133535 - DNA, 738 bp, Arabidopsis thaliana
  unsure (1)..(738): unsure at all n locations
ctatgacgccgcatgcacgcgtacgtaagcttggatcctctagagcgggcgggctgttttttttttttttttacaaagcagagagatgtcattaaattatacatcatcataacccaattacaataaagtgtctttagcgcacacgcatgcatatagaggagccattatcatactgtatactaccacaaagattctactaaggggggaattatcaccagctaatatattaaaaatcaaggaaatgatttgaaaaaccattaacatctgggtgggtccaagccaatcctcacaagaacacctttgngcatctttaggggtcttcatgaaataagcaacttgntggcaccggtgganacagtgggccatgtaacccgntggnncgccgccnttcccaaagccaacattgtgaaatggcatttttgcccagtcggagattagggttagctctttgagaggaggcagatttccgtcattactacctccgagtgcttccatgtaagaggtttatgtaaccttggtcaattgatttcttggcttctctgatcttgttgactattgactcgagtgttagctcttcaagtaattctctggcggtggatgccaccgaggcaagcacgtatgcgttgccggaaaacccttctggcagcggtgtctccgttctcttccttatgtccactgcgaattgtaaacacaccatggcgtctctcctcaaccctaaagcccttgttcttgtcttnc

SEQ ID NO: 133536 - DNA, 486 bp, Arabidopsis thaliana
  unsure (1)..(486): unsure at all n locations
attgagccgnnnnnnnnnnnnnnnnnnnnnnnnnnnnnnnnnnnnnnnnnnnnnnnnnnnnnnnnnnnnnnnnnncttttttttttttttttttaatttgtaactctcattgctatatagtgaacattaatctattatgagttaactcatttaagacaagcttaagcccaaaaaatgcttgtggatgaaacgaacttgcatttatccaaatggttataagacttcattgtttggaatgtgtcactttctagattcgtacttctctttcctcaacgtatcgaccttttcccattgcatcgactatcttgcaactcagtccagcaccgttcatgtcgtacagtagctgatcgtatgaaatgtgtcctcgctcgcttaacagtctcaaaatctttctcaaaccctccatgtctctttgaccctccagataatccacacagctcatcagcacaacctggtgtggtctccaccctggcttgctcaccttta

SEQ ID NO: 133537 - DNA, 424 bp, Arabidopsis thaliana
  unsure (1)..(424): unsure at all n locations
gcnnnnnnnnnnnnnnnnnnnnnnnnnnnnnnnnnnnnnnnnnnnnnnnnnnnnnnnnnnnnnnnnnnnnnnnnnnnnnnnncttttttttttttttttttttttttacacagcagaatattttatcgcattacaaaacgaactaacatctttatctacagaattgctatgcctctacttcttcctctacttaacaacttgaacagattacaaaggcaaagaacatatctgagagacctggttcgagcaaccaggtgtacaatcaggttcgagcaaccaggtgtacaatcaggttcgaaccgaaatctagaccagaaagttatctcaacacataaatacaactgggttacaaaatccatgattctaatgaagaagcagccaggattttagtaactaacctgagcaattccgcttagccaaaatc

SEQ ID NO: 133538 - DNA, 619 bp, Arabidopsis thaliana
  unsure (1)..(619): unsure at all n locations
aatttaactcgcactatagatagactatgacgccgcatgcacgcgtacgtaagcttggatcctctagagcggccgcccttttttttttttttttagacggcaaagacagggatgaaatttgctgtacacaatatttatgtttttgatctttagattctttactagaacaccgataattgcagaacaaattgacatcatgggaaaaccagacgtggcccaacataaagatgaaacgaaagaaatgggcaaattctacttggttatccagtaaatgaatatgagaaatgtgcatacagccgcaacgagtgaaagaatgattgtatccatcgactttttcctctttatcgctgccagaatagtgttcaccgtagtaagacggctggcgacattgctaagctttgagttgatgcctccaaaagttgaacgttgaaacacaagcgtaccgagtgttgcctgagcttgtgaaatgacaccgtccatctgagctgnattgcgggttgatnccatatggtccntgatcagggcttgtcagaccctatccanctctaaatcnatctagncgntcaaatcncnnaagccccagaaggaacatgccctggttgncaanctgggngngntt

SEQ ID NO: 133539 - DNA, 557 bp, Arabidopsis thaliana
  unsure (1)..(557): unsure at all n locations
aattgaactgacactatagcttnactatgacgccgcatgcacgcgtacgtaagcttggatcctctagagcggccgcccttttttttttttttttttttcacataagccaagtactatcaatatgattcaagaagatttgaatattatgataagaagaatgattcaacggaggaagatccttaaacaactcctcaagcgtaaatcttctgagattcttcgtgttcttattgtaatacaacacaatgggtgattcgtcaacaaaatagcgtgctatgaaaacaagttctcctgttccaatggtacctttgaaatgatacgtgcaattattggtagtttctttccaacgaggaatcgtaatgatttcgcttaaccattctcccatgtcatctagaacccacatttgcaaatctccagtgtcgacgtcaacattcttcgctacggcaattttaccattgtaattaaccaagttccaaccacgacaaaagttaacttgctgattaggtaatttaatgacactaaactcttctgacctcacattaaacctcattaatagagat

SEQ ID NO: 133540 - DNA, 472 bp, Arabidopsis thaliana
atttagaccgacactatagaatgactatgacgtcgcatgcacgcgtacgtaagcttggatcctctagagcggccgctttggtttttttttttttttttttttttaaaaaagatatctcaatacatatatcctggaaagtgtcacataaatattccatacaaaactttgaattccaaactattgaagcactagagagagccacagacatacgttggaaatttacttatgggcaatggttctcaactcaaatacatgtgaacaaaaagctagcaatactctcaagcactgatgttttcgaaacttgcgcttttatctactctcttgaatatccctgcaattacctttccaggtcccaattcgaagctgcttttaagtcctttggataagagagtctttactgttgcctcccattggactggagatgtcacctggcgtgcaagtatcttcttgatcgtgtctggatctgcatgag

SEQ ID NO: 133541 - DNA, 495 bp, Arabidopsis thaliana
  unsure (1)..(495): unsure at all n locations
cactatagattactatgacgccgcatgcacgcgtacgtaagcttggatcctctagagcggccgctttggggtttttttttttttttttttttttggcctaggaacataaaaaattaaaatgctaataaataaggctataagtacaaagaacagaggaacatatattgaatacaactagattcgtatagcttgagaatcctcactttgtaccactggggcatttatatagcttttaggctaccttcaagatcggggacgaccaggagaagtagttcgattcgtcttgtacttccaaaactcatctttcttccccttcggcttagctttaacccgaccggatttgctattaattataccaagtatggcagncttatcctttctgttctttggctttgccttggcttccagaatcgccctaagtttctcataggaccttgggtctggtacttgcccgcttttaaccatcatcttgtggtaaaagaatgcccttttgaa

SEQ ID NO: 133542 - DNA, 372 bp, Arabidopsis thaliana
atttaactcgcactatagatagactatgacgccgcatgcacgcgtacgtaagcttggatcctctagagcggccgctttgtttttttttttcttttttttttttttactcaatcaatcaatctataaaatcataggtgccggctacaagtctacacaaccatcgggccccaagagtttcagttcattattcagtacattacgacaattacttcaaaggtcttaatggcgggatctttaaagtgttgattaaaggaaatcaaatcacgtcaaaagtgacgtcctcttcacgaaacgacctttgattcgaggtctctgctcaccgttgagtttccgaacctcatatcttattttctttgagaacaacctagtcct

SEQ ID NO: 133543 - DNA, 547 bp, Arabidopsis thaliana
  unsure (1)..(547): unsure at all n locations
nnnnnnnnnnnnnnnnnnnnnnnnnnnnnnnnnnnnnnnnnnnnnnnnnnnnnnnnnnnnnnnnnnnnnnnnnnnnnnnnnnnnnnnnnnnnnngggtttgaatgttcatatgaaaccaccacaataagtcaggggagtaactccttacattaacaaattcaatagtaagtagtttgtttggctgtaaagaaagctcatcggtacgctcttttagatataatttgcaactttataaacagcttaaactttactagggatcttcagtttctgtgtcgtatgcttaatcactggaagcctctgactgatggagctcgggtcgctccagactgctaagtcaactgggtaccctttcgcagatagagactgaaatgttgcttctctccaacagttttcacgaagaacagttggtgcctcatcttcgccaaacctataatgcattctcgtctctctcaatctcataagcacaccatcaactctcagccaaaatcgcaagaggaggaaccatgagcttggcatgactctcactttcacagtcagaagtgacac

SEQ ID NO: 133544 - DNA, 618 bp, Arabidopsis thaliana
  unsure (1)..(618): unsure at all n locations
cactatagctgagctatgacgccgcatgcacgcgtacgtaagcttggatcctctagagcggccgctttttttttttttttttttttttttttttggggatcctgatattcttattctcctgcaatctgttgactttatcttctgtctaatttatgtgagagatgtctaagaaactgtagctacaaaactagaaaccttatctagcaaatgcaaaatagccatgattggctaatttatcttctcctcttttgaaacttcaggagcattgaatttacagttctgctttagattccaagtcttgttctgtatcttcagagatgtcatttgatggaagaggattaggcttgtctgtagcaggagcagctactggctcgttgagttccacatcttcacccaagatttttgctgtgaattttcgtgcttcgagatcaagatcgggccattcggttacgattcttcgggcaccctgaagctttggttcctttgtcatgggattattgcaaagatcgattgttctggccttggcttttgtggcggttccacaccaggattcacaccacaacactcttggggaagtgaaaatataggnacagtatgctgggnataattaaggagagc

SEQ ID NO: 133545 - DNA, 585 bp, Arabidopsis thaliana
  unsure (1)..(585): unsure at all n locations
nnnnnnnnnnnnnnnnnnnnnnnnnnnnnnnnnnnnnnnnnnnnnnnnnnnnnnnnnnnnnnnnnnnnnnnnnnnnnnnnnnnnnnnnnnnnnnnnnnnnnnnnnaggaagatcacatgatattccgatatgtatctgtttcatcggccgatagagttcacgagggagattgtcatagtcattttacatgattctagtagaatctttatataaatgtttttggtacgctggtttgaggtattggggacacactcaatagggtacctataagcagctagaagtctgcaaaagctttgacgctgcagctaagccactgagaattgcaccttcaacatttgggctgacacagaaatctccacagattgctagattcctgtttctatcccaaaggcacctctcctctacggctatgcttttggctggaaacgcacttccccatctgtgggctttcatgaaaaagggaagagaactaacaaggcctgagcactgaaactctttgaacatctcttcagatattttgtttagtgtttcactcgatagcttttggaggccggtcttagcaataacactgttggcatagtctgg

SEQ ID NO: 133546 - DNA, 373 bp, Arabidopsis thaliana
gcttgattgaacagacctatagatgagctatgacgccgcatgcacgcgtacgtaagcttggatcctctagagcggccgcttttttttttttttttttttttttttttttggcaactccagaatgtttactattcattatacatgttcaacattgattaaaaactttgaattgaacaacttgttatttcttattgcttttgttcttcagcggctgcatcagtattccagactacatcctttaatccagatgagaagtttttgtagaacttgtgaaactcgagggtatcaccaccggttttcctaagctctaccacatgcaatgatggcgccacttcaaacacctctgtagctacggagagctgacctttacgac

SEQ ID NO: 133547 - DNA, 515 bp, Arabidopsis thaliana
  unsure (1)..(515): unsure at all n locations
nnnnnnnnnnnnnnnnnnnnnnnnnnnnnnnnnnnnnnnnnnnnnnnnnnnnnnnnnnnnnnnnnnnnnnnnnnnnnnnnnnnnnnnnnnnnngacagtcaaaatcttttcataactatacattttataaaatttataggagactaaaaaacatataactttatccctaagtattagagtatttacactctaccatccataccgtcaagaagaccggtccacattcccttaaccggaggaagctgtgcaacgaaggcttgccatggaggataacccactccacttgcccttacacgcccatccaaacgcagagacaaatacactggagagtctgaggaaacattggcaagcttcttctgctcatttaaccacttttcccattccgggacaaaaaccggagtcacccgccacagtttcttccttctctggctcatttcttcatccgcaatgtcagtttcatcaaactccaaaaccggtgaattcccatccgtagcataagccaccacaaccacacc

SEQ ID NO: 133548 - DNA, 466 bp, Arabidopsis thaliana
  unsure (1)..(466): unsure at all n locations
aattgaactgcactatagattnactatgacgtcgcatgcacgcgtacgtaagcttggatcctctagagcggccgcttttttttttttttttttttttttttttggcaacaataatagcggctttggaccttttgatacacattagcatcaatctacttcaatgtgcagaagatattttcctgattaaaccggacctttgagttttcattgtattacaccggtttagcgtcagcacaaagagtcaagacacaactgatacagatgggttataggtagagtcagagaaaccatcctcatgatgtttactctcttcctcttccacttcttcttcagcatcccatagaaaccgagcatacgacgcaagaacattacagtcatcaggagaagattgaacagcttgatcatagtaagactgagcacgaacaccgtctccatgatttttccatatcaaatctccatacataga

SEQ ID NO: 133549 - DNA, 436 bp, Arabidopsis thaliana
  unsure (1)..(436): unsure at all n locations
aatttaactngcactatagatagactatgacgccgcatgcacgcgtacgtaagcttggatcctctagagcggccgcttgggttttttttttttttttttttttttgccaccaagatgtagcttttattttcgattctagtgtacagaacatataattacaatatctggatcttacagaggcaggacaagtaatgaaatctgtcctgaaaagttaaatgatacagagggggctgctgaagaatgtaatttctggtttgctacattcttcaatttctcaataatataggaccaattgtaataacttccaacaatactaaattgtttcggagtttggggattgggctttttaatatacttcttccccattagtaaagtccccatcaagtaactgctccctcagtctttcgcagaggcgggctaaagcttcggatcccat

SEQ ID NO: 133550 - DNA, 487 bp, Arabidopsis thaliana
  unsure (1)..(487): unsure at all n locations
ctatagatttactatgacgtcgcatgcacgcgtacgtaagcttggatcctctatagcggccgggttgggggtgttattttaatttttttttnacacaaaaatttgttgggaaaacttgaaagcaattttacatgaaagtgacattatatatctctccattaatctgaacagagcataagatcccttttttctcttaagtctttacatgtcaataagatacgataggacaaaagaaccatgtctagatgttgaaactctttaaaatcaatttttagtctcaatgtttatgccacgaagaagaggaaaatcatgagaaatgcaatgagtccgaagaaaatcttcatcattagccatcggtttgatgatatactgttgagatacctggccagttggctctgtgcgccttccacatttgctaatgtatcttccatgttttgatcgatcctgattgcaaatttccccttgttgagaaaccatggttgctagt

SEQ ID NO: 133551 - DNA, 519 bp, Arabidopsis thaliana
tgacgtcgactgcacgcgtacgtaagcttggatcctctagagcgtccgcccttgtgttttggttttaaggactctaaacaagtttaatgtaataagtgtatatataacaaaagaaatgtccaaaggtgcattatacatttgcctttagccagaaatttaagagaactgatggcagatgatgctaccatacataagaccattgcagcataagaagggagctcgcctgtacagaagaacctccttatgcgccctcaactaatatctcacaagtttgcaacctccaccacctgggttgtgtcttggccttgtaaattactttctttacccgattttccatgtggtttaactggaccccaacttccttccctattaggttccaccggacaaaatttaccaccctggggttgctccccgacccaatgggggggggggggggataggcaaccggttttaaaatttctattaacagtctttttgtttacttaaaatccatttggtggtttgcggccgttttcttgt

SEQ ID NO: 133552 - DNA, 523 bp, Arabidopsis thaliana
tttaggacggcactatagaagagttatgacgtcgcctgcacgcgtacgtaagcttggatcctctagagcggtcgccctttttgttttttttttcatttataaaatttcaactaatagaaataaatattgtacaatttaagtagtcataaaatgatataaattgtacatagaaactagagaaaactaataaaatggaataaaagagaaaatccttaaacgtcttttatattgggacagatggagacttggtaacattaatagacgttaaatttatggatgccaacaatcggtagggcattgatcaccatcacttgatatgagctttacgttgtatatatgacaatgctcatcaaaatattcggttgctgcctgaaactacacacacctcttctctaagcactctcacagcttctgtgactccatcctcaagagataatatttcagcaatttccatggcacgagcccttgttttttggaaaaagggcttgggatttgggtttccctccccattggggccttttcg

SEQ ID NO: 133553 - DNA, 514 bp, Arabidopsis thaliana
  unsure (1)..(514): unsure at all n locations
tttaggacgnnnnnnnnnnnnnnnnnnnnnnnnnnnnnnnnnnnnnnnnnnnnnnnnnnnnnnnnnnnnnnnnnncttttttttttttttttagtagcacatgctcgtgcgacaaaattttatgatttatgaccacattttcataattaccggcaattttttttaaaaacactatacagtatataaacaatttgagattatacgagcttcaaatacatttttcatttttcgccctttagagctgtcttctactttactttcttttctaattctaccgctaagttagagatatgtcacgaaattgatttgttaaccgaatcaaaccgttacgcggttcttgattttcttcccggtttagtgtttctttgcacaaaattaaattagttacgaatgtcggatcaatgaatcttcatctatggagaactctccgagctgtttctctgaatggacacgtggagctcacaaaccccgctaccaaatgtaaatacgttttcagctcatgacacgtggccac

SEQ ID NO: 133554 - DNA, 559 bp, Arabidopsis thaliana
  unsure (1)..(559): unsure at all n locations
tatttaggacacactatagnaagctctatgacgtcgcctgcacgcgtacgtaagcttggatcctctagagcggccgccctttggttttggtttttttttttttaatgtaactaaacctgattttattatcataccaattcttgggacaacgatgacacaatctttttagcttcatcttactttacagaaactgaaaagggtctataaacaaagaaagaaacaagaactattcatttcctgcgctggggggtagggatctatatcattttaactagatacattctggaggatgggcatagaagtaatctcctcccctcgggtctaacggagataactttccggtgggggggttcccccattccgccgccctggagggggcctccttgacacctcctgcaaacctgatcccaagagagcggttttggttgttatccaagtctaaaaagctccacaatgtcttcttccgggctaaagaaaatttgttttcttaaacccgaagggtgccccgcggaagaacctttaaaaactgtgggccgttggtccccataaagagagaaaa

SEQ ID NO: 133555 - DNA, 471 bp, Arabidopsis thaliana
atactatgacgtaccatgcacgcgtacgtaagcttggatcctctagagcggccgccctttttttttttttttaaccaaaatgccaatttttgcacttaatgtaacaaaaataaacaaggatctctaaagacatacacaagaacagaagaatatctctcactttgaagcatctccttttcattctgtcaggaacaaacaaagatattgcaatgcagaaatcttttaaggcaatatttctcttattttattatacattgacaagaattagagttacaacagtttgatacatacatacatagtacctcctttggtcatattctttttgttgttgcggctccacaaaatcttaacccatctcgcgaggaaagattgtggcctgtggcaatctcattttctgagagcatctgatgtgagaagtcccatctgttcagtaagatggctcatttgttgattcttgctccacacattact

SEQ ID NO: 133556 - DNA, 493 bp, Arabidopsis thaliana
  unsure (1)..(493): unsure at all n locations
nnnnnnnnnnnnnnnnnnnnnnnnnnnnnnnnnnnnnnnnnnnnnnnnnnnnnnnnnnnnnnnnnnnnnnnnnnnnnnnnnnnnnnnnnnnnnnnngattatcaagattccaatttctgagctaatcaacaccccgacacaacaaggaaggcttctttagagctttgatcgtagtgtgcatgtgtgtgtatgtatattgtccgaacgtatgataaaaacatatagcatatgtgtctcaacgagaggatttcatattacaaacttttgcatcaatctttattttagactcctaaggccaacattgccagcaaggaaagaccgagatttgcagcgttggcaacggttcctgaagcaggaggaggatgtgactgagctcctccagttgcattggaggcagccaagtttgcaactggaggcagaggcggatcaatcacgtctttggcctcaagaggcgggtttggggcactagctggtgggtgtgcttccttgtctg

SEQ ID NO: 133557 - DNA, 510 bp, Arabidopsis thaliana
  unsure (1)..(510): unsure at all n locations
cnnnnnnnnnnnnnnnnnnnnnnnnnnnnnnnnnnnnnnnnnnnnnnnnnnnnnnnnnnnnnnnnnnnnnnnccacgcgtccgaagcttccgtttttcttcatcttattctttcaaaatctcaaacccataagggaaaaagaagcataaagaggcagaagaggaaggtggtcatatgttcttgctttcgccttgatcaatcatacagagatgctgaggtttatcatatttttctccctttttatacacttatgtgttgcagccccccagactcctgctgctgccgcggcggttcctgctaagaaatggctcacccttaatggacaagagcctgccgttgtggccagagggggcttctcgggtcttttccctgagtcaagcgcctctgcaaacgacttggctattggcaccagctcgcctggcctcacaatgttgtgcaaccttcagatgacttaaggacggtgtgggcctttgcttgtcagatatcatacttgacaatgcaaccaccata

SEQ ID NO: 133558 - DNA, 541 bp, Arabidopsis thaliana
  unsure (1)..(541): unsure at all n locations
atttgaggaccnnnnnnnnnnnnnnnnnnnnnnnnnnnnnnnnnnnnnnnnnnnnnnnnnnnnnnnnnnnnnnnnnnttttgtgtggtggggttttttttttttttggatcaactggagctttatttagttaatagcacatagtctatatacgcctgcatatcaccagactgagaacaagttggatacacatgacaagttctagtatatacattaactaaaattggacaatggtggggattgctgcggaagtatttttcctatataacacaaagaaaacttatattgggagctgattcacttcatcgagcaagagctttgtaatgccatcagaattggtcggccagttgaggaaatttctgcagcagccaggcaactccctttatagcagccagaactgtttctccaggtttgattgcaggctcaacgcagtctcttccatatacgatctgtctcttcccatcaatcacctctaaccggtaaaagctgcaacctttgctaaatgggaagttctttcctttccattctaaatgccatgaaac

SEQ ID NO: 133559 - DNA, 688 bp, Arabidopsis thaliana
  unsure (1)..(688): unsure at all n locations
ttaggacgcacttagaatagcttgacgtcgcatgcacgcgtacgtaagcttggatcctctagagcggccgcttttccttttttttttttttttttttttcaagagaaaaacaaccaccaggtttgggtttgtatacatatataacttaggttgtgttacaacttaaaacatcattgcacatcctaaaaaatttacagcgacagatgtgtttttgttgtgctcttctttatccactcaagtaaccatcatcactataacttacccaatctagtttgggtttggcttccacacggaacatgtagccatgggtcgtctcttccagaagaggtagagcgctccttcatggcctcccagtttgtagtttttgtcataagctttcagcatctcactcgctgcaaacgctgcagatgtgctgaccggccaacccgtgaacccagccatcatcattctgaccctccatttccccagtacactcgtgtctgctctactctctgctgactcctcacatgctatcatgttcactatgtctattgctacacagncgttgatctgcgctgattctctgcttatatcccgtggccgtgctgcatctatcgactcacacatcgctgtgtagtaatccagtgtttccacaaaccgcgacaggaatggcgaggagtttgtgttggattcttgctctactagagta

SEQ ID NO: 133560 - DNA, 469 bp, Arabidopsis thaliana
ttgggacacactctagaagacttatgacgtcgcctgcacgcgtacgtaagcttggatcctctagagcggtcgcttttgtgggttgtccttttttttttttttatgacaactaaatatacttttatgtgatataaacaaggactattcacttgcacaagatagtcatagattaaatacaagatgcgtgccactaggtccaaataatcaaccaatcggaattgccgggtcgagttatatgacgcgcatcttcagaggtttttctttctgagggtatcaatgaatcttttctgtgtaatatcggttctggatatataatcaagaaaatcggggaagctgatttctccattggcagcgggtttattttcatggacgagcgggggggggggactcattttcttgggcatggggagagggggaaacctgggaaaaaagagcgctttgaatctttggcaccgggccccagaaaaac

SEQ ID NO: 133561 - DNA, 563 bp, Arabidopsis thaliana
  unsure (1)..(563): unsure at all n locations
accccgaacccggccccnnaacccggccccatccnannaaagntaaaaagggnngcccgggtttcnaaaaccgnnatgtaaaagggtncatgaacactttaaaaattgattgcttgcaaaatagttttgtcagccaaaacacaacacaacagcttgataaatattgtagagcttcaaacgattagactgcaaaagaccttcaaagttcttcaccaaatttgacttatgcctaacggccctaatcatcatcagcttcagatcataaagacatttctttcttttctttatattcctccagagttatcagtgactccttgtttttggtccaatctgcaggtcttggcataattatcgcaatatacccttcgcggtcagccgttgaattaagaagctctggttgcttaatcaatctctcgttgacctccaagagagagcctttaacgcagcacctaacaatgtaagtatcttttgcagtggaaactttgcacaatgctgtattcgattcagagcgcaacgcattctttttacgcttgccggagactttcaagacgctacgatcagac

SEQ ID NO: 133562 - DNA, 509 bp, Arabidopsis thaliana
  unsure (1)..(509): unsure at all n locations
nnnttaggcgcactatagaatagcttgacgtcgcatgcacgcgtacgtaagcttggatcctctagagcggccgcttttttttttttttttttttttttttacgtctcaagatactgtatagatcaatttatcagtttccatgaaaaatatttttttgttgttgttgtggttgtttacatgaaggtttatctgggagctgtggaagaaggcaacattgacgacaaaggacaagtttggagatgtgcatacaagattgatgaagaagaattataaggaagtacctcaatggtggttcgttgcggttctcgctgcttcctttgtgctagctctttatgcatgtgagggatttggcaaacagcttcagctcccatggtggggacttttactcgcttgtgccatcgcctttaccttcactttgcctattggagttatcctagcgaccacaaaccagcgaatgggtcttaatgttattctcggacctgatcatcgggttcttgtatccgggaaag

SEQ ID NO: 133563 - DNA, 509 bp, Arabidopsis thaliana
  unsure (1)..(509): unsure at all n locations
nnnnnnnnnnnnnnnnnnnnnnnnnnnnnnnnnnnnnnnnnnnnnnnnnnnnnnnnnnnnnnnnnnnnnnnnnnnnnnnnnnnnnnnnnnnnnnnnnnnnnnggcaaaaacaaatccattgtatttcaactgatatgtctgtcaaagagatctatttgcacactgaaacgcaaattcaatgcataccaacacttcaatatatcagtaatctaaaagcttgaacattctttataatagaaaagcaaagctcagacggtgctgaggtgaaccaaagataataattgcgcataacacattgatttgatccttagtaatacgccttcctgggatttcccagtggattgggtctgtgtttgtaacccagcatcatccgcttcttgtactgctcgtatatatcatcctcaggcttgacttctcctggagcggaagcaccaactcccaagttgtttgtctttacatcgcctgccattatagggtctgccataccctttctggagcttcctatacct

SEQ ID NO: 133564 - DNA, 600 bp, Arabidopsis thaliana
ttaggacaactatagaatactatgacgtcgcatgcacgcgtacgtaagcttggatcctctagagcggccgcttttttttttttttttttttttttttttttgagagagaccctaaccaaataaacttctacagaagattaaatttacacaaacatcacacaatacatacattaacaaaatatacacacaattttagaggtaaagtgaaaaggttataaaacccaaaactcttgaaaagatgagtgaccaaagagaagacatttcaagattctagaagggaagcaaccatccaacagtccaacctaagagcaaaccagcaccaatgagactaaaccctaatgcaaaagccatcatatatctcccagtctcaccctttttcttcttctcccctctctggtttctcttcttcagattcattcctttgacctgttcctcttgttcttcttccttcttcatctgcagataaagagcttccatttcaagaagctttaaccattgcttataagccaacatctgactggcttgtttcaacaagattgttatcacacggtctttctcagcgcaagcttctctgcgctggtctctctgcttctcttgccc

SEQ ID NO: 133565 - DNA, 545 bp, Arabidopsis thaliana
  unsure (1)..(545): unsure at all n locations
nntttaggcgaactatagaagtagcttgacgtcgcatgcacgcgtacgtaagcttggatcctctagagcggccgcttttttttgggtttggggtgtttttttttgggacaaatcatgcgattgtataattttatttacgttacagaaagaattctggtataccaacaataacctggaaatttgtgtaccacatatgccaacactaaatttaagccgcaagcaacttctggatgtccttctcgatttggaaaggagaagttgtgggagggtatctctcgacaactttgccctttttatcaaccaagaatttctcaaagttccatttgatgatatcaccaaggaaaccaccagcattggatttcaagaacttgtagattggagctgtgcttggtccattcacatcaaccttgtcgaatatagggaactctgctttgaaccgggtgcaagcaaattgcttgatctcagggtttgaaccgggttcttgacctccaaattgattggaagggaaagcaagaatctcaaatccttggttcttgtatttttcg

SEQ ID NO: 133566 - DNA, 535 bp, Arabidopsis thaliana
  unsure (1)..(535): unsure at all n locations
nnnnnnnnnnnnnnnnnnnnnnnnnnnnnnnnnnnnnnnnnnnnnnnnnnnnnnnnnnnnnnnnnnnnnnnnnttgggtttgggttttttttttttttttttttttttaaagaaacttaatttattctcctgatttgttatttaagggtttagagttttacatcagaagttaaaatatcttacagagtaagtaaacactcaaaagtacataaacaaaggagagggactagtcatggtgttgctccgcgtggttgagatgaagagcaccttcatggttcttgtgaacttccaccttgaacttttcctctttttctcccctcttcaacttcagtagcatgttgttttttgcagcctcgccggttacctcagctttagcatgcacaacctccagaaagttcataagggaacaaggagttagacctctgctgaatggtcttgacagcctgctcagcaacatgctcacttctggatcatctccggggaattncctccatccagattcaggtcactggctgcagccaagacggngggagga

SEQ ID NO: 133567 - DNA, 625 bp, Arabidopsis thaliana
acacactagacgagctatgacgtcgcatgcacgcgtacgtaagcttggatcctctagagcggccgcccttttttttttttttttttttttttttttttttgatagctttttattgtaatagtaaagaaaatccaaatctttaggtattacaatgatagtaattgttgaaactcccctattatttttgattgacttaaaagggagtccaaccaaaagatattctagacaaagcctcaaaaaatagccaagatcaaatcacaaatcatacacatctcagttgagatgaaaaacaaaacaaatcacatatgaaaccggagaaaaaaagacatatttatcatgtatgtatatatagggttcatcttaatcgaagaattcccatttgaatcgcggagggaccggtttaaccgtttcagccgccttggccgtcgatgcggaatcaaacatttcccattttgaagctacaaccgccggagtacctgatgaggatgatgcattggaattcctaggctcctcctcctcttcctccacaaacgataacaaatcgcgttgctcaaatcgcgtttgcgtttgcggtttgtggcggacggacttggtgacttcaacttttttggcagagttttttgac

SEQ ID NO: 133568 - DNA, 530 bp, Arabidopsis thaliana
  unsure (1)..(530): unsure at all n locations
tgattctgccagctgctnnnnnnnnnnnnnnnnnnnnnnnnnnnnnnnnnnnnnnnnnnnnnnnnnnnnnnnnnnnnnnnnccacgcgtccgattaattgttaaaaacccacaaaatatctacgaaaatggaagaattagaaaaaacccagaaatttcagaagatgaagaagcaacaacaagagaaacaagaccagtcttcaccaatcaacttcgagatgtcttcaagatcatcacttcattcattaccacaaacaacgattgaatcacctcctgattcaccaaccctctcttcaatccccgatagccatggatcttctccttcacacgattattccaactccttctgtggccaagacggagactcctttttagggtttctaacggagaggaggagaagaaagtcagcgagagtaggagacaaattgagaccgagcttttcttcttcttgttctactccccgtgaatcgaaatgggcaagcttgattacgaaagctctacttggatttagggttattgcgtttgtttcgt

SEQ ID NO: 133569 - DNA, 525 bp, Arabidopsis thaliana
  unsure (1)..(525): unsure at all n locations
nnnnnnnnnnnnnnnnnnnnnnnnntgacgtcgactgcacgcgtacgtaagcttggatcctctagagcggccgccctttttttttttttttgattccccttcattattgttttcctcattttgggcaagacaaaataatatattcatgtccaacactaaccaacagcccccaaacttgatggttcaacggtttgcaccatctggggcgttgtggttgctcactggagcagtactagaagactgttgctgatcatctgaaagagcttctgtaggttgcaactgactgctcgaaccaccaatgggatcagccgaactctgatcaactgacaagtttccaagtcgttttgccactgcatctgccctatcaacagattggggggccggaacctgtaggggttcctccttagcacccaattttgccaattatcgcgcttccttatgaagtcaccctgcacctcaacatgaggggaattttgaagagccctccctatcgctggatattatctgaaagtcctgaaccttttt

SEQ ID NO: 133570 - DNA, 566 bp, Arabidopsis thaliana
  unsure (1)..(566): unsure at all n locations
ggccgcccttttttttttttttttttttaaagaagaaaattttatatttgtattaatcaactggagacctaaacgtttttgtatagttttattcagaacaatttagaagaaagaattaatcaagaaaaatattagcagaggaagaaggagcttctcaagaacttgaccctcaattccagaattacacaaattcatcatcatcatcatcatcatctctgcagattcttggtttattctggaaccttatatgcatcatgtgtcacttcagtcaaatacaaccctggaaacaaactatcgagttttttctgaacagttttggaccgtttcttgggccgacgcggtgctcggtgacctaccatcccaatggaaatcttcttccatctccttcttcgatagcttcatagagaacataggacgcttcttctccgnttcgaccaatccggcggcggctctcaccggggatggntcttcacnaccttctccccatcacaatnccttatgngcaaacggtggntccggtcttaaaggggnggctccttcctaantcanggtacgggganancctt

SEQ ID NO: 133571 - DNA, 491 bp, Arabidopsis thaliana
ccactatagaagagttatgacgtcgcctgcacgcgtacgtaagcttggatcctctagagcggtcgccctttggtttttttctttttttttttttcttttaatatacactaacaatagattattgatcctgacgacaaatgcaaattacagagataatccacataccttaaacattattacttccataaaaatgaagttaagaattcaaatatttcattaatttccggcagggaagagcttaagcatcttcatactaccatgaccatattccgaatcttcatacctcagattacgaaccacttggttttgctgcgtaatcacatgtttccccatatacgaatgctccaatggcggcatcaagtaatccgggcgccaagaattgagctggaacccggtgagctagcaaatagccgatcagtagccgaatcagagacgatgacgtgtcctccagggattccgttaccgtccccgcttgttttctccaaagaaaa

SEQ ID NO: 133572 - DNA, 824 bp, Arabidopsis thaliana
  unsure (1)..(824): unsure at all n locations
tttaggacnnnnnnnnnnnnnnnctatgacgccgcatgcacgcgtacgtaagcttggatcctctagagcgggcgcccttttttttttttttttttttttatacgaaggtttatcttatttgaattttagattttagaatccccatgaatttggtttggactctaaaaaggagaagagaagttacaaaagataacaagataagagacacataatttcataattaagacttttagcaaaaatacataattaagatctaccataacaacgaaactgaaaacacgtaaagatataaattagaacttagaaaactggatttgagatggacagcttcctctaggcaaaactggacattcgataaactcagttcctgacgtatcaacacaaatatagatctgatgaagctgggcattacgctccggatctttggtacattctattcctggcggacatccaattccatcttttatcggcgtgggggatcttatccagattgtagaatccatcatccggatcatttccggagtttttgaggatttggaggaaatttgcctctttgtttgaggttaagagcatttcaaaagtactcatgtcggccccttacggattccggagatgtacccggtctctccatggcggggtcgcaaaaggtgacccttgggtgctgggaaaagagggggggggccactcgtttttgaaccatcctgacagaagcgcgatgggggtcgagcccacccggcgcctgggggacgcagcctgccgcgcctgacggacggtgtcccgtgagttgaagcgggtccccgtcggcaggggcgagccccgtaggc

SEQ ID NO: 133573 - DNA, 489 bp, Arabidopsis thaliana
ctatgacgtcccatgcacgcgtacgtaagcttggatcctcttgagcggccgcccttttcctttttttttaatatttcctcgctctgaaaatacattatatacgtctaagaatctactgcttacctctttcaaaaacttcagttcaagcagtcgtatctcatacaactcataaacaaaaaggataataaattttctcacatgtgagggcgaatgagaaaacttcaaccaggaagaagagattggttccttttttagagaatcctggtaggcttttataatattccatcccgagccccagaacctggaggaatggcctgttaaggtaaattctaccagggcgaaataagtccattcctctaaaccccaaacctcttgatttttttgacctttattaaagggatgtggagaaggaaccaatttgctggaccatgaccacttcataactcaagcttcgccttggttcttcttttttaaaggggctctggaaaa

SEQ ID NO: 133574 - DNA, 487 bp, Arabidopsis thaliana
  unsure (1)..(487): unsure at all n locations
cnnnnnnnnnnnnnnnnnnnnnnnnnnnnnnnnnnnnnnnnnnnnnnnnnnnnnnnnnnnnnnnnnnncttgtgtgttggttttttttttttttggggggttttttttttttttttttttttttnggaccagtaaacgattttgatactttattaacaacttgaagcctattcttgaatacatcttttcttgcagtttgcctctagacaagaccaacacattggtcccaaagggggcgtgtgaacgaacttaaaagaatcatgtactggtgatagaaattgatgcttttattcttgcgcatataggctccaggctgggcctatgaccatcatttcttctggtcttaggggtatatcggctctatggaatctgaacatctcaatggcggggggggtcaccctcgggttcccgtttatggaaaaaattgggaggttcatgcacccgcattgtaaagcaagcaaccctgggtcacataagttcctacaag

SEQ ID NO: 133575 - DNA, 598 bp, Arabidopsis thaliana
  unsure (1)..(598): unsure at all n locations
nnnnnnnncactatagatanactatgacgccgcatgcacgcgtacgtaagcttggatcctctagagcggccgcccttttttttttttttttttttagatttaaatcatcattttgataagattaaaaatttacaaatgtatgataaattatattttgatgacatatacaatttggtattacaaaaaaaattgatatatacaatgaaaaatatattgctgtataacataagatataaagtgaagtgtatatataattttttttcccaaaatcatttaagttgctattttttctaatttctcatatccagctccccattgtttcattctctccgaagcttgttccacctctttgttccaattggttatgtagatcatgtacaaaagtatgagagtctgaagactagtcccacatatcataccaatccatatcccctgtacgccaaggcttgttttataacctaacaaaaaccctagaggtaatccaaaagcgtagtaacaaaaaaagttaatataagccaccggtgcttgccatcctcctcctaatggaactnctgatataactgggtgaaaactggtgagaatatcggtataccgaaca

SEQ ID NO: 133576 - DNA, 739 bp, Arabidopsis thaliana
  unsure (1)..(739): unsure at all n locations
atagagagctagacgtcgcatgcacgcgtacgtaagcttggatcctctagaccggccgccctttttttttttttttttttatcaaaaggtaaaacctttattattgttattattatacctataaagaaaggttcgcaggttaacatacgctaaaatgtaaaccagaattctaccctagaaacccgaaaaagctttgatttttatgattttcccatataggtgggctctaaagatcactccggttcttcatatgtgagcataccgcttgaaaacctgcttccccgccacaactgcaccagccgcaattccgccaaaagcaccagccacagccgcagatctcactcctcgtgctgccctaaagaccgctccagttcccagaccagcgacaacactggtccaaacatcgtccttatcagttaccgccaccacaccactctcaatccctgcgtagatcaacccaacaatcccaaccctattaccccaagtacgacctgcctgaccaagacgaattcaaaatcctggtgattttcaagcttcggcggggctccaattttcgaaactcttggtnccaggngangatccagctgaaggaccggggncaagagcgggttgantaaccggcccctgtgntgaaagtgggaattttccccatgattggnggtngttngaggcctncgggaaagaaattccggggagtnggacgtnnnntnnncnggggtttgnngggcctggnannttg

SEQ ID NO: 133577 - DNA, 997 bp, Arabidopsis thaliana
cgactttcttagggaaacctggtacgcctgcaggtaccggtccggaattcccgggtcgagccacgcgtgcgcccacgcgtccgcttgcagaaagatcgtccattggagaaaccatttgaaatttcctgaggatgcgaagttttcatctgaggcaaaagatcttatctgcaggttgctgtgcaacgttgaccatagggcttggtactgggaggagggagcccagcaaatcaagggatcatcctttgagatcaaggatggttggggggggaaaaagctctatcgaaatgggagggtggcgtaccaaccagaaggtggaccgaccaggcttagattccacaaaatttttattgaagtttggagaaaggaaattctcctgccccctgaaaaactaaatccaggctttccaggaaaattcctttttggtcccaaagatttaaagtgttggtgggtacccataccaaaactttaaccctgaaaaaggttccgtcgttccctgggaaaggcaaaaacttggttctaaatccatccccatctgaggcatccttgtgggcttattacggggggaaccccaaaggcccaatgggtttcttcggtgggggatccatggatatttgaaaaaacccaccaaagattaaatccttccgcggggtggggtcttaagccctttaaaaaaaaaaacctgcccccgcccccagggttaaggagaaaaaaccaaaggggtgggggaaaaaaaataacaagtggcgccctctcttttttttgtgttaaaaaaaaacccccggagggggaaaaattttgggtgggggtaaggccccgggttataaaccgcccgggggggtgaaagtgccctctcttggggagtttagcaccttttttttttcttttttggggggggggggcaccctctttaatttgccccccggggtgggtgttttttaaaaaaaaagggggcgtttaaaacccatccccccccgcgcgtattttatttgccaaaaaa

SEQ ID NO: 133578 - DNA, 656 bp, Arabidopsis thaliana
  unsure (1)..(656): unsure at all n locations
aagaactccnnnnnnnnnnnnnnnnnnnnnnnnnnnnnnnnnnnnnnnnnnnnnnnnnnnnnnnnnnnnnnnnnnnnnnccacgcgtccgctgatacaagagaagctggcgcagtccccaggaacaacttcagcattggcagatgaatcgcagaaaactagcattttcaactgtgggaacaccggactatattgctcctgaagttttgctgaagaaaggatatggcatggaatgggattggtggtcattaggggcaattatggacgaaatgctcggtgggtatcctcctttttatgctgatgaccctatatcaacttgcagaaagatcggccattggagaaaccatttgaaatttcctgaggatgccaaggtttcatctgaggcaaaagatcctatctgcagggtgctgtgcaccggtgaccataggcttggtactgggaggcaggagcccagcaaattcaagggttcatccttgggttcaaggatctgtgggggggaaaagcctcttttgaaatgggggcttgggtacaaccccgacgtaaccgcggggcttggttcccaaaatttttttggggttttantnngggattnnccngncctnaanacnttgtcnaggcntnccnggngttttttttcccccaggttaagtttttggg

SEQ ID NO: 133579 - DNA, 766 bp, Arabidopsis thaliana
  unsure (1)..(766): unsure at all n locations
aancccggccactttnggaggcaccgngggcctttcgattccccnttggaaggggnttcncaagcgttagtgggaccccgggttcccngnccgcgtttaaacccccgccnggaatggatttggggcccttttggagggctttacgtcccatgcacgcgtacgtaagcttggatcctctagggcggcccccccttttttttttttttttttttttttgcttaaatttccaatgcttttcagatactttgatcgtgtgatatactaattacaacccaattatctgagttcacaaataaagataagagtctgaaaaagacagacaaacaaacaaaaaaatgcaccaggaacaagagaattatgatcatttacgtacaaataaacggagaagaaattattaaataaacaaagttggtctcttattatcttcgtctgggtcgggcattaatgggagaaccagatgattgtgagcctctgtagtttctgcttggagaatccattgatcctctaaaggaagagtaggtagctttgggtaatggaggcgttgactctaatggggctgactctgcaaagcatgctgtgttcacacgagttctctccaactcttgttgtagcaattcgcttgaacactggttcgttagagcgaggaggtcatctgctgaaacagattgctggcaccgtaacaggcctcgctgcncgagttggcnacgatangcccnggggcccnntgntcnctgngcccnaagganncaaacgncctgnaagttaa

SEQ ID NO: 133580 - DNA, 699 bp, Arabidopsis thaliana
  unsure (1)..(699): unsure at all n locations
gnccccctaaaancggcggcccagtgaaattgaatttaggngcccctttagaagngncttttgccgcccccatncaccgcgttccggtaagccttgggnccntctnagggcggcccccccttnnnnatgacntngtntttttttaaattncccaaatgncttttccnggatactttcgatcgtgtgttatcctaaatttcctcccttttatcggagttcacaaataaagatgggaggctgaaaaagacagacaaacaaacaaaaaaatgcaccaggatcaagagaattatgatcatttacgtacaaataaacggagaagaaattattaaataaacaaagctggtctcttattatcttcgtctgggtcgggcattaatgggagaaccagatgattgtgagcctctgtagtttctgcttggagaatccattgatcctctaaaggaagagtaggtagctttgggtaatggaggcgttgactctaatggggctgactctgcaaagcatgctgtgttcacacgagtctctccaatctcttgttgtagcaattcgtttgaacactgtttcgttagagcgaggaggtcatctgctgaaacagattgcttgtcatctgaaactgtgtcttcgctgccactagttggtctacgattatgccctggggtctcgactgcttcactgatgctctctatagctatctccaac

SEQ ID NO: 133581 - DNA, 725 bp, Arabidopsis thaliana
acctatcgatgagctatgacgtcgcatgcacgcgtacgtaagcttggatcctctagagcggccgcccttttttttttttttttgattcagaaaaagtatatactctgttgttatttatactatgagacaacagctaagttatttacatatttcctcatttcaaatctgtgaacctgaagaacacaagaatgcagctcatgatcaaaattctgaaagaagcgaaacttcgccaacccaagatttaagaacagctacaccatgaatagatatttgagatcatcaactgttaatcgagttgcagagcttccaccatgatcttcaccaaaggcagacgcaaccatttttcttttctcttcctggagagccaaaattctatcctccacagtattttttatcgtaatacgagttacagtaacaggtcgagtttgtccaattcgatgtgctcgatcaatagcctgatcttcagtagttggattccaccatagatcaagaagaatgacatgacatgcagcaatcatattcagcccaagatttccagcttttaaagacattatcatcacttttacctgtttaagacaaaaaaacaaaaaaaggagggaacacatacaccaccactaagaaaattgtttagggaaaaaagggttttttcagaatattggcataccggactttaaccatcttgggaatcgctttgccttgaaaatttctttttcaacaaggctttt

SEQ ID NO: 133582 - DNA, 705 bp, Arabidopsis thaliana
  unsure (1)..(705): unsure at all n locations
ctgtgacgccgcatgcacgcgtacgtaagcttggatcctctagagcggccgcccttttttttttttttttttttttttttttttttttttttttttttttttcaaaaaaaagtatatacctctgatgttatatatactatgagacaacagctaagttatttacatatttcctcatttcaaatctgtgaacctgaagaacacaagaatgcagctcatgatcaaaattctgaaagaagcgaaacttcgccaacccaagatttaagaacagctacaccatgaatagatatttgagatcatcaactgttaatcgagttgcagagcttccaccatgatcttcaccaaaggcagacgcaaccatttttcttttctcttcctggagagccaaaattctatcctccacagtattttttatcgtaatacgagttacagtaacaggtcgagtttgtccaatacgatgtgctcgatcaatagcctgatcttcagtagttggattcccccatagatcaagaagatgacctgacatgcagcatcctattcagcccagattccagcttttaaggcattatcatcacttttaccgggttaagccaaaaaaccaaaggggggggctaccccccctaggaatggtaggaaatgttccgntggncggtaaccggcgngngntcttcagccgccnggatagncctggcncnactcggtnaactt

SEQ ID NO: 133583 - DNA, 649 bp, Arabidopsis thaliana
  unsure (1)..(649): unsure at all n locations
tatactttactatgaaaccgcatgcacgcgtacgtaagcttggatcctctagagcggccgcccttttttttttttttttcagaaatgattctaagccctattaatattcccaaatgagaggataagttaaataagtcagatgcagtcaatacatcttcaacattgggtttgttatattagatattaaaagttttacaacttaatattagatgaaatgaactacacatcttcattgtcttttggcacttctatgttgctctcttcggcgaccaatgaattcgactcaacacaagttccttcaacagtagcaacagttgtaccatcggattcaccgtcaagcctgtctgatggattctcggcatctttttcctccgtcttcgggagggatgaatttgaatctgtgtcttcagtaacaacggtttctaagtgaacgtccatacctcccactgcatctggggatggcggaaatttaacttcaggttgtgatgaacatccgggagagacatcaactaacccacatccggagttcaatggntcttcccccanggnagttgccaactgaagagccngagggccnctcagnaaatggcacagattcgccccgcatgggaaanaagggtctacctcagaacccggtcaaggnatgggc

SEQ ID NO: 133584 - DNA, 719 bp, Arabidopsis thaliana
  unsure (1)..(719): unsure at all n locations
ggattgtannnnnnnnnnnnnnnnnnnnnnnnnnnnnnngcatgcacgcgtacgtaagcttggatcctctagagcggccgcccttgttttttttttttttttggcagtgaaaaacatattatctgattgggaatatagaagtgaattaaatgtgtgatcctcaattcctcatactacataaggtgcaaaatgaatttctaacataaagattataggagttttaaaaacgagggggtggccgcgaaaatagctcaagtaaaaaaaatatctggaatttagaagaatgcaaatggcttcaggacaactttaacttctagtaaggtaaactcgaggttcgggtaatcaaaggaagtgtctccccagtaacatgctcaccaccaatgacaatattgcccctttcccttttcttttccccgttaccggagaacccgaaattgctaaataaccaggggacgcactatccggggcccccggagaaaccggaaccaccggggattatcccttcctcccccgtatactattcccacccacgggaccaccacaataacacctttaaagaaatggttaaaagacacccaaggaataagcctgactccattaggttaaacaagcactattctcctccacgggggacaagtttaaattcttttaaaagggcaaacacgaatactaaaactttttagcgttaaaggcgtttattttttacccccaaaaaaatt

SEQ ID NO: 133585 - DNA, 956 bp, Arabidopsis thaliana
  unsure (1)..(956): unsure at all n locations
nnnnnnnnnnnnnnnnnnnnnnnnnnnnnnnnnnnnnnnnnnnnnnnnnnnnnnnnnnnnnnnnnnnngcttggatcctctttagcggccgcccttagctttttttttttttttttttttagttggtaatcctcatgggggtttttattattattatataacaagaacaaggaggccaaaattgagtcgatgaactctataaaactcataaactacatataatcagcctttctttgatttcgaatccaatgctcaacaaaggcctacctgaatacaatcactttctctccaccaacgtccaaagcttctttactctgcttctcactttctcgccccaccgagcactggcttaaaatcgaaatggtcacctgatcgcctgccctggttcccattgatggtggagcggctgccactccaaacattgacttggaaaaccctgcttttcttaagcacccgcataggcggggtgggcccccctttgaaagaaatattcctcgctttggggtccccaccgctgcctaaatgggttaccaaccgaacatccccctaaaggcatcgggaaaaatcccttgaagaaatttcctttaacattttttccctattaccccactgttccctcccacaaatccaccttcccaggtgggttacaacaaattttttttttttccagttagaaaacaaacccgaaccttggattatcttttttaacccccttttggccttggcccccaaaactttttccacaagctttccgcaacaaaggtgccaccccaaattttcttaaaaaaaaaccatccaaccccaaaaaaaaaacctctccccacagaacccctaaaaagccaaatgtgtgatctaaccccccgaaaaacacctcccgaaagcaaaaaataaccctgaacacccaccacacccaaaatgaaaccactttttaccacccagggtaccccttatccccc

SEQ ID NO: 133586 - DNA, 592 bp, Arabidopsis thaliana
  unsure (1)..(592): unsure at all n locations
atgacgtcgcatgcacgcgtacgtaagcttggatcctctagagcgtcccctttggttttgtttttagtaaaacacaatggattgactcataaaaatgaagagaacacaaacgggaaaaacaaaaagaagttcttaatatagtataaatctaggtatgagctatacaaagctcaatatccactattgtattgaaaacaaagaaaagaaacaaaactcatttaaggctcttacaaaattttaggcatacatatggaaggaaacatacttcctcacaacttggccgattcatcctctgacactcttcaacatttctattcttagttccttactaagcagggcctcaagaaacaaaatggagcttctttagcttcttcccttgcttatgtcccgaatatatgtctgtgaactggttgtgtatccaaattcttgataacctccatccatggtttctctataaccaagattgcactttttgatagatggcgggaatatagaactgggtgctttgaggttaccatttcaaacttctttctcttattactcttactctctttntgatactcctctaacctacgtttttgagcaccattcc

SEQ ID NO: 133587 - DNA, 457 bp, Arabidopsis thaliana
  unsure (1)..(457): unsure at all n locations
acgtcncacgcacgcgtacgtaagcttggatcctctagagcggccgccctttttttttttttttttcttttatctatgaaagttacaggaactttctaactatagattacttgggaaggaaacaataacagataaccattaaatctacacatacgccatttacatggggacatggcactccttgttttttgaagaccggtcttttctttgaccgccaggaataccagagatttgtacacctctactaagggctgggttaaagagcattcttgtctggaactcacaccaaagggaaccccgccaaaccgcgagggggggaaacaaaaccacccctcacaatctcgaccctcgagctaggccctaagggaagaccaatccctaggtggggaaaaaaggtacccccttggcaaggaaaacatcccccacccggggcaggaaggcacccgcaaaaaaaagc

SEQ ID NO: 133588 - DNA, 494 bp, Arabidopsis thaliana
  unsure (1)..(494): unsure at all n locations
atgacgtcncacgcacgcgtacgtaagcttggatcctctagagcggccgcccttttttttttttctttaaaagaaaagaagagagcatgatctctaaccaaatcaatgtacaaaacttttagggcggcttcttttctcccccttggccggctctctctacatatctcctaacacaaagcctgcgttcacaaaatgtacaaaacgcaaacgcttctgcgggccaccaaaacaccccaagaaaaaaacaccaaaatccgagcgctgtcctattctttgcccagccgcagcctagggaatgtgttaaaacttcaatccccggctttcctgttagatacaccagctttcaagggggcgaaggtatcaaacaatgttgtggctgttactcctcgccggagaataaatagatgattccacggcccattcaaacgctgtcttccctaaaattctgggcaggccgagtcactaaggtcctgtgtctgatttgaaagaattag

SEQ ID NO: 133589 - DNA, 418 bp, Arabidopsis thaliana
  unsure (1)..(418): unsure at all n locations
tttttggaccaccttcgaagattatgacgtcgaacgcacgcgtacgtaagcttggatcctctagagcggtcgccctttngtttaattcttttttttttttttttgaccatccaaaactcagatttacgaggaagaatcaaaaacttacaaaacaaacgtcataacgaatgtacaattatggatgtgcttatataaatcttagtcctcgatgtttagatgaaagtactcttcaagaaccccggtgggtggcctaccaaatcccttggctacttcttccatttctttaagctttgtgacttcttttctaatctgatccaatctcttcagcacattcgtcatcaagctattcgcatgtgtacctgatactcgcctcgacagctttgacttctccttctggagctgcctatacagatcactc

SEQ ID NO: 133590 - DNA, 699 bp, Arabidopsis thaliana
caccatagacgagctatgacgtcgcatgcacgcgtacgtaagcttggatcctctagagcggccgccctttttttttttttttttttttagaaaaaactaaattgaatataaatttaatacaccatatttttaaaaatatgaaatcctgcacgtatgtgcgggtctaattaaagcgcgaatgacatttgtagcggataaaacagaacaagtagttcacgtgattttcccgaaggaagcccctatggagaagctgagtttccatctcactctgtatcgtgatagtaggaacgaatcgcataagcggcttgcgtcatggtaagaagaataacgaaaacaacagcaaaggatgacagagcagtccatggtgactcaaagtgcgtgtgcctaaagccagcccatactccattgtacgttttggaggtgtactcgttaactccctcaaacacattccgtaagtaacttctacgtgtgtcaaatacaacatctttacatatagttttgaaaaactgtgatacctcattctcgttgccaaagtagttctctatgatccgcttgtcgttgttcaagaaagtagcatcttcctgatcgtttagaagacatcccatgaaaaccacgtagcttgttatgtcgttggtactctctgtgtaaaactgttcaaaggcaacacagttgaggaagattgagctgatgaaaccatcc

SEQ ID NO: 133591 - DNA, 660 bp, Arabidopsis thaliana
atagaacagctatgacgtcgtacgcacgcgtacgtaagcttggatcctctagagcggccgcccttttgtttttttctttttttttagtaaacaatatttattgaaatgacaacaagccaacaagtgaaaatgcagaggaaaaaagtaacaatttaaagcggatgatacatatagattacataattggaaatgtaaggaaaggcttgctaatttagggttgatggtgtctagaggaggagggtgaaagaggggggattcccgggatgagaggggcccgagggattccagggataagaggcgccggagggatgcccgggagtccagggaccggggggagcggaacagggaaagagggtggggggtggccggtagtgaaggcggtttcacgatggggacgggtggaagaaccggaagaggtggaagaagtcggatttgtgggacccggtggcagagtaggagccgggggagtaggaagttaccgaattggggggagagttgggggagtagggattagtgggattggaagtacccttcggtctaatatgacatttacctcgaatcctctttctaaccttttctttctcctaatatttcgtgaaggccacccatttttgctcttctcttttatgtctcacctctcactctaaccctctcttcact

SEQ ID NO: 133592 - DNA, 469 bp, Arabidopsis thaliana
tgacgtcgaacgcacgcgtacgtaagcttggatcctctagagcggtcgcccttttttttttttcttttttttttttttggccattttgtggaaacgtataaaggggaaatcaaaaatcatttgtatcagatcaaagcaaactgagctcactgaggaactatcaccacagcaagagagtcgccgcagagattagaacgagagatgacaatccaatggcgggagaatcagcattacccgcaggaagatttcttggtttccgtgaagtatccttccctccggagactggtgatggagacgacttcggaggaggagcatcacaagtgccaaaaggtgcgtttgacttgcaatagactaagctgtcacaaccacatgtgagacgaccgtttgcttcatctacagcttcggcagctcctccactatcactcctctgataaaaatcaacagctatgaaggtaggccaccttttacc

SEQ ID NO: 133593 - DNA, 488 bp, Arabidopsis thaliana
tatagaagattcttgacgtcacctgcacgcgtacgtaagcttggatcctctagagcgtccgccctttttttttttctttttttcaccttatctcttttcacaatctggtgggtagctttaatcgtttttctattacaaactaactcggacaaggtgtaataaacaagggaatgtcaacaaataactcattagagctcacacatatatatatatgatacaacactacacaggcgcttaaagttgagcaatacccttcttcacaagcatatcataaactcgatccactttggttggatcaatcttgaaaaggctatatgcatccgacttcttcgttacattccctttgaatatctcatgtgacatcacttgttgcatctgtagataaaccggtggaaccaacttgacctcgctgcagagacgcttctcggattcagacagcagttgcgactccgtgaacccaatcaagtccaaatcattcacatagcttg

SEQ ID NO: 133594 - DNA, 518 bp, Arabidopsis thaliana
tgggacacctctagaagagtttatgacgtcaacgcacgcgtacgtaagcttggatcctctagagcggtcgcccttttttttttttctttttcacagctacaagagatcacaagcggatcggagggttcattcatcaaatattctttagcctctcactcctattggcatcaaacaatcaaatttaaggcactactggatcaaaactagaaagattttagttatttgttaccactgggggagccgatgtatcccggcccttttcatcattgccctgagccaactgctggggattaccaccttttactcgattactaaacagtctctgggatattctatctttagccggtgttttcttacgccttgtggaaaaggtttgcttcttgtttttcttttcagcaaaaactctatcaaactcatcatccatagcatttcgatctagaagtggagggctttgccccaccacccaaaacttaaggaggggggtccttaacctaaccctaacaagctttgttttttcc

SEQ ID NO: 133595 - DNA, 777 bp, Arabidopsis thaliana
  unsure (1)..(777): unsure at all n locations
cggtggtatgatttcgttnnnnnnnnnnnnnnnnnnnnnnnnnnnnnnnnnnnnnnnnnnnnnnnnaagcttggatcctctagagcggtcgcccttttgttttagacatacacaaaaattcgtttccacattatatataaaggatacaaaaaaattccccgccgcttctcacatttctctatatatgctatttacatcaaagaattagctgccctgcttcacttcttattgggagtataaattttagatttgggttcgtaatttagccattaagctctgcaagctctcgagtttctgcttgagctcgttggcgtgttttgctgaagattctgaatcgttgagatcagacactagagctgaacacttggcctctaactccattgaggcttcttcgatggacgaaatggtagattcgaggtttgcacgtaaagaaatttctctcattgaatctaatgatgcagcaaaaggtgagctttttggacttcctgctctgcttgcttttggagagaacatcttgtcaaaaccttcacttccaaggttgcttaattgattaagagtcgcctggccaatagattcttcaagcttcagtacacgtaaaacccctgcgactatccttcccattgcgtcaatttcagatttgcacaagaaagtcaaatgttgcagctcatcctttgttacaactgcctcaacaggttgcttaacagagaatttcagactttctgccaacccagttcaataagtcatcatgaacaagatttgtcttcaagatgccacaat

SEQ ID NO: 133596 - DNA, 537 bp, Arabidopsis thaliana
  unsure (1)..(537): unsure at all n locations
gcaaaaatttctcgaaacttatgaatccaaaaagacagttcctttttgggtgatagcaagtacaagcattgctcataactcatgagacatacacaaaaattcgtttccacattatatataaaggatacaaaaaaattccccgccgcttctcacatttctctatatatgctatttacatcaaagaattagctgccctgcttcacttcttattgggagtataaattttagatttggggtcgtaatttagccattaagctctgcaagctctcgagtttctgcttgagctcgttggcgtggtttgctgaagattctgaatcgttgagatcagacactagagctggaacactgggcccctaactccattgaggcttcctcgagggacgaaatgggaagaccgggggttgcacggaaagaaattcccccatggatccaatgatgcagcnaagggggcttttgggctcctgcccgcttgcttngggngacacctggcaacctcactccaggngctaatggtaangcgcggcaaaagnncaantt

SEQ ID NO: 133597 - DNA, 777 bp, Arabidopsis thaliana
  unsure (1)..(777): unsure at all n locations
cgnnnnnnnnnnnnnnnnnnnnnnnnnnnnnnnnnnnnnnnnnnnnnnnnnnnnnnnnnnnnnnnnnnnnnnccacgcgtccgcgaagataagctagatgttgagccaacgatcttgttggaccctcctcttgattctgagatcatgaatgaagagatctttggtccaattctcccgattatcacggtacgtgacatccaagaaagcatagggatcattaatacaaaaccgaagccactggccatttatgcattcacaaatgacgagaaccttaaaactagaattttgtcagaaacatcctcaggaagtgttaccttcaatgacgtcatgatccagtatatgtgtgatgcgttaccttttggaggagtgggagaaagtggaatagggaggtatcacgggaaatactcatttgattgtttcagtcacgagaaagcaataatggaaggaagcttaggtatggatcttgaagctcgataccctccatggaaccaacttcaagctcaccttcatcagactcgcatttcgtgaagcttacttcaagcttatcctccttatgcttggtcttaaaagataaaagggggaaagtgagagacagagacacatacacacaaacagagacaatataagtgattgaattacatcacacttatgtttgcttatcatatcttcacctaataagtctcattccgaatgttttacatttctttcaagcttgagagattctatataaagtgatttgatatccatttctacgggatacgttcttagtaaaaaaaa

SEQ ID NO: 133598 - DNA, 543 bp, Arabidopsis thaliana
  unsure (1)..(543): unsure at all n locations
nnnnnnnnnnnnnnnnnnnnnnnnnnnnnnnnnnnnnnnnnnnnnnnnnnnnnnnnnnnnnnnnnnnnnnnnnnnnnnnnnnnccacgcgtccggcgacggccatggaaacccttttcagagtctcacttcgtctacttccggtttccgccgccgtgacatgtcgctcgatccgattccccgtttcaagacccggttcctcacacttactgaaccgtaagctgtataatttgcctacttcttcttcctcctctttgtcgacaaaagccggttggttattgggtcttggtgagaagaaaaagaaagtggatttaccggagatagtggcatctggtgacccggttctgcacgagaaggcccgagaagttgacccgggagaaatcgggtcggagcgtattcagaagataattgatgatatgattaaagttatgagattggctcctggagttggcctcgctgctcctcaaattggtgttcccttaaggattattgtattggaagatacaaaagagtatataagttacgcaccanaggaagagattct

SEQ ID NO: 133599 - DNA, 489 bp, Arabidopsis thaliana
tgacgtcgcctgcacgcgtacgtaagcttggatcctctagagcggtcgcccttttgtttttttttttagatttttactttttcttattcccatggttacttctagagttctagtcaccatagtgatttaaagaaggaaactaagcatgaggaaatactagagagctgaaaaataaacaaggggttcttcttgaagctgattccatattccaaagggggaagaagtatttgaagttaaggtctcattattgcttttgagacgttggctttgccaaagatcccccctttaaatttctttccactggtgggaaccagtttgattctgagaaaaaaccccctccttctttgccaaaaaattaaaaatctcctggaaagggggccctttccccgggaaaagaaaaaaaccgttatgggccccggttttacaacattaatccccggggtggtcctttttattatcccatggggaatttttttttttttcccagaa

SEQ ID NO: 133600 - DNA, 488 bp, Arabidopsis thaliana
atcaaaaatattcttttagttatctcattcacttatgaataggaactcaatctctattgatgtttacaaaattattctttgcataggccggtcgatatatctatgcctagcctatacatatcttggttttatttacaagaagaaaaaaaactttaattattcgctagttgttataatattacggcattttgtgagttattgtctttcaagtttactttgcttgcatcttgccggaagaagaggaagaagaggaagaggaagaagacgaagatgcagacgactcactctgagctgcaacctcaacgaattgggttgtgacttgttcccatttggtgattgtctgcttaatctgtacttgttgtgcgggtgtgcatgtcaaagaagccttgcctttgttctgactcacaatttgagcgtggatggtatctaactcttcgagagtcttcatcacttgttcttggtaagcttccatattcttctttacctct

SEQ ID NO: 133601 - DNA, 493 bp, Arabidopsis thaliana
  unsure (1)..(493): unsure at all n locations
gnnnnnnnnnnnnnnnnnnnnnnnnnnnnnnnnnnnnnnnnnnnnnnnnnnnnnnnnnnnnnnnnnnnnnnnnnnnnnnnnnncttttgttttttttttttttttagaaaaaccaaattagcctgtacatttttcattatcaacgtggccaaggaacccagattaaaagatgacagtttttgaccattcacacattttatgtgcacaaaaaaaaaagtacaaatttacagaaaattcttttggagctgaaggcggacccaaactctggtttcttctcttctttaaaggctataaatatatatataaacccaatagattagaaagggcttcttcttcctatacctttctcttctccatgaccagtgcctctgatttacagattgggcaaacgttcttcacaatcagccatttctccaagcactctgcatgatactcgggcccgcaatccaaagtcgcaatcttttctttcgtcttgaagctttcctgacatata

SEQ ID NO: 133602 - DNA, 693 bp, Arabidopsis thaliana
  unsure (1)..(693): unsure at all n locations
nnnnnnnnnnnnnnnnnnnnnnnnnnnnnnnnnnnnnnnnnnnnnnnnnnnnnnnnnnnnnnnnnnnnnnnnnnnnnnnnnnncttttttttttgtttttcagacaaagaagatgatctctgcttatttcgttgaagattatggatacattacataagcgttacaaaaaaatgaagaacaaaaaaagagaaacttaatgcgtctttttaaaacaagaaaaaaattacttaagggatagacatacatacagggcggtttcatgtatatacgaataaaccatatacttttaaaaatcaattttataaaatttaaaacagttaaaaagaaaagacccaaaaaaccagaaaaataaatccgttaggtaaacgtcttgcaaatgcctctcaatcgatggaatcaacagaagaatccaaactattttggggcattaaaagtaaattttttgtaaaatttaacttaggctccagcgtaagggttaggcttaggtgtacccttcactagaccacattggaggcttgtctcaggcatgttgtattcatctctcagtgatttctctggtgacaagacactcgcgtaaagctgctgtcctaagtagcgtctctcggagttttcagatcgaacgttccacattccacagttgtcgaatgtgagcaagattgctgcccaacattttgggtagacttggactgtgtg

SEQ ID NO: 133603 - DNA, 673 bp, Arabidopsis thaliana
  unsure (1)..(673): unsure at all n locations
gtgcactatagaagagcttgacgtcgcatgcacgcgtacgtaagcttggatcctctagagcggcctgccttngggtttggtgtcttttttttttttttttnnaaacctaaatccttacaattccaactttgtttgcaagaactgagttcggatcacaataaatatatgcaacagagtgcaatacaattatacaacaaacatacttaatacacatctttttgccttatgtactctcggggggggggtgtcacgggtgtgtatatatatcgattacacaacactcagcttcaactaatttgctcctccaagagaccaaccgttttgttttataaagcgacccgtcctttgctttatagagaaaaaaaaagggcaggctattcccagggtcaaaggcgactattatttttttttccctatctctccaagggttccccttgggtgcttccattctttctcatcactatttccctccattcacatcttcaggggggctttacctcttttggagagcacgggggccatgcagagtcacctggtttcncaatttcgnatcnccacaaaaatggtggccaggaanttccccaggcggccncccaaatcttggtccaggaaccaaggcgnggggttaccggggctcagagaggatttcggcaaccngaagagnggcccccnt

SEQ ID NO: 133604 - DNA, 530 bp, Arabidopsis thaliana
  unsure (1)..(530): unsure at all n locations
aatgaannnnnnnnnnnnnnnnnnnnnnnnnnnnnnnnnnnnnnnnnnnnnnnnnnnnnnnnnnnnnnnnnnnnnnnncttgggggtgggggttttttttttatatttttggtggaaaacgatcctcaagatagatgtttaccttaagaagacataacaaagtttaatggattccttcttaaaagaaaacacaagaagatagggcgaagacaactcactcgtcaacaaatctacaatctttgggggctgagatagatgagaaattgcggctaaagtcaatgaaaggcaacatgattgcacgataccgccaacctgaggaagttcaatcaaccatcttaaggccttcataatctcaagaaaacagcgacaaaaacagtaaaaaggccgagacaagagtcctgttcattcactggtaacctaatcactgggtgtgattatgggggggcattcccaggaccggggggagcaaacccccccggaggcgggggctttccaggggcagggggggggggtccttttattccatgggg

SEQ ID NO: 133605 - DNA, 540 bp, Arabidopsis thaliana
  unsure (1)..(540): unsure at all n locations
nnnnnnnnnnnnnnnnnnnnnnnnnnnnnnnnnnnnnnnnnnnnnnnnnnnnnnnnnnnnnnnnnnnnnnnnnnnnnnnnnnnnnnnnnnnnnnnnnnnnnnnataaaaggaaactacttatactaaaagcaaagaaacaatgagggtgacccctgttcctaaataacaactggtattattgagtcacaaagggaagctatcattcttcatcgtcgaaaccgaattctcgcaacagctcgggcacttgaagttgaggtccagtgtgtgatccattcccatggttgttttggtcattggagttggaagtccccgcaagttggttcttgattggacgtaacttacctttgaacattccattaagcatacctccgatggatctgactgggtggcttattctatctttcaacatgaaaatcatggagtactcagagagctgccaaaccaatgtcaggatgatcgtagccgagagaagtacatgggttattttgttctgcttcttcacctttttgatgtctttagctatttcttctatactttct

SEQ ID NO: 133606 - DNA, 584 bp, Arabidopsis thaliana
  unsure (1)..(584): unsure at all n locations
nnnnnnnnnnnnnnnnnnnnnnnnnnnnnnnnnnnnnnnnnnnnnnnnnnnnnnnnnnnnnnnnnnnnnnnnnctttttttttttttttttttttaaacaaagccttgtgcatttaaattgattttaaaaggtatatgtttaaactaaagtgaataagtggtagtatcaactttcttaatctacaaaaagttcttagctagatatatttaaacccgagaaaataatcacagagatacacagataatcatccctcgcgcgtaaacggtagtaaaaccccgtttaatgagttcaaatttgatggccaagaatgtttgacttacccgcaaaatgattccagagatcgaccggtttggaagggtaaaatggtagttttcaaattctccgatgaatttgaaaaccttgtcaagtaactgaggatttgcaaaccggacatgatttactccgtcctagccatggatcaatgcaatccttgtggaatttgtgcaaacaaggaagatggacgttgggtggctccaatcttcggagtttccagacagataacacaagtttcttgaaaattatcagtctttagcttacttgaact

SEQ ID NO: 133607 - DNA, 541 bp, Arabidopsis thaliana
  unsure (1)..(541): unsure at all n locations
ntaggtgcaactatagaagagtcttgacgtcgcatgcacgcgtacgtaagcttggatcctctagagcggccgcttttttgtttttttttttttttttttttttatcaggtttgtctcgttttttattcacagaagtgaatctaaagcacaaactctaattcttaatctccgtttttttgtagacgatttgaaacgtctgtacacaaacatatgtatatcaacactgacatgtttcgtaaatccaactttgtgatcagctattagtgtattcttacccattttttctttttaagtttttctcttgttctccaatttctttcttctgatacagagagaattgagccttctaagatgcggcatttgtgggttgccagtcaagagtagagtcaaataccatttccttgttgcagacggggcaggtttcacttctctccatccattctagaatgcatgcaaggtgaaaatggtgatcacatttagctacaagtttcgggttctcgatatcgtattcttccaaacatatgggacaatcctcctcttc

SEQ ID NO: 133608 - DNA, 561 bp, Arabidopsis thaliana
  unsure (1)..(561): unsure at all n locations
nnnnnnnnnnnnnnnnnnnnnnnnnnnnnnnnnnnnnnnnnnnnnnnnnnnnnnnnnnnnnnnnnnnnnnnnnnnnnnnnnnnnnnnnnnnnnnnnnnnnnnaatcaaaaatgacttttgtatataaaaatatttcagacaaaaccttcaaaccctgtgtctgtttttcttttttgtttgtattgatctgttaaagaaacacttcttgtagtgtttctgaggaatcaatgaccgaattgtctgagaaaagccataaaaccaagaccagctactaatgctgcaccagccgcaactccactataagcagcagcccaagcgtctgtctctacatactccattgattctgctgatcctgatgctcttctccttcttcttcctttgccttctcttgaatcatccaaatgtaatctcagactcttccagccaattgattttgcatgctctatggctgcttgaaggtcactatctgaagccaacaacactttatcgtggtcttcatcttcatacaaaatttgggggaagttatctggatcgacatcatcccctaccctctgaatgatc

SEQ ID NO: 133609 - DNA, 541 bp, Arabidopsis thaliana
  unsure (1)..(541): unsure at all n locations
nnnnnnnnnnnnnnnnnnnnnnnnnnnnnnnnnnnnnnnnnnnnnnnnnnnnnnnnnnnnnnnnnnnnnnnnnnnnnnnnnnnnnnnnnnnnnnnnnnnnnnnnngggaggaagcaaacaatatataggcatgaaggagaaagattttttcactgaaagtgccacaaatatattaagagtactgacgattcgagactcgacttggcttgatcaccaagatttatcagcgccttcgtcgaattggccagatcccacaacacgaaaatcaagctgcttttgatgcttggtacgtcttctttcatcaaaatcatcatatccctcgaactggcggagaaattcaacggttatctctgtgttgtggagacctaaagttgagagctgcaaacacatcttaaataaagccgatggcagcgtcttcaatcccgggttattcagctccagcgtctttagattacgcagtttggtgaatgtctcgggaagttctgatataatattagctgaaagatcaacctccatgaggaatgaacagtttccgatactc

SEQ ID NO: 133610 - DNA, 576 bp, Arabidopsis thaliana
  unsure (1)..(576): unsure at all n locations
ttaggacacactatangaagatcttgacgtcgcatgcacgcgtacgtaagcttggatcctctagagcggccgctttttttttttttttttttttttttttttgcccttcccttataaaactaagattttcaggaacaattgcggccttaaaagtgttctgcaacaaagccattgcaagggttgtatgcgcctccagagaaattgatccataactcatggcaccagtgcagaaccgcttaacaatttcactggcaggctcgacttcatctagtggaattttcacatctgcgtctttaaacttcatgagcccacgcaaattactttgcttgttcaattcattgatacgctttgagtattccttgtaggcggccacactgttggtccgggctgcctcttgtaatttggctattgcaagaggatcgttgagatgaatctctccatttttcctccagtgatagtttccagggttggtaagtgctgaagcttctgcacttcctggggcatagccacgggttggaaaggccaactcatgcaattgaagtccatctcgtgcaagcatctcaaatgttgctcctt

SEQ ID NO: 133611 - DNA, 542 bp, Arabidopsis thaliana
  unsure (1)..(542): unsure at all n locations
nnnnnnnnnnnnnnnnnnnnnnnnnnnnnnnnnnnnnnnnnnnnnnnnnnnnnnnnnnnnnnnnnnnnnnnnnnctttggtttttttttttttttttttttaaaggaaaataatatttattattgccattgaaaaagactcatttgatcgagagagaaaaagaatcatttgaaccaaaagcatctttttctatcttttcaaatgcttacttccttcaaatcctctagctcctcctccgaagatgccaccgctaccaccaccgagaatcctcctcctttgtgcatcgcctcctcctgggccgaaacctccgcctcacatcacctccgtcgtcttcttttcaccgctgcgaatttcgtctcccagtcaaacttcaccgccgctcaaaacttactctcaatcctctcccttaactcttctcctcacggggactccaccgagcgacttgtacacctcttcactaaagccttgtccgtacgaatcaaccgtcagcaacaagatcagacggctgaaacggttgccacgtggacgacgaacgaaatgac

SEQ ID NO: 133612 - DNA, 533 bp, Arabidopsis thaliana
  unsure (1)..(533): unsure at all n locations
nnnnnnnnnnnnnnnnnnnnnnnnnnnnnnnnnnnnnnnnnnnnnnnnnnnnnnnnnnnnnnnnnnnnnctgaccctctcgttctgtgttacttcagagacaaagctagagacacactctcctttctgacgcaaaatttatctgacttcataaaattttcttgattaccgtgaggtgactccacatgtcttctaatcaaaggtctgaggatgcacgagaatgtctaatacattctctgagggcggatcttcagcctttatgatatgaggagcatgatcgctgtaaacctactgtcactggttggatctcttacttaatgggacaccagtatttccattcgatcccccctacgacttcctgttggtgcctctactcatgatcctaccttctccggttctcatggcggcagggatacatggtacgagcctaattgtactgcgacttctatagatgaactgaaaggccaactctgagcgcgcttgagatattcggaattttaggaatcacctacaggacatgatgaacctgctgag

SEQ ID NO: 133613 - DNA, 533 bp, Arabidopsis thaliana
  unsure (1)..(533): unsure at all n locations
nnnnnnnnnnnnnnnnnnnnnnnnnnnnnnnnnnnnnnnnnnnnnnnnnnnnnnnnnnnnnnnnnnnnnnnnnnnnnnnnnnnnnnnnnnnnnnnnnnnnnnnnnnnnnnnnnnnnnnnnnnnnnnnnnggacaaaaatagggcactaaatatatattatcctagaaataaataaacagaaaaggacattcacatgattcaacttccatcaagatccacaacgttcctctctcgtctttatctcccctccctctatttcctccaatcaaaaagaaagataaagcaaaagcttttcaaaaagaaaagaataaaaaagtgcagtgcgggcccactctggcgttgactaatctggatagggggcacacacagacagttcccctcaaactcgagaaactaaagagttttgtcatgattcatcggcggcggctcgagaaccaaagcatgggtggggtctccttcgtacgtcacgattagcatcatcgcattatttagggcacgctccacatgcttacgcgccggacaacctcttacat

SEQ ID NO: 133614 - DNA, 666 bp, Arabidopsis thaliana
  unsure (1)..(666): unsure at all n locations
cnnnggattctnnnnnnnnnnnnnnnnnnnnnnnnnnnnnnnnnnnnnnnnnnnnnnnnnnnnnnnnnnnnnnnnnnnnnnnnnnnncttttttttttttcggcatcctcgagtgttcatctattattaaataatacctctggagagtggagacattacaattaaaagttaaaatatactcatatatattggaatactgatatgtccattaatataaggaccgtaagaatgaaacaattcatcggaaaaataagcatttcaattttttctctacctatatgcttaatccggccaagaacgaaactccggtcgatggcaaccacgaggaaccgtatataaattctgccacagtgaaccggtttgcctcggccgtcgaattgatgacccgataacccggccagctcacacgttgcccgagacccgacccaggtccactgttcaaatactctccataatacaaagtatctaaagcaaatgttgtgttccactcgagccaacctctcgtgtgtacatgaccaccgatatacgacatcatatacactgtcctagagaatagcttcaaggtcggcctaagatacgntgnggaataccgtttgtcgctggagtcggtgctgaagancctagcgctgattgaatcccggggttggtcgnnttcngtttagcggt

SEQ ID NO: 133615 - DNA, 536 bp, Arabidopsis thaliana
attctatttaggtcgcactactagaagatcttgacgtcgcatgcacgcgtacgtaagcttggatcctctagagcggccgcccttttttttttttttttttttttcaaatatattaaaattaaatctatagaaacaattgatgagcgtcacagcaaagagaatgttacaagtccctccggattaaccccaaaagaattaagaattacgttttttggttttggctgtacaatcaaatgattacaattacagacactgaacaaaacaaacacgagaaccatttcggatttttttgttcctcctcattgcttctgaggatatgaagttcttctatgtgattgcagatgtttcaatctggttatgagtgagtcaatatatgttctgagtcgataccttactgagtttgtgagtgttaaaggtggattgagaatcagcgtctgcgcctccactgcaaggaagactaacaaacgcaccgtttttgagtaaaggtttcctgcgttctctgggtctcccatcactagatctactcctccacttat

SEQ ID NO: 133616 - DNA, 517 bp, Arabidopsis thaliana
  unsure (1)..(517): unsure at all n locations
nnnnnnnnnnnnnnnnnnnnnnnnnnnnnnnnnnnnnnnnnnnnnnnnnnnnnnnnnnnnnnnnnnnnnnnnnnctttttttttttttttaaaaaaatataggttatttccataaaagtgtgtatacatatatatatggagatgagtatatgaataaatcacaaatattggtatggtttatgtacacccatcaatcctttttctcttgttttcttccttgagaccttgaaaaaaatggttgatcaaagctcaattttcatgtgttgagattcattgttggggttttctgccactcccattcctactatgctttgtaaatcttcttcgctaaacatttgatactgaaaacacaaaagaaaaaaaaaaaacttgttatataaaacttgagattgaagaagaaaattaaaagagtattttaaacctgagaaattgacgcactaaattgggtaagtgttggtaagtgaatgaaactttctgctaaggtaaaggtttccaaaaaagttcttaggaaactgga

SEQ ID NO: 133617 - DNA, 566 bp, Arabidopsis thaliana
  unsure (1)..(566): unsure at all n locations
nnnnnnnnnnnnnnnnnnnnnnnnnnnnnnnnnnnnnnnnnnnnnnnnnnnnnnnnnnnnnnnnnnnnnnnnnnnctttttttttttttttaggtggtaatttgactaatctgctgtatgattgaatcagaacaaaatttaccatgaatattattacacgacttcaaccacttcaccttctttgcaaactgcaacactaatctccaaagtattgttcttctttgatttcaccctacaacaagggcttctaggagacctgtcccaaagatgagggtccggtttcttgtaaacaatgactgtcttaatgtcgctgggattagccatcttccaccgacactcgggatgagccacgcggtggatttcataacggctcactgtcatatttgtcacccgatgaactctggttgatgtcatatagaacacaaacgggttctggcacggatgacgactcacgggtcgggtggtgaaagcgtttgccgggtaatccgcccggcgataccaatttaagaaagttctcgacggcatttcaatctctcgagccgaaaagattccgcggaaaatctgaa

SEQ ID NO: 133618 - DNA, 543 bp, Arabidopsis thaliana
  unsure (1)..(543): unsure at all n locations
nnnnnnnnnnnnnnnnnnnnnnnnnnnnnnnnnnnnnnnnnnnnnnnnnnnnnnnnnnnnnnnnnnnnnnnnncttttttttttttttttcgaatcaaaaaacaaatattataatttttccggatatccgcttcgtgtccaggcagtatgatcttttacacacacatgagtagtactatgttcataaatcgtaacaaaataatatggtttaaatatccatattgagctaataaaaacgaataacagttttaaataaatcgaaaacataaaataaaaatatcatggagatccacaacaacatatgttcatagatgtatacacagctttgtgactttgtcacataatctttaatgatatccaataggagccggagcttccttgagttcatgtcctttgaattgtatatccgaagcatagtggttaatatcacggtggtgagcttcgtcagctcgtataacataaaccacatccctaagcgttgcatctttaggcaaccgccagtaatcaattgcgatggctggaactgacaagttttcaaatttt

SEQ ID NO: 133619 - DNA, 533 bp, Arabidopsis thaliana
ttaggacacactactagaagatcttgacgtcgcatgcacgcgtacgtaagcttggatcctctagagcggccgcccttttttttttttttttactcaaacgtccaaatatttcatgatatcaagaaaatagttgtctaagattttgtaccgctagctatcttttactctaacctctttagctaaaatccatacaccatatgcaatatgcggtttacacgtttaaaaaaaaaaactactcttcacaaacatttccaagcaaagatagattaagaacaatataatttccgtaacgcctagaaatataaccacccaaaaaaaagccggggagattgtttttactcttatgaatgtttatcatttaagtatctctcagccacggcggcatgaaccgcggctccaacgggtaaactatcttcatcgatcatgaaatgtggtgaatgagcaatgtggactgatccgagttcttcatttcttatgccaatgaagtagaaagcggctgggatgatttctgagtagaaggcgaaatcttcggc

SEQ ID NO: 133620 - DNA, 498 bp, Arabidopsis thaliana
  unsure (1)..(498): unsure at all n locations
aggtgacacttagaagagctttgacgtcgcatgcacgcgtcntaagcttggatcctctagagcggccgctttggggtgggggtttttatttttttgaaaccaaagaaacgactttttagtaatagcaacagtgaccaaaccaagcatgtcacagactcacagtattcaaaatccttcattcacaaagaagagacgtttatttcctttagtttctttggtcccttctctaggccgggggcttaaaatattggtacgcccgtgaaatcagcgattcattatgcaatgcatattgccactaagagatacgaccaatgatcctttattctttgatcctagaagggtctccgaccgtgttctccattcgagaataccattcacctatgcgggtgttgtccaccatatccttacccgatcgaaggtgccttattggcctcagaacaccgaatacggcgagatcgcccaggtttggttttgacccaccaagggttggacgctctt

SEQ ID NO: 133621 - DNA, 580 bp, Arabidopsis thaliana
tctacaagagtttgacgtcgcatcgccgcgtacgtaagcttggatcctctagagcggcctgcttatgtggtttgggctctctttcttactgtgaacaaactaaacaagtactgttaaaacttcattctaagtaccgacccaaataacaatctgagtacacaaagtctaaagctttttacaaaaaaagtctcaaaaggataatgagaatccttacagtagttattatcatcaagatgatgcgtcttccttcaacctatacaacgtgatttcttgctgcttgaagtatcggcgatcctcttcatctaccagtacaagattcagataatacttgacgctgaatttgttgttgatgttgcgatgcgttggtgtaagatcatatggggccagaaacagtcttacaggtatcgattcacctctaactggagttccatccatcaactcaaattttgcaagagtttctgtctcgacatgagtattagcacctgcacctgttgattcccgccgtctgatctcaagatccatattcttcatcttgattctcacaagaaggaaatatattttcccaaggatgacatctttt

SEQ ID NO: 133622 - DNA, 541 bp, Arabidopsis thaliana
  unsure (1)..(541): unsure at all n locations
aactgtataaaacattatcctttgttttaaattttgtaaagtgtctgatgtattgagccaccattgacttgtacaaatagatagaagcaaagtaaatgtatagaaccatttagttaataagagagtagctatgtgaagcttttattttatgatcttccatctgattttatacttgttcaagttgagaaatgatcctgacgaagacatcaaagccttggcacatgtctgtgagaaggcagtattcgttctttgcatgatatgtcgccatgagaccggatcctgaagtttgcacatcaaaaccttcatcctggaggtctcgggattagaggnaaagtaccagtgatcgagtaaggctccccgngtccaacaactcctccgggtgccttgcatagaccgggnaanccgggggatncaggttacccgnaanccagcggngngtccaccaagctacggggggctnccccgnaatcccaccgggaanccnttttgaanaggcncgggttccggntncccaaggaacggtnnggggaaaaacctggaa

SEQ ID NO: 133623 - DNA, 553 bp, Arabidopsis thaliana
  unsure (1)..(553): unsure at all n locations
nnnnnnnnnnnnnnaagattatgacgtggcctgcacgcgtacgtaagcttggatcctctagagcgttcgcccttttgttgtgtttttggttcaatctcctctaaaaaaagatggcaaagtgccctctctctcacaagtgcctcaaacgtaaaaagattctcacaaagtgcctaataatgtcacattccctaaaataatacattccctaaaataatatcgaaattaagaagtaatcaaagggagcagaaccaaactgtatggtagtaatataaagcatcaaagctcatcaaaggatttgagaggatccttagggtcaacatcttctataaggggaagatccaccccttactcctcagctccaatgccttcttctttaagcttcttggctacttcttcaaacactgcgttgttacccgcccgactcaaatggaaccccgccctaaaatctcacgaaaccacaaaacttctgttgattgacttattacccttccaatataaagaggccccctggactaggtgtgtaaataagacttagtgtatgaccatagacatt

SEQ ID NO: 133624 - DNA, 490 bp, Arabidopsis thaliana
acgtggcatccacgcgtacgtaagcttggatcctctagagcggtctgccctttgggggtgtgttcttttttggcacagtaatatgacattctatataaatgctaaaacaacaggagacttttcttatttacataaaaaattatgattttgcatttcattaagcggtttgcaaactaggtgcaccagtgcctgaacctatgctagctgtctcggccgcagcctcagcctctgaggcttgatcgtctgaggacaactcgaattggctcaggttccggacaaagactgtgaaagcatggaaatgctctggagagaagaaaagggctcccattctctggtcagtgaacagatcaattcctacattctcatccttcagattctcaacgatcctctgaaaccaaccaggaaccgggggggatgagttttgccctgagctaatctctcctctattgtgggaaactttctctcgctggtggcctggatcttaatacgc

SEQ ID NO: 133625 - DNA, 530 bp, Arabidopsis thaliana
  unsure (1)..(530): unsure at all n locations
nnnnnnnnnnnnnnnnnnnnnnnnnnnnnnnnnnnnnnnnnnnnnnnnnnnnnnnnnnnnnnnnnnnnnnnnctttggggtttttttttgccttaatcattgtatgggatttctagtaaaagcaatccaaattttggtaacatgtccagaagaaaaaagaaaagtcgtattacttacaaaacatcatcttcctgaggatataaggtaccgtcatcaaggggtagagaaggaggggttcctggaggaatgctagcagcaccattttcaccagcttctatgcaaagtgcttcggcatctctgactgttgaatcgagatcaatatgcccagacagctcattgatgaactttaagagagtgtcaaaatccatctgttctcccattatcttgctgcggcatcgcttcaagaccgccacacaaacatataggtgaaaatgttccgagaggtagtgggtccacatcacctcccacagctgcattgtcttctcatactcaaattcccttttaaactgaatcagaatccagcggaaaca

SEQ ID NO: 133626 - DNA, 595 bp, Arabidopsis thaliana
  unsure (1)..(595): unsure at all n locations
gattgtnnnnnnnnnnnnnnnnnnnnnnnnnnnnnnnnnnnnnnnnnnnnnnnnnnnnnnnnnnnnnnnnnnnnnnnnnnccttggggtttttttttttaatcatgaaccatctttcttcttgctattcagacattagtacacaagatagagaattatcaacttctctgctatttcatatcaagaactccaaactgtaagtaaactcgagacattagaagacatgtttttaaaactgtgtttcatacttcaaaatacacaatttgatcaaaatcagttgcttctttcaggcctgatctcaattccctgaataatcaaaccactcttccaatttccattctgagtctccattatactaatctcaatctcatcactaccatcatcaccacaacctccattgttaatgtaaaactttccaagctccacttcactccacccatctactctctcctttggccccaccacattcataccacgctccctttctccttcaacttcttcttcttcttctctctgaacctgcatccacggacgcctcatcctaaacgctctagaaaccatcgcatacgaaatccccgagtaatgggaagtagcgc

SEQ ID NO: 133627 - DNA, 525 bp, Arabidopsis thaliana
acgtggcacgcacgcgtacgtaagcttggatcctctagagcggtctccctttgtgtttgtgttctaaccggataatcaatctattcgtctttcaaaatagcgggctctaataaaatatgaaaagtgaaataaatatatacacaagaagacaacttttaaaaccactctagctcgaccgtttgctcaaactgtatttcgcaggtgctttcatggggcgtgtttggccggccgaggcttaaccggaatcaatgatgacgtggacaaacagaggttgtgggcagctgacgtggagggctgtgctgctgaagtggcaacacgttcacaagaagggcacatagtgagagtagtggccggaagttgcatgtaaaagggtgtggaagtcttcaaggttctcaattctttaacctttttttgaagcctacggttttctcaaggtagagactcacatgatctctttagggatacacaggccacttccgtttgctggaggtttggccttgatcattgatcaatcacataaccccc

SEQ ID NO: 133628 - DNA, 523 bp, Arabidopsis thaliana
acgtcgcatcgccgcgtacgtaagcttggatcctctagagcggcctccctatgtgtttggtttttttgactctttttcaaacgaatcttgaaaaatcaaagaaagccaacagacaaatacataattcttacaatccaatcaaagaaattttatgaacaagataaagtttaggaattcaatcaaagaacaaaagaacactttaattttctacagaaggggctgaaaatctctggaagaaatgggatttgggctggtcaaagctgcatgtcaatggggttgctcagtaaagcttgattctggtctggatcggcgcacgacaaataggacacactctaagatctggtccgcattcacaacaagtctgatggccacaaccaaacgccatgtttttcgggttgctcagacatatcggacatagctgaatatcgtctgactactcattagcttgctctcaaatggataaggaggtccactcggctcaaaattcggtatccgggaactagagaatgatgatccactctgg

SEQ ID NO: 133629 - DNA, 775 bp, Arabidopsis thaliana
ctatcacgtcgcatgcacgcgtacgtaagcttggatcctctagagcggccgccctttttttttttttttttttttagatgtaaagcaacataactttaaggatcgcagtaaatgttatatcagaagaaaatatgattgcaatttgttcggaacacaacgtcagtaaacatgggaaatcagccggtcacaaatctagaattgttgcagattgcaaagatataagagaaaaaatgaatctgccaaaacggatattcgatgtttcaactcttctgagtttatttcatctggacgatcccagcgctaataagcttttgaatcttgttcataaccattggattttgcatgtgcttctgtgctgcgcttggattctcttgaagatcagacagtacctgtctcattacaggatctgtgaggatgttctggatttctgggtcttgcattccctttgcctgtctctctttcaattccctcaggagtaaggtctccgcgattagccttgttgatttgttgtacacatcttttaacaccgtcaagaagttcctgattactaggatcatgctcgagacccgcttggtatgtttccatcgcgttgtcgtactctttgaggaagaattggactgcagcttttctgctgtatcctttagagaaggttggatcgagctcaatacacttttctgcatcctttagtccttcaggcattgcacctagcttagtgtaactagcagctcggttgctatatgctttatggtcatttgggttccttttgaattcttcg

SEQ ID NO: 133630 - DNA, 542 bp, Arabidopsis thaliana
  unsure (1)..(542): unsure at all n locations
nnnnnnnnnnnnnnnnnnnnnnnnnnnnnnnnnnnnnnnnnnnnnnnnnnnnnnnnnnnnnnnnnnnnnnnncttttgtttgttttttaacatcgataattcgtatgtgtggcggccctttgaaagagtcatagcacaatgcatacgcaataacatcgatcattttgttgcaaaaatataaagtgcacaagaacagcgcacgctcaataatcttgactccaccttcatatctaataggcgggcaaatccctcgctcctaaatcacaacattcataacgcagcagcaacaacaacaaaaccggcgcaggctaatgatctcctgggtacttttagccgggcataagtccctaacagtaatcagaatgagaatcatcggagtaatcgataccagaagaaggggacatgacttcttgctcaagcaactgagccacctggttcatagccgggctgtgttccgggttaacatctgaacatcttttagctatctggagcaatgccttaaaagactcttgggggacatgggggcatttcttgggtattac

SEQ ID NO: 133631 - DNA, 534 bp, Arabidopsis thaliana
aggtacaacttagaagactatgacgtcgcacgcacgcgtacgtaagcttggatcctctagagcggccgctttttgtgtgcggggttttttttatttttttgcaaatctcacttgctactattaattaatggaaacagagaaacaaccatttcatacaatctcaaccctacaatataaatgatcattagttagcgcccactagagagaaacgattccgccatgaccaaggaaacggggcggctcgcttccatagactcagtcgttacacctaagggatcaaatccttcattgattatccgagaattcacaagggctagcaagttatgaggaagagtggctacaccgtctaaaaattggatcacgcttgacatgcttggtctaggggctgccactggatgccagcaaagcaatcccagtttcaaaaccaaagttacttgttccgcaagatacctgggccctagtttctcatcaactacctgcaggatgtctccactgtcccaacagtctagtacccaatcagtcaaaaccatctcg

SEQ ID NO: 133632 - DNA, 535 bp, Arabidopsis thaliana
aggtacactatagaagactatgacgtcgcatcgccgcgtacgtaagcttggatcctctagagcggccgctctttgggtttggtttttttttttttttttgcaagaaacgaaagccatgttattagtagatactatttcttcctctttgttgttttcttaaaaaggaagttgaacaaaagaagaatcatacaaaataacagcgatacggttacacacaagcaagtatttctcttttgtttgggtgacttgtattttcgcaacaatagccactttttttgccattcgagagaatgcatgcaaggttgatcaaaatcattggagagttgatgctacactgtacgacttcttaatcactcattaaccacatgctccctatcttctacccactggggattggattctgccaaggcatgttccaatattttccctctcttcacatcttgagttcttcttcgggttgattcaagtgttatgagcagagctgttttgtccggcaggactgactcccccccctttggttgcctgccccatcgag

SEQ ID NO: 133633 - DNA, 593 bp, Arabidopsis thaliana
tttaggtgacactatagaagaactatgacgtcgcatggccgccttccttagcttggattcttttgagcgggcggccctttttttttttttttttttttttttttttgggaccttcgatttttttattccaattaaggaaagatttcctccctcgaaagggtttatttggtatgcagtattcaacaatctgagtgaacaagattttatgtactataagctgaggaatagcagtttacgagttctcaccgagatgagatgaccccgaggccgatgcggttgacgaagaggatgaagagaataatccgctgaacggccatggaaaagagaaccttctctcgctcacattactgttccttgcatcatcttccacattctcattacttacgttgatctctagagttcttgttctcggtcttacaggattaaccttggtctcatcatcaggagggagttcatatcggcacacgggacatgaactgtgaagctcgagccacggtactatacaccggatgtgaaacttgtgcttacacggcatctctttagcttcacttcctttggcaaaatcatccaaacaaatcgagcactgcaatgat

SEQ ID NO: 133634 - DNA, 523 bp, Arabidopsis thaliana
ctatagaagagttatgacgtcgcctgcacgcgtacgtaagcttggatcctctagagcggccgccctttgggtttttttttttaaggagaacggtagagctcaaacattacaaatttaagatattatgaacaaggaaaagtaaaaagggttcacacacactttgcataaagttcatcggcgaaaagcacacacacgcctttgttaataatgtaacttatagtatacgtaggtcgaaagcaaatgaatctatggggttccaatgcttgtctaacttggagatatcttatcaaactgtcccttcattcttgcgtgagtgagtccgacgcaggcatcgacaaaatctccttcaatgaaatcagtggacaaaatctggaacttatctccatatcccttggaagcacactgtgatataaaaagcctagcgtgttttctgatccgatcagtaacctgtgtaacccacacaaccggattatctgcttgcggcgtaaccgtgttctcaacccggtagaagaatttcctagaa

SEQ ID NO: 133635 - DNA, 509 bp, Arabidopsis thaliana
  unsure (1)..(509): unsure at all n locations
nnnnnnnnnnnnnnnnnnnnnnnnnnnnnnnnnnnnnnnnnnnnnnnnnnnnnnnnnnnnnnnnnnnnnnnnnctttgggtttgttttttttttttatcaatcaacttctagtaagattgatgagcaaattcatgttcatggcaaatacatagtttttttttaacagaggcactgaagctttttataaaaggattcaaagcttgtgttaacgacgacaaaagaaacaagcaagtgtacaatctcgacaacagtatgagataataaaggtaaacagagcaaaacagaggatctgaatcagtagtcgtctcccttggagagaacttctttgcaagtaggtcgcagtaaaatggtgtgttcaaactgtgatacatagcttcctttcacatcacacagaggaggatacggctgaacaatgccagagtcacaaagattctttagagccattaagtatttggtttcaccaatgcggtccaaataacgtctgcagaaggcgagagtcgagaaattc

SEQ ID NO: 133636 - DNA, 518 bp, Arabidopsis thaliana
actatagaagactatgacgtcgcacgcacgcgtacgtaagcttggatcctctagagcggtcgccctttgggttttttttttaatcttaaacgagtttatattttgaactacatccaatccttttaaaccgaacttaaaatcgagagataacagagtaaatagcagaggttttatcttttatcaatcgaaaaagaacaaagtaaaaacaacacatcttaatcgcatagtaggcaggtcttttgagtgtgatcacttctcatttgcgcccttcgactttcttagcgtctcttgcggctttttcctcttctcgcttcttggcagcttcttctctctgttggcgaatcagagccaaacgatccaagtccttccttgcttgttcggttttgccttgctcttgcaacctcatgtatcgctcatgagctcgctgcttctctagctcctctctttcacgccttgagagttcagtggttttactagcatcgaggtcttttgctttcaagggcttttgtcttactctg

SEQ ID NO: 133637 - DNA, 534 bp, Arabidopsis thaliana
  unsure (1)..(534): unsure at all n locations
taggacannnnnnnnnnnnnnnnnnnnnnnnnnnnnnnnnnnnnnnnnnnnnnnnnnnnnnnnnnnnnnnnnctttttttttttttttttaatttaaactatcaccttccattgttggaaggcatttgtcagtttcttacatactattttttttcatatgttcaaataagaggttctgatagaacaatgcagctaaatttctcggatgtgcacaaagataatgttatcgaatcctcggcttatcctcatcttctcatctgtgtacagaatttttagctcgatattgtttgttatatcgaccggatatccaaatgcaccgcctataattgctgcgtcgtccatcttcaagtcatatgtactgctttctgattgtatgaatttgcctttcatggagaatctaaatgccggaatgatgttaacttcaaactttatcctcccatccttctcaatgatctgtcttcccataagaccatttgctgcattttcaatccaactatctgtatacatctgtgaactccaaatcatttgccaact

SEQ ID NO: 133638 - DNA, 541 bp, Arabidopsis thaliana
taggtacaactatagaagagttatgacgtcgcctgcacgcgtacgtaagcttggatcctctagagcggtcgccctttgtgtttgtttttgtgactaaagatttttaattgcgttcatttcattgtgtaaaaagaacaaaatgccccctgttttcatttgctttactctctatatcttcaatccgataagtagctctctgttttcgcatcacggcatctaatgacgtaatgtccaaaactgaaaaaccttaaccaagaaaaaaaatcaaaagtgtttatttgtataatagatattaggttttgaagtgattaacgtaaaagtgaagaaacgggaggggaaactggagaagggcaaggcctggtttttaggctaattgatctcgatgtcaaaactccgattatggctccgatcaccggagctggcatgtaaatcccataattttcaaaatcccatgcccccaccgccggtccaagtgatcgagcttgggtcattcattcctcctgaatccggcccgggataaccccttcaagggaaatggctg

SEQ ID NO: 133639 - DNA, 548 bp, Arabidopsis thaliana
  unsure (1)..(548): unsure at all n locations
ctatagaagacnatgacgtcgcacgcacgcgtacgtaagcttggatcctctagagcggtcgccctttgtgttttttttttcgtgcgtttgtgcttctttttgaagattttagagatattccacaatcgaaccttatcccaaaagtaaatactctaaaaacaccccaagaaatgaaattgttcaaattaacccaacctaaatcacactgtacataattggatttatttattactatttagggttcttttttctaacagtacaacgctctccaatttttaaaatttcttgtttcttctaataacgaatgcaagattacacatatttagactttttgaaaacgttaaaatctaatggtgtgttgtttttaataaacgtattgtttgaggtctaattaaaagtgaaaagaatctcgatcggggaataataatcatgaccgagaaaccgactcagcaagtttcccgattcgttggacaagttcaggagatagcttcttcaccggtttcttctccttctccggtcgaaaatcaaaaccaagtgcatccgatact

SEQ ID NO: 133640 - DNA, 756 bp, Arabidopsis thaliana
  unsure (1)..(756): unsure at all n locations
nnnnnnnnnnnnnnnnnnnnnnnnnnnnnnnnnnnnnnnnnnnnnnnnnnnnnnnnnnnnnnnnnnnnnnnnnnnnactctagaagacnatgacgtcgcacgcacgcgtacgtaagcttggatcctctagagcggtcgccctttttttttttttttgggcccaaggattttcttttaaatgcaatcttccattgttcttttgtacagcacaatgaagctaaagaacaacatcgagggaaatcggtgctttgtcctgtacagaaataaattgcatagactactaatcttctttttttctttggggaggaacaatggtctctccgctgagtttagtattgatctgccaaagctcgtttcttacattggctttgtaccacactcagtaagaaatcagcgaatacatgctcatactctggcattttcccgtaccctgggaaatagttgatgtcgatcacataaaaccgatctcttgtcccgtgctctctaattatgtctaaattgaacagccttagacccaatccacgacggagttcctctgccagtctctccaacagaggacgtgggggaagctcggcaatgctcgggtccaaatttgcatcattagctgaagctgcaacacaaaaaacccgggggaagcggaatacacccgcttatttggggaagtttcgtttaaagacatcagggtgggaaaaaccccggacaacttttaaagcccccccaaacatggaaaccttgaaaaaaaaccctccctgggtc

SEQ ID NO: 133641 - DNA, 500 bp, Arabidopsis thaliana
gtcgtatgcacgcgtacgtaagcttggatcctctagagcggtcgcttttttgtttttttttttttttttttttttttttttttttttttaactgaaccattattcttatatatttttttttattgaagcaacccgttaaaccagattttcacatttaaaccggttaaaggggagattggcggcttacaactacatgatcatggtctgggatggtggtgtacttataagatactccatgactagtaactaccccaaatttaccaaacccatcaccattcaaaatctgccttctcatttcaacactaccacaataatctaccacgtacttagttgcgtctttgaagtagttgtaaaatgcaacacttactgctccccaatgagtgactaagagcaagttcttagaaagatacttctccgcaagaatcttcactgtcttataatatcgatcctcaaaggcttgtgcagattctccccattctggcacctctttataaaccata

SEQ ID NO: 133642 - DNA, 534 bp, Arabidopsis thaliana
taggtgcaacttagaagatctatgacgtcgcactgcacgcgtacgtaagcttggatcctctagagcggtcgccctttggttttgttttttttttaaaaaaaactgcaatgtttatatataacaccaagtttattcgcaaaacaaaatgatcaatatttctaagtaacggggacaaaactggtgtctcgtctgatatctctggaaacagcttaagacaacacaatccttaattaatccgggggtaagatacaacattcgttaaaaggcatgtgccatactactaagtatgacgttggttgagcaactgtatttttagtacctctcgaacttgcttttacccgccgggtctaccaccaccacgacctctgttaaacttattaaccgggtttctcttacttctgtaccctactcgatctatcttaagagcaactttgggaggatctgagaaaccaaacgaaagcccaacctcccgtgagatagagttgggaacattaaaaacatctttcatagagggggaattatatcctgaaatgt

SEQ ID NO: 133643 - DNA, 543 bp, Arabidopsis thaliana
  unsure (1)..(543): unsure at all n locations
attgtannnnnnnnnnnnnnnnnnnnnnnnnnnnnnnnnnnnnnnnnnnnnnnnnnnnnnnnnnnnnnnnnnnnnnnnnnnctttgggtttttttttttttttttttttgattaaaaaaatcgggaagtttatatcatcatatccagaagaaactcgaatcaattactccataacttcaagcagcctaaaactaatgtttattgatgtagagaaatacaacattgaaaagctgagcattgaacatatctcgcattatttcttagaaagattttctcctttggctttttgtatgatgaatgtacacttgtttttgaacaaccaacactgatgcacttgaaggatattcatgtgatgctaataaatctccaatagggcccaattcattgaactctgtccattcactaattccgctagtagcctcagttcctattccgctgccgcttccaacgataaacaagtcataatcatttgccattgctcgtaagattcttgaggtctcagatccatcagaaaccgccttatcgatatatgtcaccttggca

SEQ ID NO: 133644 - DNA, 796 bp, Arabidopsis thaliana
actatagaagagttatgacgtcgcctgcacgcgtacgtaagcttggatcctctagagcggtcgccctttgggtttttttttttttttgtttaacaaataatactctcatttcatgcttacaatatgcggccgccccaaatgtaaattataacaattaggaagaggtgaggctgcggatgagaaggccttcgaaggtgattccaggtccgaaagctaagccaagtccccactcttgtgctgcgtcacctttcttcttcagctcatctctcatatactccatcacatacagtatcgtgttgctgctcacgttcccgtaatccaccaacgcccttctgctgctctccagcttctctttctccagcttcagttttgtctccagacggttcagaatcgcaggtcctcctggatgaacagcccagaacatgtcattgaactccatcgactcatcgccagcctttcccatcagcttcttgcagaactcttctatgttctcctctatcttctgcgggaggtctcgtccaagcttgaagtttatgccttcctcagtcaacctcccctcgatcacgttctgtgtccccggcaagaactgctgaaccgcatagtgcagctccatgaaaggagcttcacactctctcgggtcagctccgatgatcacagcagctgcaccatctccaaacagagcagctccaactaggtcgtacggacgcgctttgtttggtggccgaaatccgagaatggtggtttcagaggttgtgagcagaacacggcttccggggttgttctcagcaatgtcttg

SEQ ID NO: 133645 - DNA, 528 bp, Arabidopsis thaliana
ctatagaagagttatgacgtcgcacgcacgcgtacgtaagcttggatcctctagagcggtcgccctttgggtttgtttttttagtgcaccaatctgttttgaacttggttttacaacaagaacatagccaaaaccatgtcttactttttcctacattctctgaaaccacaaaagaaatcccaacaaaaaaaacaaaaaatacagagataatatagttcttgcagccacagggtggtaacaatggctcctccaaactgattcatcatagaagatttgtcattatcatcatctcatcttcattcccattggagaagaatccattataccacactaaaaccagacaacaaacttcaaatcttccatatgatcattagctcttccacgaggcttcttcttatgtacaacatttttcaatcgattccttcttttcttccgttttcgtttttcggttactgctctttccagattcgtacagtcactctcaacttgagttcttggctataacctccagagaagtagagtgcgagg

SEQ ID NO: 133646 - DNA, 530 bp, Arabidopsis thaliana
taggagcaacttagaagagttatgacgtcgcatgcacgcgtacgtaagcttggatcctctagagcggccgccctttttttttttttttcttacgaagcatatattatgacaaaaattgctgttccacaattgttacgtaaactgcaattctgtaaacttaacgatgacaatggcggaatgtaaaaatgcaattcggggatgaatgtgttctttcagtatattctaaagtgccacgatgtgataacattatacagaatacaaggaaacggtcgttgaatttgaaaaactctaattattttttagtgtcaccttcttcttcttcgtcatcagatttagcgaagatggtcttaggctgggtctgagagtaagcaggtgcaataaactttggatctttaacagcaacctctgcgtatttcaatattgcttctcttggatcttcttccatccacgtctcttttatcatcccaccttgcttgagaagatattgtgttaataagccactaccaggagtcccaactcttccaccatga

SEQ ID NO: 133647 - DNA, 333 bp, Arabidopsis thaliana
aagagtaagattcttttattcagatattttaattatatggcggaatgcgatgttcgaaagtgaagagtaaaagtaaaaggattatgaattgctacaaagtgtgatgtatgtaccacataagggaaatccacaaataataaattcttctctcagacattaaaagtttaattatgggttaaccttttctgaagtccagcacttctctccagttccagtagccatggaagaaaagaaaagcctctgattagttttcagattcaagtaatcaaccttttctggctctagaagcagcaggcagtattcaggaactggaccacttgaaggctcgtgccg

SEQ ID NO: 133648 - DNA, 434 bp, Arabidopsis thaliana
  unsure (1)..(434): unsure at all n locations
nnnnnnnnnnnnnnnnnnnnnnnnnnnnnnnnnnnnnnnnnnnnnnnnnnnnnnnnnnnnnnnnnnnnnnntttttgggttttttttttttttttttggataggaaacaggtaacaatctacttaagaacacttaacaatcagaatagatgagaaggtgaatcttacataagctcagagataccctaaaaaacaaagattacacaccttcctcgattacacgatgttttgatttgtcatcagaaaatttatttacagaggaaaaacaagaaaaacaaaccaatcaatcgaataaacacacttcctcttcgctgtcaaatcaaacccttgttaaagatcaattactgctgctaaagccaccacctttcatcatctgaagaaactctttgtaattgactctaccatcaccgtctgcatcaacttgcataatcatct

SEQ ID NO: 133649 - DNA, 520 bp, Arabidopsis thaliana
  unsure (1)..(520): unsure at all n locations
nnnnnnnnnnnnnnnnnnnnnnnnnnnnnnnnnnnnnnnnnnnnnnnnnnnnnnnnnnnnnnnnnnnnnnnnnnnnnnnnnnnnnnnnnnnnnnnnnnnnnnnnnccgacctgaaagacgttaaatcccttgataggcaaaatatacaacactgtaaaattaattcgtaaccgagacacttggtgaaacctcaagacacataaacgatgaaatcagaggtaaagaaaaattgagctatctttcccaattagaatttccgtcaagctcatcgcaggacatcgttggggtatttctatcttttgaacttatactactccagacggtagcccgagaacaagctggcctccgaaaacgcttttgacgtagtagtaacagaaatctgccaagatgaaagtttgaacaatttctgagatcagaaccattgatggccacaatccataacccaatgctacaagcaaccgtccccgcgtgtccacaacctgtaaaacccagtgggcacagctgaggaaccttgctactc

SEQ ID NO: 133650 - DNA, 484 bp, Arabidopsis thaliana
aggtgcaacttagaagactatgacgtcgcctgcacgcgtacgtaagcttggatcctctagagcggtcgccctttgtttttttttttattttcactaatttttcctcgggaaaggtaaataaattcaatataaccttctaataaggaaaaaggggaagaaaaaacatccaaatttattttcttaaattttttaaaaaaatgattagggaaggaactcagaatccttcccataccttatatatgcacacgcagaagaagtcatttctgatacatcggaacatcaatcactcgtcttcgtttcccacgagagtgaaagtgaaaggagcaaacttgtaaccatcgccttcggagaacttgttctggtactccacccagtgaagacccaccgcgtgaaggaatgcactcaatgtctccatcacaagaggcactcccacaagcgcaaattttgaagacgagaattcccacgatccagatgaagacattgt

SEQ ID NO: 133651 - DNA, 586 bp, Arabidopsis thaliana
  unsure (1)..(586): unsure at all n locations
atgtnnnnnnnnnnnnnnnnnnnnnnnnnnnnnnnnnnnnnnnnnnnnnnnnnnnnnnnnnnnnnnnnnnnnnnnnnnctttttttttttttttttgtgaaaccgccaactaaacaatggccaagaacttagattatggaagactgaatcacatgaatctaggaacaacatcattaacaattgctttagaatcttaatcaaaaactaatcgtttaatattcaatgtacatgtatctagggtaacaacattatgagattcacttgcccgtgatgaatgggtgagctaatgcctgtgacactgtaattctcttctgaggatcaagtatgaaaattctgtctagaagatccctgaaatgaaccaacaacttgctatcttcatccttataacgttgtttaattactgaaccaaattcttttggctttatgtttaccatcattctctttgttgtctttctagtaacactatcctcctctgtagcatagaagcataagtccttatcaaagtgctgatcgataaatgctcccttgcgaagcatctttttagggaaggcacctttcagttccatatgcaggcgtaacatttcat

SEQ ID NO: 133652 - DNA, 1006 bp, Arabidopsis thaliana
  unsure (1)..(1006): unsure at all n locations
tcctataataactataacttgactgcacgcgtccctaagcttggatcctctagagcggccgccctttttttttttttctttttttttttttgggaaagaagactaatattatttatgggacaaggccaagccacaaggacataccaaagaaaaaaacaagagaaggtgataaaaggggcaaaaaaaaaaccaaacaaacaaccaaagaagatcacaaagagtagtaaaagaaatatttacaaaacagttaaaaaaacaaacaaacaaaaccccttttcttcacctcgtcgcttgtcataagccaaaccttccaaaagtaactactagttttttactaccatagaactgaagaagaagtcttcagttttttactccatactgtctcttttaacttctcgagttttactttttactatacgactctcaaaactggcatgaagtgccaagtctctgtctcttactcaacgttgcggttttgcgttttgcgaaagccggtccaagtaactcttggaacctctcgaggaagagaacccactcgtcttctttcatgtctgctactttcacaaagcttgcactcactggaagctgttcgtttgcgcttttgtgaccagacgatgtgttctcggatttgcctctggttaagggttttgggtttttacgtgccgtgtcactaagatgtgtgtccttcattgaagtggaaagctttgaaagagatggagccttgtcatgaaaagcagctgaactaaaaaaactgtctttcataatgatcatagggacagtattttcagttttgtcctcttcttcttcttcatcttcttcttcttccttgatgctttcttcaagcttcccgagcgaagaacgtccatttgaaaaagggtttttggtgaaatagtcatcggttagttgtatcttagaactgtagactgactccaaatcatcacagtctagatcaaactgaaactctgcttctcctactacatctgaccttggagagaaaacatnctcg

SEQ ID NO: 133653 - DNA, 500 bp, Arabidopsis thaliana
  unsure (1)..(500): unsure at all n locations
cgtgaaagaagactaatattatttatgggacaaggccaagccacaaggacataccaaagaaaaaaacaagagaaggtgataaaaggggcaaaaaaaaaaccaaacaaacaaacaaagaagatcacaaagagtagtaaaagaaatatttacaaaacagttaaaaaaacaaacaaacaaaaccccttttcttcacctcgtcgcttgtcataagccaaaccttccaaaagtaactactagttttttactaccatagaactgaagaagaagtcttcagttttttactccatacgggctcttttaacttctcgagttttactttttactatacggctctcaaaactggcctgaagtgccaagtctctggcccttacccaacgttgcggttgggcgttttgcgaaacgggccaaggaacccttggccccccggggggagaacccacgcgtcttcttcaggctggacttccaaggtgaccnctggacngcgtggnttngcacnggnt

SEQ ID NO: 133654 - DNA, 466 bp, Arabidopsis thaliana
  unsure (1)..(466): unsure at all n locations
atgtnnnnnnnnnnnnnnnnnnnnnnnnnnnnnnnnnnnnnnnnnnnnnnnnnnnnnnnnnnnnnnnnnnnnnnnnnnctttttttttttttttttaaaaagtagaatatatgaaagttaagtatattgaataactatgacatagattatcatccaaattttttttgaatatatgatgccaagtttagctatttaaatatgacaaaagtctgttgattcgctttggcatttgtgtgtttgtattccctgtttaccggaatagagttgggacctcctcatagtttcaacgacccgtaaagaggttgagactttctgaaacagacaatgtcttcgatttctatggatgttgatggaatcttgtctttgtcatttcgcatttccttcaaatgttgggtttcccgtaaacgcatatgctcaacgatttcttatttgctgcgctcaacctttatgtattcccgtcaaagaa

SEQ ID NO: 133655 - DNA, 608 bp, Arabidopsis thaliana
  unsure (1)..(608): unsure at all n locations
ttaggtcnnnnnnnnnnnnnnnnnnnnnnnnnnnnnnnnnnnnnnnnnnnnnnnnnnnnnnnnnctttttttgcttttttttttgttttttttttggggcaacaatatatagagggacactatacaattattaactctgacaaaaacaataaaaataataaagagagaagaatgacaacaatcacatgtttcacgacaagacaaagacgaacagcgagataattgtacactacagctaagtgctagccaaacatctcttggaaagaaactgttgccttacgggtttaatccaatttgatgccatttttctctacttcttgcttttttggagctgccggaaaatatttgatcccggtaaggtcacctgctttgcttataacctgtagggcttttataagatcttctcttgagtgagatgcggatatgcaaatacgngccctgggctagcaatagggggtgtagnctgggaaccgncggccaccaccggccaagttttttnggaanattcccttgngatcctgggatttttccttgnttgaaagcattattgnatgcttgngnatcattgctcnagncttnaaccccacnttttnaannagcctgaaagt

SEQ ID NO: 133656 - DNA, 671 bp, Arabidopsis thaliana
  unsure (1)..(671): unsure at all n locations
ttaggtccaacttagaagatctatgacgtcgcctgcacgcgtacgtaagcttggatcctctagagcggccgccccttggttttttttttttttttgtaaaacacattcatattgatttacgtatgtaaatgataaattctaaaattgaagggtcaaaaagagagtaaatcaaaactctgagatactatgacatttttcaatataagtccctgtggtttctttgtgttctaaaaagttttaagtagttcttcaagaagtagctttttgcctcatccatttagtagcagaccacttttctccagacagaacttcacatcctccatgtatgctcctaggatctgactgtccgtcgagtcccatgctccagaagagaactgcgtctcctttggtgggtttaacagagatgcctttcatgattttgccaccacaggtgcaatcaccatcaccagccaaagggaaataagtttctcctccttcgacgtcatcagttagatacataagcatagttgctacgcgctgaccaccacgctntagattgaaagtgtcagcaaagtaatcgtgatgtggtttgaaaactgctgcggctatatctagaacttgaataagttccattttcgctggtcttgaaaagactgaattcgcttcaattgctgatattgatactcttttca

SEQ ID NO: 133657 - DNA, 418 bp, Arabidopsis thaliana
aggtagcactatagaagagtatgacgtcgcacgcacgcgtacgtaagcttggatcctctagagcggccgccctttggtttttttttttgagtataacattggtctgaattttatacaaaagaagtgataagttgctacaaaaaagaagaaggaaaaagaaatagagacaaaagctgaaaatatacacaccctccaatcaaacccagattcaaacgaatgggttaaaacaagtaaaagaacatgaagataaacatccccaagcctcgtcaactatcaaagcacacaatgccaacaagcacaaaccctctctctaacatccatgaaatggatttgttaacaaattagaaggaaatatcggacctcaagatgcaatttcctcattcctcgtgaataaatatacaaatagagatttatattc

SEQ ID NO: 133658 - DNA, 678 bp, Arabidopsis thaliana
  unsure (1)..(678): unsure at all n locations
gaatgnnnnnnnnnnnnnnnnnnnnnnnnnnnnnnnnnnnnnnnnnnnnnnnnnnnnnnnnnnnnnnnnnnnnnnnnnnnnctttttttttttttttttttaaaagaagtaaaatattacaaacaaaaaaacacattatatccaattttatgaaactcgaaccacaaaactctcacaaaggatcagtaataaaaagaaaaaactctcacttacaagtaatagttcatgcccactttgatcaaacaaatgtgaggaatattcaacatcacgcctgggctccggcaattcttcctcaagaacgagtacgctacgtttaccaccagctgttttacaaacactgagttccgctttgccttcacgtgaccgtgtccgacaatgtaagccacttcagcgtccttagcattcaccagatcaaacagctcttccttcacctgcggttgcctgaacttggtgtccattggtctgaactgaaacatccttctcatgctcagcctcggaagctcttgctcatactctgctctcagtttaagtagagccggagacttgctggttgctactggtggctgggatctcgagctgcctgcgatggttggctcgggtttaggcggggaggcttgnccaaactggttgngggttnanaaangggcggccggaatgaaggnngngttggcncangct

SEQ ID NO: 133659 - DNA, 509 bp, Arabidopsis thaliana
  unsure (1)..(509): unsure at all n locations
nnnnnnnnnnnnnnnnnnnnnnnnnnnnnnnnnnnnnnnnnnnnnnnnnnnnnnnnnnnnnnnnnnnnnnnnnnnnnnnnnnnnnnnnnnnnnnnnnatggaattcatctcttttatacaaaaatctgctagggcaatacaggagaccagttactactgccacttccaaaatgttgttcagggaactggaaatatgtttatacaggattcccatgctgaaaaggtaagtgagatttctacaaaagctaaaaaaatcagtagaatcttcctggtgctttgcagttacaaaacttcgtttaatgtttttcaggaaagaccagtgttgccaaaagaaccacttagcttgacttgagaagcttcgttcagacttattttaattgtgtgggtctgtgttaatctatatatgtcaatgcattccacgagatccgcttcacatgtcagaagaacccactccttatcatcatccaggtacttaaggtcaaaccaggaaatgtcatctatgttgaaac

SEQ ID NO: 133660 - DNA, 867 bp, Arabidopsis thaliana
  unsure (1)..(867): unsure at all n locations
nnnnnnnnnnnnnnnnnnnnnnnnnnnnnnnnnnnnnnnnnnnnnnnnnnnnnnnnnnnnnnnnnnnnnnnncttttttttttttttttgataccaaaagatgtcatatatatattgcataatatatgaatatgaaacaaacaagtttattggagtttctggaatcaactacatgttctgagagaaaagtagcagaaatcacagacatagaagagctagatacgaaaggaaaaaaggttcacatgatagttattgaaccaactacatagaggagttatgagtaaaaagctcataagcaactacataaatggtttataagttaaacagcgaaaattgagaactcgaatgagttaaagggtagtaccatcttcagcttcaggtgatcacttgagagaagcagcataagcaacagaagcagccatgaggagagaagtaacagatgaaacaagggtccaaaagctcttcttcttatgtgcatcttccacagaatgcttcattttcgccagttccttcttcatttcctcgaccatgctttctttgtttttgaacgctttcttgatagcttctagctgcacagagtaggaatccattcctttcccacgcttcttctcatcttttttgttttctattccacatactagagaggacaccctcttcagcattgttagactttgttttgcattggttccagcagattctagctctgttttcaaaacacccgtagcacttttcagctctacgatatccttttgaaggatagccttttcgtttctcaatgactcagatcgattctccaattctttcttctctttaatccggacgcgtgggtcgacccggaaattccggaccggtactgcagacggccag

SEQ ID NO: 133661 - DNA, 686 bp, Arabidopsis thaliana
  unsure (1)..(686): unsure at all n locations
nnnnnnnnnnnnnnnnnnnnnnnnnnnnnnnnnnnnnnnnnnnnnnnnnnnnnnnnnnnnnnnnnnnnnnnctttttttttttttttctaagaaaagtagtaaccataaaaccaaagcatacaacttatacaacataagttgtctaagtcatgacaaatacaaagggacaaaacataaacaaaccatcaacagagagaccagtgactagtgttacttaacaagtagaagtaacctttgccagtgtcctcttaccttattcaagacgcacactgaaccagacagaaagacacacacaagacgcagaccaaattttgaaccacacaaagaaaaagaaacacagcatcactcttcctcggactcagactcagcattctggagccactcgatgaacggagtcacgttcttcaaaaccggggagcttttgacacctttattgtaccattcaacaatcacatcctcatccaaaatgtcttcatcgtaaagacctttgataacaagagcaccttctttgggagcctctgcgcttgccttcatgcaaaaggattcaattccattaagcaaaccctttgggaggggacctggttcttcttggncnnntcaggnaagnggattctcttctgntncccnttggggncctgnctgggcccaanggggggntaggggcnttccnggggtctggttagga

SEQ ID NO: 133662 - DNA, 783 bp, Arabidopsis thaliana
  unsure (1)..(783): unsure at all n locations
gaatgnnnnnnnnnnnnnnnnnnnnnnnnnnnnnnnnnnnnnnnnnnnnnnnnnnnnnnnnnnnnnnnnnnnnnnnnnnncttttttttttttttttttttgcagagttgatcaatctctatatataaagggaatgatgtgataattttgttaaaactaagcttacaacattttttctatcgcatttgacagtttcattttcacatctctcgctatatattagtaatataaactatttcaaaaaacaaagaatcaacaagaatccacagatgtaagaaagaaaaatcacagccaaataacttttttatttatttggccgttagataaaactaccttcagaatttcatgcatctagccggtaaacctgtctgatgattgacggcgacaatctcagagacattgttgcaacgaagaacatcttgaccaagcttagctcctgcagctttaagacctttaagcgaaaccggcatgttgaagagattgagtgatggaagcttagaaagcggagggagtttctggttcggtaagaagtttctgaaatcatccataagcaatggaacctccgaaatcggttttggttgtgttcaccacattgtctttagctgcgatgtggagccccnggttccatgggggttggttanaanctgattgggtagggaagtttggggatagccaacgancccccaggacacanggcgtaagattcnccagncggtgcaccgtggcctgatcngaccgacnggactcggcccggaccagnngngaaaaccccagctnggnaag

SEQ ID NO: 133663 - DNA, 519 bp, Arabidopsis thaliana
  unsure (1)..(519): unsure at all n locations
aatgnnnnnnnnnnnnnnnnnnnnnnnnnnnnnnnnnnnnnnnnnnnnnnnnnnnnnnnnnnnnnnnnnnnnnnnnnnncttttttttttttttttttaagcttaaattatatatcaattgataaacaatatcaatgtataaaacagtattgtgatccctcctgtacaaacaacacaatagtgatgaagatactcttcttttgatcaaatatttatctcgtttcttctctaaccatttgtgcgaaaactttgctcattgagacccctgcaatatctcccactccattcacactaaactgcatggtcgagccaacgacactcgcctctggcttatcatccaccattgctgctttctcatcttttgcttgcacctgaagcatgaactctaggttccacaacaaatctcccattgctggcctctcaattccgttttgggacaaacacttctctgttacctcacagtactttttcacctcttcaagctttacttttcctacaagaaatgggtctatgatatct

SEQ ID NO: 133664 - DNA, 565 bp, Arabidopsis thaliana
  unsure (1)..(565): unsure at all n locations
nnnnnnnnnnnnnnnnnnnnnnnnnnnnnnnnnnnnnnnnnnnnnnnngtaggaagatatatattctttttgacccaatagaaaacagagatgcagattttgtaatgataaccaatcatgtgttttcttttctttggcccttataagagaggacaagatatacaaagagcaaccaacacccacaaacatggggttgattgacaataataaaacatcgatcgctgaaaatcagtttttgtccattgttacttgctctggttcttttccctctataatgttcctcaaattgggaaatcggatttatttcgaaaagctttatgttaatagcactgttgggggagtacctgcagggcacctatgtcgccttggtcttctggttgcatttccccaccctgtaaggctcctatcttccagtcccaccatttgtacactactgttattcattggctgtgccaaagaggagcaaaccggagctctggcaatgtgccggcaagccgttcttcccgggttgngcctncgggaanccggtccattaaccgggggtcaaaagccccaaaanccgtnt

SEQ ID NO: 133665 - DNA, 625 bp, Arabidopsis thaliana
  unsure (1)..(625): unsure at all n locations
nnnnnnnnnnnnnnnnnnnnnnnnnnnnnnnnnnnnnnnnnnnnnnnnnnnnnnnnnnnnnnnnnnnnnnnnnnnnnnnnnnnnnnnnnnnnnnnnnnnnnnngggaatttgtttttgtcatccctcgcactcaagtttggtgtgattctacaacattcttctcatatttttacttgccttttccttttaaaatgccaaatggtaacaaggttgcaagcttacacacatgaaaataagaaggggttacattagccagtgaagaacctcgtggataactagttaccaagaatctacttgactacattaacagttcacatatcctaaacacacaaaaatcaccaaacatgacttcacttcctttcttgtttcgcatcagcattactcgtcacaacttccattttctccatcttcttatacccaaactccttggtcttgatcccacattcctcctgcatcaccatcgcaagattgttccttttgaaagctgcatatatatgcatcatggcaaagaacacaagccctgttgatccaaaggtcatgacgaagcaagtgacaacctcccacatcctatcacttgtcctcttcttcgcagcctcctcttttctaagttgttcctcttttcta

SEQ ID NO: 133666 - DNA, 602 bp, Arabidopsis thaliana
  unsure (1)..(602): unsure at all n locations
nnnnnnnnnnnnnnnnnnngacnnnnnnnnnnnnnnnnnnnnnnnnnnnnnnnnnnnnnnnnnnnnnnnnnnnnnnnnnnnnnnnnctttttttttttttttaatcggccctgattattgcatttagggcaaaaaaattactacaatattggtgatgtttattacactcttgtctaagaaaggagattagagtgattgaatttgaatgaatagagttacaacatatatagattattaggcagtgcaagagagttgaggaagactattttttttacggacaagctcgtgcatatcatgcactatcttgaacactgcttctggtttagccagcctcaatgcattctgtgacattatctccaactctttcgatgccggtccaaaccaatccgctacaatcttcgatatctctttcggtgattttgagaatttcccacatccgttttccaccacgtacggtacattccctgcctcttgaccagcgatgtaaccgtttaagattatcggtaaccctcttatcatagcttcagctatagtgcctggaccagcctttgttatgatgcagtcacaggcacccatacattcctccattttcgttataaacc

SEQ ID NO: 133667 - DNA, 519 bp, Arabidopsis thaliana
  unsure (1)..(519): unsure at all n locations
gaatgnnnnnnnnnnnnnnnnnnnnnnnnnnnnnnnnnnnnnnnnnnnnnnnnnnnnnnnnnnnnnnnnnnnnnnnnnnnctttttttttttttttttttttttgaaaagaacattgtattaaaacctcaaagattcttcctacagagtcatatgttcaaaaactgtgctgttcgaaaacacaaagctacctgggattagttagtggcattgtttgaaaaagatttgatttgatgaaaacaaagaaactcgggaagatttctatttcagtcggggagacgatatgatcgacctctgaatgctgcgtttgaactctcgggtggggcacgagcgcttgaataagctcctcctcctcctactcctcctccagctccgggtcctgctgctcctacaccacctgcttgtcgaacacttgcaactggagctccaattcgccatcttgctacgattttattaacccattttggggttttcaggtagttttttccggtagcaagaggatgaaggactgttaggaagt

SEQ ID NO: 133668 - DNA, 523 bp, Arabidopsis thaliana
  unsure (1)..(523): unsure at all n locations
nnnnnnnnnnnnnnnnnnnnnnnnnnnnnnnnnnnnnnnnnnnnnnnnnnnnnnnnnnnnnnnnnnnnnnnnnnnnnnnnctttttttttttttttactgcacaaattattacatttttttctgtttgaattctggtcactatagttgtaactaatcggaacaaattgaagcaaaccagaaagaaaatgtaaagtcaaaaaaaaaaaaagactgttaattaattccaaagaatacattttccaccaaatctgagaaactatgtgcaaaccaaataacattaaacactaaagactgatctcaaacgatcccatcagttctcctctgttcaagtaaacctgtctcagatagtgagccttagtttagttaaccgatgaattgttcgaacttgagtctggtgatgatccattactagccatagaagcattactgatatcttcattgttatcatcggttctcgatgtttctgcatcagtctttggctcatcatcatctcctgtaggaagcagatatctgcaaacaggg

SEQ ID NO: 133669 - DNA, 603 bp, Arabidopsis thaliana
  unsure (1)..(603): unsure at all n locations
nnnnnnnnnnnnnnnnnnnnnnnnnnnnnnnnnnnnnnnnnnnnnnnnnnnnnnnnnnnnnnnnnnnnnnnnnnnnnnnnnnnnnnnnnnnnnnnnnnnnnnnnnnnnnnagtaaaaacccaaacgaaataaatctttatttctattttttgcctgcttttttcctttttttctcttttttttttgatgaatgaatagagagagttacacgaaaaaaaaagattacaaagaaacagtccatggaaatcgagagactgttgataatgaacattacatttacaagcatttacagaaacagatgataaaagaaattgattttaaatgttattttttcagggtattaaagatcatcagtgagtaaaagttgcagcaaacgggattagtatgtgaccccttctccattagagctttctttggccatagtttaactaaactcaaccttcttcggagaaagcgaaaacaccaccaagcatgtcatcgtcctcatcatcatcgagttttccatcagatggagcatccttatgctcagtttctgtaacagtttcattggagaccacctcctcgaaaaactgctcgaagtttggggagccgtcaatgggtcct

SEQ ID NO: 133670 - DNA, 517 bp, Arabidopsis thaliana
  unsure (1)..(517): unsure at all n locations
gaatgnnnnnnnnnnnnnnnnnnnnnnnnnnnnnnnnnnnnnnnnnnnnnnnnnnnnnnnnnnnnnnnnnnnnnnnnnnnnctttttttttttttttttaaaaagctcatttgctgagaaagtaatttatagctgtgtgaatacaaaatgaagttacatattacacaatgaatctgtagctcatatgtagcataaccagccaaaaatctcacaaaaaataataaatacacatggaatctccattgttggatagtatctctgcaacatctgtatgccatttcacgacttaggtatcttactccagttcactaacaaggtccttaagagagggaaccttcatggccagagttttgtagagtctagagtagcgagctcttgtgccatcagctgttctagctaaagccagcaaacttagagcttcgggtaattgcacaaacatttgtttcatttcctctaagctcatgtttactagcacagaaggtcttgggacaactctgacaatttcacctcctttggg

SEQ ID NO: 133671 - DNA, 741 bp, Arabidopsis thaliana
  unsure (1)..(741): unsure at all n locations
nnnnnnnnnnnnnnnnnnnnnnnnnnnnnnnnnnnnnnatataccattttgaatgcacgcgtacgtaagcttggatcctctagagcggccgcccttactttttttttcacgatggaataagcgatagaccgaataaaaggaccaatgttgtgagacaaagtaataacataaactaaaagagtaaacgctagtaatagagaaaccgatatggtctcaaaacagaacactccaaaacatacatagattaaccctaataaaaaccattaatcaatttcatacagccaaatctagctggtgaaaaaagattcaggtttttttttacgcactagagaagaacaaaacgaacagtacggcactgagtacagttgtgaacgaggtcggaatcaaagaagatccatcgttccctgaagaaggatttggagctagaaatccggctgtctcaggtccagcagcagctactcctggagcaagacctggagcagtacttggagcaacagacaatccacaagtagcgatagaaggagcgtgaagcttgcatgcggccccaagagtagaagccttatttgatattcaaagaaacttcaagagaaacactgctcttaaacgctttacatagacactttgagtcatttttatgccccgtcttaaagaccagatcaacatgtacctttccggtttcgccaccgttccttcgttgaaactaatgattcacttcccccatgtgagtttataagtcgacat

SEQ ID NO: 133672 - DNA, 624 bp, Arabidopsis thaliana
ctagaagagttatgacgtcgcacgcacgcgtacgtaagcttggatcctctagagcggccgccctttttttttttttttttttttttttttttttttttttttttaacggcccctttttgttgttttttccagggaagtcacttcctttacatcttacacagcagtttaaaatgtttgtagaaatcagataatcggtggaataaaaaaacaataatcagtgattttattaggtaacaatcacaataacataaagattaaaacttttgacataacaaacaaacaaaaagactagcctagccctgcgctttcgtcttggcgaggagcgtcttctttgatgcgcggtggtctaacaatcttatcaataagtccatactcgattgcttcctctgcattgaaccttttcacccggctcaagtctttgaagaccctttccgcaggctggcctgtattcttggctagttcattgaagaggtagtctcttatccttgaaagctcttttgcttcattttggatatcatcagcctgaccacgggctgcaccagctggtgactggagggcgattcttgataatggcatcgcaaatcggtgacccttttctccagccgcaagaggaaaacctgcaag

SEQ ID NO: 133673 - DNA, 509 bp, Arabidopsis thaliana
  unsure (1)..(509): unsure at all n locations
ccatttagtttctttttattcatccaatattttaaatccctgtgaactaataattacatctcaaagttactaagaaaaataactttttaaaaataatttttaatctatgttattatcatacaaaccaagaaaactaagctttgtatgttaaaataaagattatacaaagtaagtattcatcatcttaattttaatgactatggtttacttggtcctgaggttgttgtgcatctatctttatcaagagaggctcacttaaatccgtcgaagcatcatcagtaacgggtcagctccggcaaggctgcaaccgcttcgttcatgtcccctccgggctctgctaaagcttttcctagggcggccttcgccacctttggtacacacaccattaatatcccggggattacaaggctcgaaatcaagaacgcccggcgacctggcgggaacccgcccccctggggggttacaccagaaagggcttttaggttgtccataaactaacgagggnatnt

SEQ ID NO: 133674 - DNA, 515 bp, Arabidopsis thaliana
  unsure (1)..(515): unsure at all n locations
gaatgnnnnnnnnnnnnnnnnnnnnnnnnnnnnnnnnnnnnnnnnnnnnnnnnnnnnnnnnnnnnnnnnnnnnnnnnnnnctttttttttttttttcagaataaaatttgtctttcattgggaggactctgtttctattttctgtcatacttcatcataataacagaacatatcttaaaactcggaagaacaaataaaacccaaccaaaaagactctactaagaaactgatacttacatgcataatttgtatcgatgtttcacacaggaatattgacctttttgaatgagtttgagacggttcttgggctctctctatgcttctctcagacggtgtaagcttgttgaatggtttcaatgtcgagaccttttagtctgacaacagattcaacatgacccttaagtgtgtgaagctcccgcaacctggcgatctcggctcttctcttagcttcttcggccatttgggaaagctcgttgaaatgggttcgctccgggaacatcttagcatctggtgct

SEQ ID NO: 133675 - DNA, 515 bp, Arabidopsis thaliana
  unsure (1)..(515): unsure at all n locations
gaatgaannnnnnnnnnnnnnnnnnnnnnnnnnnnnnnnnnnnnnnnnnnnnnnnnnnnnnnnnnnnnnnnnnnnnnnnnctttttgttttttttttatgtcgatattaaatcttctgatgaaattatacttgccgagcaatttcagcaaaaactgattatttgttacactgaatttctcagataattattatctaaatacagatagaaattgtaggaaatttaacaatttatttgtacaaaagattgaaagcaggcaagtctgtgatgcttgaaacatcatccagtgccagctcacgttccaattgtgctctcgtcgatttcaggacgtcattgaattccatgtaagaagctcgtctagcaagccattgtgcatccatcatttggaaagctatacagtagagattatcgaatgccatttcgtcttcttccagaaatcccaagaatcttatcccggctattgttgatggtttacctgattgaagatctaacatttgtgccagcatgaatgagata

SEQ ID NO: 133676 - DNA, 658 bp, Arabidopsis thaliana
  unsure (1)..(658): unsure at all n locations
nnnnnnnnnnnnnnnnnnnnnnnnnnnnnnnnnnnnnnnnnnnnnnnnnnnnnnnnnnnnnnnnnnnnncttttttttttttttttttaattaataacccgattagcaaaatattagttcacatttctgggagaaatttggtttgtttcctaaactgctccatgagagtaaaaatatagcgcaagaacaaaaacataactttagatgtcaaagtagagcatagagaccaaaacaaaaagttacaactatatctctgatttcttattgtgcggggtaatgatatgagtcacttcacaagccaatcatcatggcttcattgcccgtgaaagcaaatgggtaaggcaaacacacaagcaaggagagaaacaaaaccaggattccaagagacacatacttatcatcaggcaccgtgatttcttcagccagcggcgcaatcggtccacgctgcaggaagaatatcagaaccacccagtagaatgccacgtcgctgaacaacgccgataagcccaaaagcgctatggatgcacccgtgagccgtgttgcggtctttcttccccaaatggagaaagctattttgcccccatcgagctcccccgcagggatactgttaatgccattgatgagaagtccagcccatgcccagatcacaagtgggtta

SEQ ID NO: 133677 - DNA, 521 bp, Arabidopsis thaliana
  unsure (1)..(521): unsure at all n locations
agaatgaannnnnnnnnnnnnnnnnnnnnnnnnnnnnnnnnnnnnnnnnnnnnnnnnnnnnnnnnnnnnnnnnnnnnnnnnnctttttttttttttttgatttgatcttcgatcgaagtcagagagaatgaaaggattctctcgaaataataagacaaagaatgagtttgaagcgattccactcctttccttcatgaaaactctacataattactatgcttatgataaaaaaaaattagatgattattaacattctcaataatcgatgataggttaacagatagaagaatgactgaatggagatgttgagaaagaaagcaccttcaggatgtggatgttgaagagggtcgttgcttcttacggaagatgtagtttaggagcatcccaagtaaagggaaacttgtaaccatgcctatgtaaccaagccaccataccgactgttttgcctgcctacacagctctttaaagcttttctttgttacataatcctcaggctttcgccctctctgcttaagagaggt

SEQ ID NO: 133678 - DNA, 489 bp, Arabidopsis thaliana
acgtcgcatccacgcgtacgtaagcttggatcctctagagcggtcgcccttttttttttttctttttttttgaaaatgaatttctctagtttgtttggtcaacaacattctatacaggatggtcaagtaaaggtgcttacaatttaatctacaactacaccgaccaaacttcaattttaaatttcgaaacaaaaatctttcggctatacataagggctagagtgttggtgattaaagcctttgtttgagccgtgttctagtgagggtttggccattccataacataaccagcgtctctctatgcattggagccgcacgtcttcccagcgagcatctatcagacttgcatctactgatcttgactatgcttagactacgaccttcttctttctcctctgggacatcaaaaccgccttcctttgcatcacacatgtccagagataccagccggagcatcggaaacttcaaagtagcatcaagaaggaagct

SEQ ID NO: 133679 - DNA, 550 bp, Arabidopsis thaliana
  unsure (1)..(550): unsure at all n locations
gaatgnnnnnnnnnnnnnnnnnnnnnnnnnnnnnnnnnnnnnnnnnnnnnnnnnnnnnnnnnnnnnnnnnnnnnnnnnnnctttttttttttttttttttgtgggaaagagagacattaagattggtgactgttttaattcacaatgatgatgatgatggtttgatactacaagacactaacttggaacaagactacggtctcaaagccaaataacttatctttaaaaataacaaggtgaaataaatatggatactgataagctaaataagctagagaaagatggatcttagtttaagcctaagccggaccctgagcctgaacctgtggaagacctaaccatcgggtgactaaacgaaggctggttgatcgatgctgctccagctgctgcagggttatttagttggttgttgccaaacatgacgtttggtgaagctgttgatcctgcattggtctgtattgcattgagaggtaatctcgggccaaacgagaaagcttgctgttgttgttgttgttgttgttgttgttgttgttgttgacgtgccatgaaa

SEQ ID NO: 133680 - DNA, 756 bp, Arabidopsis thaliana
catgacgtcgcatgcacgcgtacgtaagcttggatcctctagagcggccgcccttgccgtccttcttttttagggtgaagttttatgcaaactctaatagaatgtaaaaatagattacaatcaaatcaaaattttccaaactgaagtatgatctttgtttacatatggcattgtgatgatttagtaacaaaacttgtcctaatctccactttcctatgcaggtataatgataattccaaccaaaaattctcgctcacttcttgcttgatacaagactaatcttctttccctccacaacaaacttgccacttcgctccagcttaagtttcaagtaagcaatagcatcttttcttgaagaaaactctgaaagaactgatggtgcttgttcatcgatcagagattttagctgtttcagcttcatgaatccacctttaccagcatcctttttaacaatctgcttgcacaggttctttaacttgattttgggttcaatgatttcatcgtgcttccttttcgcgggaagagaactttcaattacagagtccttgtcatcatcatctgcttcactctcgacttcatcttcctcttggacttcttcgtcatcatcatcatcatcatcactgttatcaaaagaggttttctttcctttgtaacgaacaccagctattttctttggccggtctttgatacccagtccttgttttcccgctgtggctttatcctgaaccatgttgtaaagattctcttgatcattca

SEQ ID NO: 133681 - DNA, 519 bp, Arabidopsis thaliana
  unsure (1)..(519): unsure at all n locations
nnnnnnnnnnnnnnnnnnnnnnnnnnnnnnnnnnnnnnnnnnnnnnnnnnnnnnnnnnnnnnnnnnnnnnnnnnnnnnnnctttttttttttttttttaacccaaattcattcattcatatagcattttacataacgttttctttgaacaaaatcaaaatattgcatacatcaaaaacatatacatacgaaaaggtttatcatttattttattttggttatattcttatgagatctatatgatatatatcgactttggagctgcgtggatgtggagatgcctttataaaggcaggtagcgtctatgcgaacggtataaggacttagggaacaggacaagcctcaatgttccaaatctctttggcatactgagctattgtacggtcactgctgaactttcctgacccggctgtgctcaatatcgacattttcagccaccccttccggtccttataagcttcgtcaactttggcctgagcgtccatgtagctggggaagtcatacccaaccaggaagtaat

SEQ ID NO: 133682 - DNA, 547 bp, Arabidopsis thaliana
actatagaagatttatgacgtcgcatgcacgcgtacgtaagcttggatcctctagagcggccgcccttttttttttttttttagctggaggcccaaatccattagatctgattagaaaacaacagtagtagtctagtagagttacaacaaacaacaaaagctccatgtctcctactacaaaggttcttcaaacacacaacagagaaagaaagagagtgaatttacaagtggagtagagagagagagagagagaagtcaaggaacggtcaagcgatcagaaccaagaggcttcaatgaagatatgagacgaaggagatgaagtctttctacaaatggctccaacacagcttcttcttcaggaggagcaaatgccatacatatgctcagctcttgcaccgcctctccatattgcctgtcgtagcacagcatcataccaagggctctgcgaagtgcccaggtatgaggttgcaaaatcaacaacctttctgcagccgcaatagccaacctaagatcttgaggccgcaacaatgggaaattagaactactg

SEQ ID NO: 133683 - DNA, 522 bp, Arabidopsis thaliana
  unsure (1)..(522): unsure at all n locations
atgnnnnnnnnnnnnnnnnnnnnnnnnnnnnnnnnnnnnnnnnnnnnnnnnnnnnnnnnnnnnnnnnnnnnnnnnnnnctttttttttttttttttaactgaaacttataatcatcttattcacaaagcaccaaatacatagaaatatggttgtgattacaaactctgcatttcaaataattgatcattcaggaaaactctagttctcaaaatcggtgctttgcatccgatcagtaccaacaagagacagcttgttatcatatacatcgatatatccaaacgaatacgtacctgggggacactccaaggcagcttccaaggatctatggtgaaccccatgagaatcaacaaagtatcctcctttatgatcatgtccggacaaacaaactttaacagagtcatacttgtgtataatgttcatcacttcatcaaaattccataacaaagctgctttggatgccacaccagggctcataggcacatgcccacatacgataactctctggtttgaattcgatgcat

SEQ ID NO: 133684 - DNA, 516 bp, Arabidopsis thaliana
  unsure (1)..(516): unsure at all n locations
nnnnnnnnnnnnnnnnnnnnnnnnnnnnnnnnnnnnnnnnnnnnnnnnnnnnnnnnnnnnnnnnnnnnnnnnnnnnnnnnnnnnnnnnnnnnnnnnnnnnnnnnnnnaaaaaaaaacagaaaggaatcattagcacaaaacttgatggtctactcaattcaatacacagtcaaaatgatcgctttaaccaaaattctctgatggtaaaacttctgaaagccattgttactaaaagagatggaattggagacaacatttcatcaatcagacatagcaacatccatattcctccaacgggcaggtacgttctgaccacaattctccaggacattcaccaatggtccagcttgataagaagcagcatccttttctgttatatagctgtgaagtacgccgtgagcactctctctagccatacttgtcagaatctgagtgtaaatttcgattgatgggaaaaagtctggaagtagaacggtttcagagtccctcataactgtagtatccaactgttcaaaa

SEQ ID NO: 133685 - DNA, 508 bp, Arabidopsis thaliana
  unsure (1)..(508): unsure at all n locations
atgnnnnnnnnnnnnnnnnnnnnnnnnnnnnnnnnnnnnnnnnnnnnnnnnnnnnnnnnnnnnnnnnnnnnnnnnnnnnctttttttttttttttaccaaaggagattatcttaaataatttcgacttggggctttccatgtccttacaaaagttttggttccatggaagaagattttaatctccgatacaaaaaccaaacaagacctaagttactataagaattaaaccctcactcttgatctattaaagctagaggcgtggttacaatatataacgacatagataaaagactaaaaatggctactacggaaccaaatcttggaagctttagaaaaactcaaagtctagaaatttaccaccagatttcgtgtctgctgctgctgctgatactgctgggtggtcccatcatccttttgctattactaccaaacccaaccggatcaatcggtccatactttggtggcggttcggtctccatctgtctcggtacttcaggtggagtgcta

SEQ ID NO: 133686 - DNA, 517 bp, Arabidopsis thaliana
  unsure (1)..(517): unsure at all n locations
aatgaannnnnnnnnnnnnnnnnnnnnnnnnnnnnnnnnnnnnnnnnnnnnnnnnnnnnnnnnnnnnnnnnnnnnnnnctttttttttttttttcataaataatctcagagaggtttgtttgataataacaatgacacaaaccatttaataatatgccaaataaatgataaaaaaacacaaaaaaaaaaaacttgacaattcaaaatgactaaacacattaaactctcaattaaatgataatgaacataaagctttgattatgaaatatatctaaaagatatacactctgttgtcttcgttttgggatcttctgggaaaacttggtttagccattcaggaaatcaaaatctattggctggcttcttattggagggaaattggttactcgtctctcggttgctgcattctctgttggttacactgctggtgtcgnaacagtttcaggcggcgctgttgaaataggttaaggtggcgctgttgtacactttcaggcgttgttgttgtttggctagtatt

SEQ ID NO: 133687 - DNA, 674 bp, Arabidopsis thaliana
  unsure (1)..(674): unsure at all n locations
gttnnnnnnnnnnnnnnngacgtcgcacgcacgcgtacgtaagcttggatcctctagagcggccgcccttctggtttttttttttttctgtttctatctcatatatatgtttatagtgttcttcattgtcgtgtatacacagcttaaaatgcagagtaatctcctttgtggcaaaatattgaagattgttattcttcagttgatatctgtgacccatcccttgttatcttcaatcaatcctgtctggatacctacgaggactgaacgcagtttctggcagacagattcatccccggttttatactctactcttttttcctgatatgtgatagtgcccacgggagcaactactacagcagttccggtgcaaaaaacttcatctgcatccattacttcatccacatgaactgccttctctactacctgataaccttgatcacttgcgatctccatcacacttttccgcgtaatcccttcaagaattgttccattagttgcaggagttgagattgtccgacccttgacaacaaagacgttgcaagaagaagcctcctctaagtacttcttcttgacagagtcgagataaagaacgtctgaaaacccccgactcttggctctgctcagtgctttcaaaacttgcgcataatttgtgatgctctttgacgcctccagct

SEQ ID NO: 133688 - DNA, 780 bp, Arabidopsis thaliana
  unsure (1)..(780): unsure at all n locations
attcnnnnnnnnnnngaatgaacnnnnnnnnnnnnnnnnnnnnnnnnnnnnnnnnnnnnnnnnnnnnnnnnnnnnctttttttttttttttttttcctttcgcgctttttcttatcatatttgtaacttttacatatgtgaagtcatgtatttatttacaagaaaccttgtttaaagccaaacaatcaccatgtttattttcactacatagcagtatttagtatactatatactataaaggatccattcacacatggcacacaacccaaaagctatctgcaacttctactcatacttgccggtttgatccttcatcacttctaccatgaacttctccagtttgttgcccctctctagcttcagcagcagttcgaatttcacacgctcttcaaccacctttgccctggctaggattatatctatgagtttataggggaacagtgagtttgatttctgttgaagtgatttcatggcgtgcttcgctgcttcttggacttcagggttatttgttgatactgatctccagtcaaatccattgccatctggtttgaagccaaggtcagagatagtgaaggaggggataatattcttgaacttctgaagctgcttaaagtttatccatgggttcaccccaactttaactttataaaattttttctcaccagcttcaattacttcaagagtaaaaacgtttaacttgccagcaccaacctgcttggtggcttcatactttagcagctaaaaacagcattctttgctggtggctttgaaccgcaaaaa

SEQ ID NO: 133689 - DNA, 508 bp, Arabidopsis thaliana
  unsure (1)..(508): unsure at all n locations
nnnnnnnnnnnnnnnnnnnnnnnnnnnnnnnnnnnnnnnnnnnnnnnnnnnnnnnnnnnnnnnnnnnnnnnnctttttttttttttttaatcaaaggctgtttttttataatttgcgaattcgaatgaataaaatgtgtcttcatcttttgcatcaaaagctatacactcgaatcactcgatgatgaaacagatcatataccatcctcatttacttcccaacaattgggtatgtaacaaaacttaataatatttctaattttttgctgcatttgattctttctcttcctcaacatcagagttgccaatcttgtcaaagtcatcatcacccaggcttcctccatcatcaccatcaccatcatcaggagcttcgtcactgtcttctagatctcccagcaggaatgtatcgagatcttgctcagacgatgcagtagatattctgttcttttcagctgattctgtccttccaagccctggactcttnttagcttcttcatctttactctctg

SEQ ID NO: 133690 - DNA, 273 bp, Arabidopsis thaliana
  unsure (1)..(273): unsure at all n locations
ccgtaagcngggancctctagagcggttgccctgnggggttgaggcttaataaagaaaagttaccattctataagggggagttttacacacaacgggggatgctcttgcattccccataaagctatacaatatcttggatacaatttaactttaaccgaggactaatcaaaaaatgggtttaacaatgatctagaaggagaatccagagccaaagcaactaaagcttcttgcttttgatagatttcttcaatttggatgatgtgctcggggtc

SEQ ID NO: 133691 - DNA, 486 bp, Arabidopsis thaliana
  unsure (1)..(486): unsure at all n locations
tgacgtcgcctgcacgcgtacgtaagcttggatcctctagagcgggcccccttttgttttttttttgaaaccaaagacatctgatatggtatttgatttgaggttcggttacggtttctataatacatgtgatggtgaaaagataaattcatagagaagaccatctgattctacaaagatttctatcttctgattcttatcacagtatttagggagcacctaacacattagaattatccccattggcaagagaaaccatggaagtgtgttcttcaacacttgcagcttcagtgtttaagttgttagcagcatcagcaacactcccaccatcatccggtttcattaaagccaactgattctcttctgttttctttgagagatccctcaatgtacccctgttagcccaaaaaagtccacaggcattgcaggagagtcctggggccggagngacggtncgcatcattgggtgtacatttgggaactaat

SEQ ID NO: 133692 - DNA, 902 bp, Arabidopsis thaliana
agctatgatttcgcatgcacgcgtacgtaagcttggatcctctagagcggccgccctttttttttttttataatttaatgggactatttgtcgaatagaataatgttttttgttacatttgcaggtgaacacgagtacctgctttaaagagggatatgatgtacatatatatgatctatgaatcttatgcttctttatcttctagcttgtgttgaacagtttccacaagttggagtaacattgctccaatgaagtaccatgtaactcctgctaacaatatctgctgtcatggactgttaactatggattaagccaacgagccgccgatttggtcgtagatcacagaagcggatctgtaacttgcttggtactgaaccaacaatactgctactatggttgtcccaattggaaatttctctatcccgaactggtttgtatcccctcttctactagactggccacttctcctaaaggaaaattggtttaccaatctaacttagcggcattccgaagactaatcttttgaaacctcgtttgttttgtttttccaaaaatgaagggataaaataaacaaccccgttttacgacatggtaactacccaatacaaattttcttcttcttatcaaaaggcctaaggttataaagccttggaaaaccctatttatcatatctattgaggagttacgctatatcacggacgattctcggggattcgtcggcatttatgggctctacaattattcggcctcgtgcccaaccaaaaacaaacactttctaagataactatttattatgtatggtaatcgtttgcctgggaaatattcaaaccacgcctatttattcttattcaattttcttttggccataaaaaagggtttttattacacttctaattgtctat

SEQ ID NO: 133693 - DNA, 477 bp, Arabidopsis thaliana
  unsure (1)..(477): unsure at all n locations
cnnnnnnnnnnnnnnnnnnnnnnnnnnnnnnnnnnnnnnnnnnnnnnnnnnnnnnnnnnnnnnnnnnnnnnnnnnnnnnnnnnnnnnnnnnnnnncctttttttttttttttgtttttaaaaaaaagtgtatgtgtatattttccagtttccacactagtacaagcgcttttgacacctaaagagattgctttgtaagaaggcaactggatctccattctaatagtacaagataatgaagcaacataggctcccaagaaagtaaatagctttagacaatcacgcacacatgtaactcaagaccaagtttgtacttacctatgcttgtgtgagattgtcgaatcaacaaacatcatagttcgtctctagacctcactggaggagccactccttacgagagaagcttgtggggttacttctcacaatcacgtctttcaagcgcgagagaggttcaaggtacttctggcccagtttcttc

SEQ ID NO: 133694 - DNA, 442 bp, Arabidopsis thaliana
cgttttttttttgtcaaaactcactccccctaaaatttcaacagaatctttctatctctctatagcactaaaatataatctgtccctttttctctggcagagcctcaccaaatatccccactaaaaagagaataaacctaccaatggtggtaccccaatggggggggggatgtgttcatactgctcttgcaggagaagccagatagtcctatctcccgttactccttttctccagctatgttccctttatattggccagcagaaccccatcaacctcaaaatgtccacacaaaagtttcctttcgttttgggtaaagaaggtgcagcgtcaacataaaagtctgggaaccgagaaacttcgacacccttttcaaacaatatgtatgtgggaagctgagacattccaccagcaagagatattccaaactttgccgcagtatta

SEQ ID NO: 133695 - DNA, 546 bp, Arabidopsis thaliana
  unsure (1)..(546): unsure at all n locations
tgannnnnnnnnnnnnnnnnnnnnnnnnnnnnnnnnnnnnnnnnnnnnnnnnnnnnnnnnnnnnnnnnnnnnnnnnnnnnnccacgcggtgcggggtgtcgtctaattaatatattgttccaaagaaaaatatgtagctacgtcttgcctctaacacctctttttcacatcacaagcatcttaaaatttcttaaatcactcttttcgcgatgagacatgtctttgtcgaggtgttggttctgatctctggggtcatcttggggttgagctatgcgtttgcaccaatctcatcgtatcaatgggtcgtctcgtattctcaacgtttcattcttggaggcaacaagcaggttatagtgatcaacgacatgttccctggaccgatccttaatgcaacagcaaacgatatcattggcgttaacattttcaacaatttgccccaacccttcctcatgacttggaatggattgcaattgcggaagaactcgtggcaagatggagttcgagggacaaactgtcccatactaccggtgacaaattggacgtacc

SEQ ID NO: 133696 - DNA, 548 bp, Arabidopsis thaliana
  unsure (1)..(548): unsure at all n locations
tgtnnnnnnnnnnnnnnnnnnnnnnnnnnnnnnnnnnnnnnnnnnnnnnnnnnnnnnnnnnnnnnnnnnnnnnnnnnnncttttgttttgggttttatcaagtaaaattgcacccaaaactttaattagttaaaataagatgtcctgtccacctccaggggtaattctcgtattagcaaatacaaaagccaaccaaagaaaaacgttgtgttgaaagagaagtatactatcaagtaacaatagacgccgggtgagactgagctaaaggaattacccaagacacggcaaaaataaacttggcctgacagtttcagacactaagatgtttctctttttcattcacaatccttgagcaactggttttgtgcaatggacatatattcttcaattgggaatgaccgactatccgactgaatgttggatagttcccaccaagggaccgaaaactaggcctttatcgctacatgaccaaatcatgaggagagtagtagtcccgataaaacggtacatgtggatggattggggcctcccgggtctggtataagaga

SEQ ID NO: 133697 - DNA, 515 bp, Arabidopsis thaliana
  unsure (1)..(515): unsure at all n locations
nnnnnnnnnnnnnnnnnnnnnnnnnnnnnnnnnnnnnnnnnnnnnnnnnnnnnnnnnnnnnnnnnnnnnnnnnnncttttgttttgggttttttttttaacttggaataaacggacaacctcataattcattgtaggagaagtgtgacacttcatacatgaattaggaaaaaaataacgatccaaatgatctgaattttatacagactccaatggtactagaatgtcttgatttaaaacagatcaaaaaaaaaaaactcgaaattcatcgtcgagtatcgggaaaaattacaagagataaatgagagctatagaaacccataatggaaaaaagaaaaaagaaagaaacaaagatttttttgttttgattgataactagaaggaaaacataataaaattatgattagaaattatgaagagaggaggatgatgaggaagtacttgaggtgtaattaggtgtaagtgtaaaagatttgcttctcttcttcctcttctccaagaaccttttcacagatc

SEQ ID NO: 133698 - DNA, 522 bp, Arabidopsis thaliana
  unsure (1)..(522): unsure at all n locations
ttaggtgccactctagnaagatcttgacgtcgcctgcacgcgtacgtaagcttggatcctctagagcggccgccctttagttttgtttttgatgctaaatgaaaagttttttctttcattaaaagcttttttttttttgagatagagatagtgtggtgcagcaacttacaaaggaaatcaaaatcaattgaataaggggagcaacacacaaacaaatacagaggctcattatcattcagcggcgaattaatttgctgctttacagttttcaatgatgtgtggtgcttctcctcagggctgcaaatataccccctcctagtcctgttgaccactttttcttctcctctccctcttctcctacctccttggctatctcttgaagctgctctatgatctctgagaaggctggtctctgcgtanaatcatgctcccacaatctctccaatagctctggcaatttcggatgccgtgtcttttggattgggggccttaatccctttaggacaacccctactggtgcct

SEQ ID NO: 133699 - DNA, 510 bp, Arabidopsis thaliana
  unsure (1)..(510): unsure at all n locations
atgacgtcgcctgcacgcgtacctaagcttggatcctctagagcgggcncccttgcgttttgggtttttaaataacattatttttgtaatatagtaaaataatttctaacaacctattatagaatatcaccatagaggcaatttacatagccgcaccaaacattctttctccttacattcaacaatatcatgtagagggatcaaagggggtctaggggcgaggatagcgagagcgccctttcttctttaagaactctgggatctctatggagctgccttcagggaatgatgatgaaggaccgcttggggcccccattgatgcatccgcttgggtcccctgaaggggcctcccttctccttcttcttggcgtttgaagcccgctgctataagggtaatacttatttgaccactataagagggtccaccacagcaccaaatttaagattccctggtggatcaacgagggtcaaaaatacttggtgagcaggatttacctgaaacaggggtaa

SEQ ID NO: 133700 - DNA, 676 bp, Arabidopsis thaliana
  unsure (1)..(676): unsure at all n locations
taggtgcactctacaagagcttgacgtcgcatgcacgcgtacgtaagcttggatcctctagagcgggcgcccttttgtatttgggtttacaaactcatgtcttctcctcagattgaaacttttataaatccttataacaatcttcgaaaacttgtccaaaagaaacgcaacaacattatgtctcaaatgaaaaaactcttggtaacatgaaacttaaaaggttctaaagcaaacacacttaaaagagaaaggaacagtcgatccaatagtatacatgctacaatgcctgcaagccgtggccatgagccatcaaagttaaggagactcacttcctctaggggaagtgcggtttggctcgtaatcatcatcaacagggctccggtcctctttcgaactgtcaccaccggctcctacaacaggactgacaacagagtttctgccattgtcttgggggctaccaccgtcacggtcagatccgacttccttttgaagctttggtgatggtggtgggctcccgtctatgatctttgggctgccttcatcatcaagaaccggactacgatctctggctcttggcgatagagagtcatccatccgctttgatgcgcgacgtgggcnccgggatccgacggactgnagggacagttcccanaggggngataagntgggaacatgt

SEQ ID NO: 133701 - DNA, 542 bp, Arabidopsis thaliana
  unsure (1)..(542): unsure at all n locations
nnnnnnnnnnnnnnnnnnnnnnnnnnnnnnnnnnnnnnnnnnnnnnnnnnnnnnnnnnnnnnnnnnnnnnnncttttgttttgggtttattaaatttgggttttaattaataattaatctaatcgtctttgacaagtatataataacaagaaaaatgcttatgaaacgaaaatgaaatatttatgaggaaattttgtagctgacgatagaaaagcctcctagatcgatgtcttattatctcaagccagtagctgataatgccattagctacgccgtccaaaatccaaataatcaatgtgcggtttaagcgctgaaggcgaataaagtatgtcaataccttatacgaggcaaacaacctaattctttggcatattttcgtatgaactatgaatcttttttattttgggggattcttaaaaacaaaataggagttccggtgttttcagggaatggaagtttaagaccccttcgaaatttataaatgtataaattttgttaagggcgggcagttgagaaattgaccttacaaactgggtcccggg

SEQ ID NO: 133702 - DNA, 563 bp, Arabidopsis thaliana
taggtgcactctagtaagatcttgacgtcgcctgcacgcctacctaagcttggatcctctagagcggcccccctttagttttgttttttttatataaaaacttgaattctcaaagcctttgaccacatgaatgcacaaaatcttggcttatgtaagaatggttttacatttgatttcaattacatcgaccaaagctcctatgaactctattcgggaaccaattaacaacacttaggggggcggctcaattcaccatgactcagaaaagctcatcatcactatcatcatcactactatcactcaacacaaagtctccttcatccctccacccattcatcttccgaaaacgccgatacattaaacctcccaaacccatcactctccacccgtcatctccgccttctcatcctcatcatacgacaacgaaaaccactcatcattcccaccaaatcccacctcatcctcctcaaaccttgggtctcttccccggaatcaaatcgcttctcaccaatctttcccttctcaacaccactccaaggcacccacaaatcagcatgccttcc

SEQ ID NO: 133703 - DNA, 480 bp, Arabidopsis thaliana
  unsure (1)..(480): unsure at all n locations
atgannnnnnnnnnnnnnnnnnnnnnnnnnnnnnnnnnnnnnnnnnnnnnnnnnnnnnnnnnnnnnnnnnnnnnnnnnnnnnccacgggtccgcgaaagagaccatcaccgtgagaaagagaagaagaacaaaaaaagttagccatggcatcaagaagagtttcttcgctgctctctcgctctttcatgtcctcctcacgttctatcttctctcttagaggcatgaacagaggagctcaaagatacagtaacctcgctgctgctgtcgaaaacactattactccaccagtgaaagttgaacacacacagcttctaatcggtggaagattcgttgatgcagtgtcaggaaaaactttccctactttggatccaagaaatggagaagtgattgctcaagtgtctgaaggtgatgcagaagacgtgaaccgcgcggctgcagctgcacgaaaggcttttgatgaaagaccatggcctaaaatg

SEQ ID NO: 133704 - DNA, 556 bp, Arabidopsis thaliana
tatacaagagctatgacgtcgcatcgcacgcgtacgtaagcttggatcctctagagcggccgcccttttttttttttttttaaccccaaagtagtcatgtattttgcgagaatagaagaacaaaatgaaagcaaaagatgagattatttttcctgaaaacagcaacaacaaaaaaattaaaaaaagcataacttttttccggtcgatgcttttacgcgttcggattccagggcctccaaaaattggaatggaacaaacccaacacggtccggtaataccttcctcgccaaccctttgtgtcccgtcacattactcgccgccgccggaaaaaccaccaccgtcgattcttcttcttgtccatcttcttcaacaacaatctcatcctccggttctccttctgccacctcagcttcactcaatctaactggtgacgacacgtggctactctcggaaacagtggtctcgttcattggctccacgacgggtttagaatccttatcaccattatccgtgacccgaagagccggtttactatccgaatcagtgacccgacgac

SEQ ID NO: 133705 - DNA, 761 bp, Arabidopsis thaliana
  unsure (1)..(761): unsure at all n locations
tatacaagagttatgacgtcgcacgcacgcgtacataagcttggatcctctagagcggtcgccctttggtttttgttttttttttttacctttttttttttttttaaagaggaattctctcagatgtatttgaattttgtaccaactgtatcattaaaaattaaatctaaaaagtaatggtaaaaactgataacagcgtttttggaaatagtcatggagaaaaagattctaacacaattcacatttaaaaaagaagactaaattgaccgttaagagtgtttctctaaactttaaaatggattagaggagtttctgagttctgcaatgttttgaataaattccctctaacgatatctatataacaaaaaacaaaaaaaagaagaccgaagatgaataaattcttcagaacgtcttctttctagcaacagcttttcgaggttctctcttggcagatgtagtgaacccgggagacgaaattccaaccgtggcttggtagatgtctttcaacctgggggatgctgaggaatagagcaattgccgnaactcccaataacccagtggcaatatagctgcagggtgtcacttcctggctctgatgactgccacaatgctgtatcgagtgggccnctatggntttgggattgggctcgaatnaacttcaatnatcccccggttnnctttntgggggncaaagncggcttgnnttnaggttcacaaaggggtncccttgggannctttttcttggnagagttgngggtgg

SEQ ID NO: 133706 - DNA, 580 bp, Arabidopsis thaliana
  unsure (1)..(580): unsure at all n locations
gaatgnnnnnnnnnnnnnnnnnnnnnnnnnnnnnnnnnnnnnnnnnnnnnnnnnnnnnnnnnnnnnnnnnnnnnnnnnnctttttttttttttttaactttaaatcactctttatataaaagaaaatttaagacagctagattctaaaaggcttccatttactttacaatcaacatccaacaaaaccaacgaagagcatgaaaaaaagagaagcatgatttcatctgaaactagtttagtaagaacaacacaacacgatttaagaggtgttcatggcatcagcgtgatagctctcaagatctttgtcaagatcagcagctgacttctccactggcttctttccatttcctcttccaccaccacgaccacggccaccattaccacgccctctagcacgaaacccgcctcttcctcctctcatccctcctccctgctggttatgaattggaaggcgggcgaactgacagtaggagctgggcctcttcctcctctcccacctctaactcttcctctccctcctcctccttgttggataacaaccgtcctcttcagccttccattgagtccagtgacattcaca

SEQ ID NO: 133707 - DNA, 669 bp, Arabidopsis thaliana
gacgtcgcacgcacgcgtacgtaagcttggatcctctagagcggtcgcccttttgtttttttctttttttttttttttgggcaacaacacgtggttttttaatacatagcaaatgattaaagtttacaacacaatcaattaatcaaacccactaatctagagaagacttttacatgccccagattcctctagctgaagcaactctgctattagagcgggcagggagttcatacaaaatcctagcaaatgaatcagaatacttaccctcttgaaaaagcagctcagcgaaagcattctcatacgcgagtagcaatcctctgttttgaggctccgagacaaggttctcaaggatcattgcagctttcctacatacttctggaaccggatgcggagtctttatcactttcagcaacctatcaaccgcccatctctcacttgctagctttaatctgcaatccatgttaacttccacgagattgtagagtgctccaacagctgcagcttgtgcatcaacggcttgtatgctcaaaagatcgactagtcgcttgtgtatctgcggaattaaaggactaatgaaaggttcattgtccggattgattatcaaacgccctagcaactcagcagcagcacaattccaagctttgacagaagaatcgaggattccgacca

SEQ ID NO: 133708 - DNA, 532 bp, Arabidopsis thaliana
  unsure (1)..(532): unsure at all n locations
nnnaggtgcactatagaagagtcttgacgtcgcctgcacgcgtacgtaagcttggatcctctagagcggccgccctttttttttttttttttttttttttagagacaaatattgaatcctcttaagattttgaaagttgattccactgtaagatacagctcagaagattcggaatcctcttaaacttttacatttcagtacgaatacttcctcctagaaaaatgactacaaaatcttgaatttggattccagaataattctccaaccttgctttatcccgagaccattcgtcgtttcggtagagctcacatcaaactatccacagtattgcaacaaatgatctcacaagaagaagaaagtccttgaacttgatcatccacaatagtttctgatgacataaaagtatgcataccatagatcacatcttaggattatgccctgtaaccttatacttcacgaatacaatttatcgacaaaaagactgaaactctagctaaacttcatcctcctaattgaaatcaaatatctccta

SEQ ID NO: 133709 - DNA, 553 bp, Arabidopsis thaliana
  unsure (1)..(553): unsure at all n locations
cgattgtnnnnnnnnnnnnnnnnnnnnnnnnnnnnnnnnnnnnnnnnnnnnnnnnnnnnnnnnnnnnnnnnnnnnnnnnnnctttttttttttttttttttaaaaagtttctttgcatttttcacatattctgattttctaacttgggccaaaatactagtcagttgtcactgttctaatcaatgcagcgttttcacagaactcaaaaggttgctgaaaaaacatcaaagaatcattcattcccctaacttgtttcttaaatctgccgacattatcatatggcaaaagagacaccaaaccatcaagctggtttaagacgatggaggattcacgtctggctctgggttatcggcatccatttcatcttcaccgggtagagtccctgtccgtagttgcgccaccacgacatgagtaaccatgaagagggttatcancangggcacggtcggattcaaaggngnggttcccncccaantgggggggttttggcctngtccccaggnaatttcgggggggggnnaaaacngtttacggggggggngngnaaaanngg

SEQ ID NO: 133710 - DNA, 563 bp, Arabidopsis thaliana
  unsure (1)..(563): unsure at all n locations
ctatagaagagtatgacgtcgcacgcacgcgtacgtaagcttggatcctctagagcggccgcccttgaaatttatgaaatggatcacaaaaagaaaagaaaagccaaactcaagataaattacaacaagcccactaattttctacacaaactatttacagtttccttttccccctttttttttctggttgtttgtatacaccctcgcattaacagtaaaagacgaagaaggagggtggtaaaaaaagataaataagaaaagctcacatcagagttgggacgatgatctagcaccaccattactaagggatcttggttgccttagaagctcaatcaacgcctcagccttttgcttagctcgacttgttcctgccgccctgggaaacgagcccctaagcgggggtaccgccccttctttagccccattgttntntaaaaaaactnnccccaaaaagngggnnaatttggaaanggcacctttttngncccggggcccccccaaaattncccaaggnngggncccccttcccaaaangggggtttnttcgggcnggnttaaaggnc

SEQ ID NO: 133711 - DNA, 699 bp, Arabidopsis thaliana
  unsure (1)..(699): unsure at all n locations
nnnnnnnnnnnnctatacaagagttatgacgtcgcacgcacgcgtacgtaagcttggatcctctagagcgggcgcgcttttttttttttttttgttttaagaataaaccataagaagaaggttttacaaagaagagacgagccaaatgcttacacaatctgatcaatcacattcactcgagatacacaccacacactcaagaagaaacaaagaagtaagaaaagaaaaggaaaacaacaggggaacgtgacacgtgtgtatgttttcaggggacgaccgagggagatgcggtggtggagcagcatttattaggttggacgagacgagagattgacgcggcggagatgatgagcataaggattacgccggcgaatgcggcgattaatgctccggcgccgggatcacagtaagtggcgaatctgtcacagattttgtcccatctcgcgtgtttgttcccgttctttcctacctcccgccatgaacgccgcccgtgttgctgccgccccattttggagaccatctcagtatgtgaggattgggccccagagagaagacgaccaacccggggcattcccgttttccctctccaaaaaattggaaaaaaacaatttctttacccaatgtttgggggaaggctccgccccctgttggcctatctgctctgacccaccgggagaaatatcccactgcgacatggct

SEQ ID NO: 133712 - DNA, 481 bp, Arabidopsis thaliana
  unsure (1)..(481): unsure at all n locations
annnnnnnnnnnnnnnnnnnnnnnnncgtcccatgcacccgtacgtaagcttggatcctctagagcggccgcccttttgttttgttgttttaaccaaaaaggtattacattacaattttacaacaatgttcaactacgttcacaactctacagagatacaataaacacacaggagaaaacagcttcagtaaaatagcaacagcttgttgtgttaagcaactaaaaactgtaattaagggagaatgggaaattaacatagtgcaaggaataaaacataattagccaaatatataaaaactttggggtggttgggttgaagctatgtctgctctgacctgaaccagtttctctgtactctctggctcaccaaagaccagtgagtgattccatctctgcaatgtccaaggatccacatgtctttgggttttctcactatgcctctcattctcagtttccttcatcgcacttttttttttccttt

SEQ ID NO: 133713 - DNA, 473 bp, Arabidopsis thaliana
  unsure (1)..(473): unsure at all n locations
tnnnnnnnnnnnnnnnnnnnnnnnnnnnnnnnnnnnnnnnnnnnnnnnnnnnnnnnnnnnnnnnnnnnnnnnnncctttttttttttttttctatccctgaattacatgatagttactcattatcatggattttacaaattaatacggttaatctaataaaagttactcgaaaatgacatgatcattagcaaacaataattcacaactaggtgtaaagtttaagtatcttcctcttacgttgctattaaagacgtttccttagtgttcttgagacgttgaagcatcagttcgtagagagcgaatccgccatgatggcaacctggcattctcgatgtcatcatcttcagctcatccaatgagacagtgtggagctgtgttgactcgaaccatcttcagcgctagagtataatctttggatgtcatctgaatgatgactacacttgaggtagaaaaacatagcttggtcttacat

SEQ ID NO: 133714 - DNA, 452 bp, Arabidopsis thaliana
  unsure (1)..(452): unsure at all n locations
nnnnnnnnnnnnnnnagagttatgacgtcgcatgcagcgcgtacgtaagcttggatcctctagagcggccgccctttttttttttttttttttttaaaccgggaaaattcactttattatttctctattttttttcccctgaaaaatcaatcacatgaatgtgtcttcacactactacatatacaacaaacatacacacagagagagaaacaaacttatgtaatttccacaaagaaagagagagttttaggaaaaaatatcaagaggacgagctggcctctatgctagtagtagacatctcttggaacatggaagtttcttcaacatgccacttgagaatctctctcgcatacctcagggcattggccacagtatcactctccaagctcacttgacaaacaaacaattttggcttaaagctccttccacgcatatttacgggttccaagatt

SEQ ID NO: 133715 - DNA, 683 bp, Arabidopsis thaliana
  unsure (1)..(683): unsure at all n locations
atttnnnnnnnnnnnnnnnnnnnnnnnnnnnnnnnnnnnnnnnnnnnnnnnnnnnnnnnnnnnnnnnnnnntttttttcttttttttttttcgtttttgcatgagagaaactaataaaaacccaaaaatcaaaagggtgttcaagttgggcatgaatcctaaaggagcttatgttaaatggtatacacaaacaaagctgcttatcttaaaactactacttctcagcgtcgtcctccctccgactccaaaagtttttttagaaaaaaaaatatatcttgcttgtagtacaattccagactaaacaaccaacaaattacattctctgatatatttgcctaatgaccaaggctaggcaatcgaggaggcacccttgacgattagctagtaagtcaactagattcatgtcctttgtgattaagctttaacctcctctccaccacccgatcctttagctttctctttctcttcttcttcctcatgctcagcatcctcttcttctccttcctcatcctcggcttcatctgctagcttagttagctcatcttgggatcancgctttaaagatgaattttttgaggcgagactgatgtggactaagcannagncgctgaggangcagtgaaagnggccgngtgaaagccncccttcaagaacaaaatgnggtnaatctcacggagggcntt

SEQ ID NO: 133716 - DNA, 467 bp, Arabidopsis thaliana
  unsure (1)..(467): unsure at all n locations
gatatgnnnnnnnnnnnnnnnnnnnagagttttgacgtcgcatgcacgcgtacgtaagcttggatcctctagagcggccgccctttttttttttttttataatcaagatctttctttctattcaaatgcaagcaaataagtttgactcaacaatatatatcatttacatatatataattggacaatatgcacttttcttgtcactacaattcatgaagaatgagtcagatgcaaaaaaaatgaatagggggcatctgtatcaggggtttccttggccgtcagtcttcacagcttcaacgaatacgattcacgtgagaaaatggctcggaaactgcttttggagcagcttttttggcgggctctggtactccaaaaacattccagaacctcagagtctcatctcctgctgctgaagctacggtacaaccatctggactctgggccatatatagaactcttgatgtatg

SEQ ID NO: 133717 - DNA, 455 bp, Arabidopsis thaliana
  unsure (1)..(455): unsure at all n locations
annnnnnnnnnnnnnnnnnnnnnngacgtcgaacgcacgcgtacgtaagcttggatcctctagagcggccgcccttttttttttttttttgagaattggagcagaaatattaaagctaccgctaaattttggataataacaatcatacaataaattcatgtagcagcagagtcaacctacatggctacataccaacactaatgttcatcaaataactgaaaatgccagattctagtccaggggaaacatcatgtaatttatttattttagaaagaaaaactatctcagaattctctctcttactcttcagccatttagccactaggattatcaagtccttcaggaaccttcccaggataggtttgtggtctctgcagagtcagtccccaggttccctccatccacgataaccattgagcgaagctcacagttgctcaaatgtatagacaactctt

SEQ ID NO: 133718 - DNA, 463 bp, Arabidopsis thaliana
  unsure (1)..(463): unsure at all n locations
nnnnnnnnnnnnnaggcgannnnnnnnnnnnnnnnnnnnnnnnnnnnnnnnnnnnnnnnnnnnnnnnnnnnnnnnnnnnnnnnnctttttttttttttttgagttttgattgcttgaaaagaaagataaaagagataaagtgcacaagtttgatacattcttcataaacacattttagagaagctaactcaaagctaacaaagttaaactgaaagccatatactgattctgttttgccattcacaaaatgcagagccaaagttaaactcaaagtcgtattcattcattgagagcattgagagcaaagcgtgaagcttcctgagaacattgaccttgtccctgaggtaataaaggttggctcttcttactttcttcttggtcaccaccttaatcttcctaaggtttggagaatacttgtcaccaaacaccaccagttacatcagtattttcaatgaccaaggca

SEQ ID NO: 133719 - DNA, 480 bp, Arabidopsis thaliana
  unsure (1)..(480): unsure at all n locations
nnnnnnnnnnnnnnnnnnnnnnnnnnnnnnnnnnnnnnnnnnnnnnnnnnnnnnnnnnnnnnnnngcggccgccctttttttttttttttgaaaaataaggtgtcccgttttatgcctcgagttcccagattttgtagcctgtttacatctgaatagtttgtagcaatgcatttttacacaaaagaaattgagttgtctcagtgacccacaacactacaaggctgcaacttttcttcaaaagcgggttcagctttgcctccacaagagctcctttgactcaagggttgattctactaagtgtattcccctatgtatagcttgaaaacgaaacaaaaagctttcgaaaccaaacccacgggcttaaaggttgtgcccttgctttgaagcttttccaaggctgctcgtttatgatgattaccttgctcggatgtattttggcggataaaattgacagccaaatgtcgacaggtccacagtac

SEQ ID NO: 133720 - DNA, 488 bp, Arabidopsis thaliana
  unsure (1)..(488): unsure at all n locations
gatttnnnnnnnnnnnnnnnnnnnnnnnnnnnnnnnnnnnnnnnnnnnnnnnnnnnnnnnnnnnnnnnnnnnnnnnnnnctttttttttttttttaaaaaacaaattctttattttgtattcatcaccatttgtaattttgtattattacaaaagaaatacaagtaagctggagtttaatgtaaagtctttgaaaccagaaataaaagaggcaagaaaagggagataaagacaagttttcaaaacattgctctccatgaataccacttgagtttaaactgaaacaagagtggaggaacaccaagaactcctctttgaatcctgggatcaaacacatcgaattgtactttatttaacgaatccagaagaacttgtaccggcacagaatgaagcagtaccggtttagcttctgcaggaacctttcccgccagttcacgggctttcagggagatgtgcattggcaaacagatgcaatcttcaaaacacggc

SEQ ID NO: 133721 - DNA, 293 bp, Arabidopsis thaliana
gccttttttattcttatttcaagagataattttgttcatgttttgaagttgtcctctctctcactcttcatttcaaaagcggtaacagtaccaaattagcaattaatgcgtttttcttttctgagtgacttgttcctacagaaccttctctatggaatcacagggacaaaaataaacctcctgcaatctcataatcccaatttcctacacagaacagtcccaccggaatcaatgtgacaagatgagaagatgagaagacattttttgtttgttggcccttcaactcaaatctg

SEQ ID NO: 133722 - DNA, 862 bp, Arabidopsis thaliana
gcacgcgtacgtaagcttggatcctttagagcgggcgcgctttcttttttttttttttaacaataaagaattttaaataaaaactgatgttttaaactcctgaaaaccaaaactccatgaataaaaaaggtttttacgtgtaatgcaacaacactctctcttggacagggtaactttttaaccttcgcgtggggttttgaaataccaaacctctagatagttcagttaacagcagagggggggattttttgaatcccacacagctgcctcgtaaagagacaaagcgcgtatagggggttgttgttgctgctgctgctgctgctttgcacccccttgggttggttcgaaacttcttattaaaaaacgcttttagtaactcctaaaatggtggagttctaagcttttaatggactcaaggttgggatggcaattggtttttttttgcggggaacataggggttcacccctactatttctaagaaaactttcccctgtttcctgggcctttaggctgggagggggaccctttttacttattaagtctcacagatgggaagacatgggtggcccctttacctcctttttatcaattcaatgattgccgaggaagagggggcttttttttccccataaaaacttaaagggggtgaacccgggccaaaatgaggaagggtgtttttttggcctcctcccccttttacggggggccaaaagacccctttgtttttttaaagggaaaggaggtttgagcctccccttggggcgcctatgtgggttctcaaaaaggaaagaactttgtggagttttccccttaactggaagcgcccggggggggtttctttccaggaacccctctttatgg

SEQ ID NO: 133723 - DNA, 637 bp, Arabidopsis thaliana
  unsure (1)..(637): unsure at all n locations
acgtaagcttggatcctctagagcggcggcctttttttttttctttgccggtttttgcatttttaaactgtttaaatttaatacacaaaaacactacaaacaaccactagcaagtagcaatgcttataagggatcactcaagtggattgaggttgtatataccaataagtagacacacgaaatatagctccggtaagctggaaaattgagcaaaccaaactgtatggttaatgtcagtcatctccccaagcatcttcccgttgtttctgtctcgagacaatccggtttttccgggcagcttcttggtctcgctctttagacccgaatccagaagccggtagcttcaatcccatgctgtgagcaatcaaccgttgagctgttttcgctgatgtctttggtctttgagacggcggttccaaatcttttccagaaattgagcccaaaaggggatcgttatcatcgagtacacgtattgtgaatgaccattggacatgcttgcaagcctctttgngcagcttnagggggnttttaggntncaagtgctnttgnttatttgcccangggtgtnaatccccatnttttnaggctttaaaaaggtntccattcaggaggtntnaactttgggngaanccncang

SEQ ID NO: 133724 - DNA, 433 bp, Arabidopsis thaliana
ctatgacaccgcatgcacgcgtacgtaagcttggatcctctagagcggccggcctttttttttttttttttgtaacagaaatttaattaatattgagcgggaaagtgttacagttacatggggcatataaatacatggctatcgcacgttattgatttaggtttcgattccctatccgaaggggtagagagggtcttaggtcgtgtccccaacgttcatcgggagctgggtaacatgcttcatccacgtgcgaggcaacgtgccggtgaagggatgatcaccaaacaagacatcagcaactccttgtccttcggttccgggaagccttgcgactgcaagagcatcgagcatatcaatgtaagggtcgatcacgagcggacgtccagtgactaggatcactagagcacttatcccactaccacacgtgtggctg

SEQ ID NO: 133725 - DNA, 582 bp, Arabidopsis thaliana
gcacgcgtacgtaagcttggatcctctagagcgggcggcctttttttttttttttttaatttaatctagttctagttatgaagacttttgaaacatgtgttgcttaactaacgtttttccataagagacttatacatacattgacttcgacaagaagatgttatacataacgtggctttatttcagccgggggatgttcttaaatcacttgcaatatactttcagaaacaatcactctttagcaacccgaacaacctgtttaccgatatttttcccggaaaacagcccaacaagtgcagcgggagcgagggcgaggccctcagatatatcttcgacgtagacaatcttgccttctttggaatatctcttgacattttcaagaaactgggggaagatatgaagggaatcgctctgcaagaacccttctaacccttaacgtttgtagatagcgctgtataggttcttgattccttgggatgaaagtgagaggctttccaaagaccccattcacacaggaggcgattcttcccgttcctttatgtgggggagcgctgcttaagcatggatcccccccgttttcga

SEQ ID NO: 133726 - DNA, 618 bp, Arabidopsis thaliana
ctatgacctcgcatgcacgcgtacgtaagcttggatcctctagagcggccgcgcttttttttttttttttctatcaaaaaaacatttattcaaaaaatgtgatggttacaagaatcaaagaatagtatacatgtgagtataaagaaaaaaaattaaccttacaaacatgttatataggttccgtttcaaaaaataaatgggggggttatgcatatcaaaattagacaatctgaatccattctccaacggctagggacacctattgtagacgggcaaagagaagataataaccgaggaggagcaaggtttccactaggaggagcaacggcttggatttgatgattttcgccaccaacattcttcacatggttaatacccaacataagcaccctcatgttcattggtacactatggggaagaaatggtgggggccaacattggcaccattaccttctccttggttacgtgttggtgggtaagctcgatctttacgaaaaacatttggccatacttaatctggtttggggggtgcggggtttacgattcttgggctcatatgggctaaagctggatcagggaaggggggaagaatttttccagggcggaagtcggtgggga

SEQ ID NO: 133727 - DNA, 523 bp, Arabidopsis thaliana
catgcacgcgtacgtaagcttggatcctctagagcggccgcccttgtcttttttttttttttttttttttttttactcaaagctcatacctcttataatcggcggggaataaacaagcgttgcaaagtttcttcaaaaaccaaactacttgctaattgcaaaaaaaaaaaatcaaataaatacctccttttggcgcgaccattttgcccctctctctcaatcaattcggcaccgcaacttaaaaacatcggcccattttgtctttctcgacacaacaacttaggaaataatgggtcacgtttgggccttaattttgggtcacttacggaaaacggtttcggttgccgggagatcaacatccaacccgaattcattggtaaataacctttatccctacggaaaacgggtcggttagctggagatcaacatcctcctaaaactgaaggatctgacaatttcctaagggggccactgttattggacccaacaagttttttcttaacaccgcgggcaaaaccagggg

SEQ ID NO: 133728 - DNA, 607 bp, Arabidopsis thaliana
ggcttgattgaaccgacctatattagagctatgacgtcgcatgcacgcgtacgtaagcttggatcctctagagcggccgccctttttttttttttttatgcaattagtattatgtatattatcaccggatgatgaactctactatatacaatacaacacttgtagctagcttgttctaagaaaggttactaacaaaattaactaataaaacacagcagaactattcagccggagcttctcgtgctctttgtactttcaggtcatcaagataattctggtagatataaaacccgaaccccatgaaggcaatgagcatcgcgaccatcttaacctcagtcagcttgtcgtggaacaccgcaatggctgcaagaggcgtaacaatgagtgagagtgtaccaataaggttcgaaaacagcgaagaaaccagaaatataagcgccacggctcctacagaacccaattgccacgaaaccgcggtcccaaccaaagtcaaaacataaatgacttgaccctcgggaaatctttcatctcccactaaacacatccattccccggtcggaacaacccgataaccgaacaacagaagccaaagcgacgtatagatttg

SEQ ID NO: 133729 - DNA, 637 bp, Arabidopsis thaliana
  unsure (1)..(637): unsure at all n locations
ctatactagagctatgacctcgcatgcacgcgtacgtaagcttggatcctctagagcgggcgccctggnttttttttttttttttttttttttttttttttgtttattcttctcgggtttgagaaacaaatattaaggcacattttccagtaggttgataataccctcacaacaaaacctctgtttatcatcacgtttcactatacctaagaacacctttctttccccacgcacaaccgatttaaagggaagaaaacaaatcttttccatcaccaaatgaatgagtcatgcgtgcaatcacaatttgaatttacatatgaagccgtccgttcccattagtttctggccttgatcttcttgggcccgggaactcctcatgtttcgcttctgaaccaattttgtaacctctctcgaccgattcagcttctaacggcagctcggctaacgtcccattagccctgctgaagaatgcgaagagtctcttgcggggcgtttcctctttatcgctaactcatcggggctctttcaacaggtcttcaatataagtcctcccttgaaaggttcttgataagaaacattgggcagctcacgtttcggggtatttaccagaaaatgcatgattggttttgggaccaag

SEQ ID NO: 133730 - DNA, 874 bp, Arabidopsis thaliana
ctatgacgccgcatgcacgcgtacgtaagcttggatcctctagagcgggcgcccttttttttttttttttttgtcttcaagttataatattttattaaatgaaaatctttcaatccattaccaaacccgaaaaaagaaccctctttccgacaaagtttcatctttgaaattatttgagtcaagctcaatctagaagaggtgtgaggaagaatcaaaacagaagattacaacttttgttgaagaatctgtcattgagggccgagcttagggcagccctcagctaaaggcaagtccaagttgtcgactgtcctaaaagggcgggtaccatcttatcaacgtaaagattaccatccaaatgatcacactcatgttgcaaatcctagcttgccaacctgaagcattcacttcaatcctctttccttgacgatcggagcccgcactaccacctcaagggatctctccaccggaggtctgaatccatcaacactaaagcttccttcaaagaaaagagctttcttggtgcttctctccttgagaaccggtttcccatcaccttgagatcaaatggacgctttcctgagcaggaatctcttcctttggggcggaacttatatactctttggttctccatacaatattcttaagggacaccattggaggagggggggggccactccaggaggcaccccataaccttaacatatcacataatttttggaaaccctccgaccggattctcccgggaacctttcgggcctttcgggagaaccgggaaccgaagccatatctcggggaaccattttttttttttaccaaaccaatacaccggtttgggcaaggggggagaaaaaggccaattccctccggaaagggg

SEQ ID NO: 133731 - DNA, 714 bp, Arabidopsis thaliana
  unsure (1)..(714): unsure at all n locations
cactatattagagctatgacctcgcatgcacgcgtacgtaagcttggatcctctagagcggccgccctttttttttttttttgccaagaacgttaatttttttgtgttcatttataggacactaacttagagagagaatttacaaaacaaagagaatctcgcaagctcagacatgctacatatgagtatattatgatgcaagaacagagccttcggtgattttccaccctgacttggaccagaaaacttcgtatcttgttgtgtaggttctgacatcagtagcattgttttctggatgaaccaaatcagatagacaagcagactcctccagagttgcttccaccagagcacgggttccatctgctgagactgtcacactgtcaacagatagtttcaacagtgtataatcataaaccaacccaagctgcgcagtttcagctgctctgtcagtccaaatcttcagcattcgcccatccaaaacctctggtaacatttctatgcggngatcaggcccaaaagccagagacttaatcttctgccacttggatactatattctctgcagtcctagcatccattctgggaagggcttctgaattcgcagctctgactgaccctatggtagcgacatcagattccatagaagaaaccttatccttgccgtgaaaaaagagctgcttttaaaaaaaacttctggctgaacagngaaatcagg

SEQ ID NO: 133732 - DNA, 656 bp, Arabidopsis thaliana
ctatactagagctatgacctcgcatgcacgcgtacgtaagcttggatcctctagagcggccgccctttttttttttttttaaaaaatatagcaattcttggggagcaaagccgcaagatatttacatcgtaatgtgaagaataagacctaaaagtaagccattgctttacataaataaaacagcaaggcttcaccttttacacaaccaaaaggagatttttgatttaagccagttgggatccaaaatacatttatttactgacttaaatctaaaaccctctattttatttacaaattatttgcaaaatatatataacaggaaccatcttgagatgctttgcttagttaggctgtacaaatagctctcggtcatcaacttgtacctcttctcaggttgtgttataagttaagaagcttgaggttttacttactcagagatggttatggaggtggtgttcgcggcaagagagacgagagtccgattcttctctctccaggagtgataagcttctcaacccgggcaacgatgtgtttcccatatgtggatctcttcaaggattcaagtgtactttgatgcgaaaaagatgagtgcaagactttgatcatacatgttcaagaacctctgactacatattcccaaaggggcctcatcatcg

SEQ ID NO: 133733 - DNA, 850 bp, Arabidopsis thaliana
cttgacaacgcatgcacgcgtacgtaagcttggatcctctagagcgggcgcgcttttctttttttttttttttttttataaaaaaaaaaaacatatctttcaaatgattagtcaataacatgttcaatacatcacactggcctaaccaagataaatatgggtgcaagacaataaagagagatcatttaattaaaaggtgcgggggggaagaacctttttaacttctaatccaaataaccggcaaggccaagaccgcgaccgcaaaaccgtaaccacctttccaactatgttcagctttaaccaaatgaataccggaaaaaatgtaaaaatagccagtttgaccaaaagtcttcctatgtatgaagaaacccattccatatttttctggtattcgatggcttatcccggcccagctagcaatgcccagcatttgaagaacgccctgaaaagtgtggttatcccgaggcctttgggctggaaaacatattggccctaggccggttttaagaaccaacccgaatggcccctttaaccgagggaaaaaccggggttgggaaggtttggggataaaccaggggggcccatggtttatgggagccctttggcccacataatatttttccccccaactttttttacccagggtttttttattaaggggggaaatttaccccttggaacctgttttaatggggggggggacaaaggggcttttaaccaaatcggaaaaggaaaaaccgcggcccaccgtaaaaatctgcggggggggcccattatattttgagaccgccgctttttttttaagcgggagtggtaattttgggagtaccctggaattcccaggggggtt

SEQ ID NO: 133734 - DNA, 575 bp, Arabidopsis thaliana
gtacgtaagcttggatcctctagagcgggcgcgtaatgaatccaggacgaaccattgttggatatggagaaggataccggagaagccctgcataaacaaaaacaagtctctacaaattcatcagtagatgtttacattggaataccctgaacaactgcattggcataaatcaagagtatcaagaagcagtaaataaaaatcattttgtattgttaccacaaactagagcaaattagatatgcacaccagaggcagtacaaataccacccagctgaacagagatcctgaaggacacattgagaagatagcaccaggatcgtagtcattattaccacattaagtagtcatacctcacagggcaacttggaaataggggaaaaatctataatcattcggttgaatttgaaatttaagaattattggaacttcccatcatttcatgcccatttagaacttataaaaacttattattacccatcataaatgctttatttccaacctttagccgcttgacccacaggaggggatagaaaaaagaaccttggcaaaaatgtgacgggaggtgtgaatttaaa

SEQ ID NO: 133735 - DNA, 815 bp, Arabidopsis thaliana
ctatgacctcgcatgcacgcgtacgtaagcttggatcctctagagcggccgccctttttttttttttttagaaacttcactatatacaatcacgcgtatatatctgtatgataaacattttagttaataaattcaaaaatggaacaaaaaatcaatgcataattttagtatctacaaaaacattatgtataaaaccggggggcgaagcaaataaaatatatatccttagaatttcttgtcacggccacacttgacttgtaccgcaagcttcttctcgactttgggacatgaatcctttttggcttgctcgaacgtactcttgttcaccggaatacacactctggtttacccaacagtactttttacgactttcttagaaacggagcattacaacttccaagagtgaaagtgcccaagccccttaggattccaaagcttggaattccacaggggaaatttctttgggccggaactttgaaatagccgggaaatgccgtcttcatggatggcctgacttggtcttcttccggggcaggggcggcacttggggggtggtttcctcaatataaaacccacgatttttttggcgagacaaagccaaaagcctgctccaattgggtcttcctaaattaacacaaaattttcttggcttcaaataacctagggtgggttctcgtttggggggcgggctaaggcgatgaacaaatccatttgccacccttttcgtacccaaaaaccttcccatccgtatctaatgggcggacttggtttcgggaaaaaaaaggtggacctggttcccggttttcctaactttc

SEQ ID NO: 133736 - DNA, 513 bp, Arabidopsis thaliana
  unsure (1)..(513): unsure at all n locations
caacaaaaaaaattgaggttttttcaagcaaattttgaatacatgaagtttattttggaaattttcccttaaaaataataatttgctcttcagtgtcttcatagacgtcttcaatagacttttttttggtaagacaacaaattctattgtataatattcataccaaacaacagcagcggcgttttcacacgactccaattcccgaccgcgttttaagattaacaatggatacacaattcctctgatctgaccaaacctgaagacccttttgcaaaattaaaaacatctttttctccctacagtaagctaaagacaatgtgacatttttgataganccaaagacgngngctttttcaacccgtcatcctggggaangctggggaatcttnntggaaccatccataccccttgggggtttggggcnccaggggtcctgggggccnnggggntccatacngggntgggcccanggttccgggnanncctgggaaaanggggcccaggttannaagc

SEQ ID NO: 133737 - DNA, 493 bp, Arabidopsis thaliana
gcgtacgtaagcttggatcctctagagcggccgccctatgcgggcgatttccttttgtttaatttttggggaagacaacaaattctattgtataatattcataccaaacaacagcagcggcgttttcacacgactccaatttccgaccgcgtttaagattaacatggtacacaattctctgatctgaccatacgtaagactctttgcaaaaaaaaaaacatttttttctccctacaaaaagctaaagacaatgtgacatttttgatagaaccaaagacgtgagctttttcaacccgtcattcctgggaagaagctgcgatatcttgttgaacacatccattacctctttgccgttttggcacttcatgatgttcattgggttctctgagcattccattaacgctgcttggactctaggattctggaatgccatggcaacatccagggttctccatgatcttagatatgacctcttctggagttagtcctattt

SEQ ID NO: 133738 - DNA, 591 bp, Arabidopsis thaliana
  unsure (1)..(591): unsure at all n locations
cgtgcgtaagcttggatcctctagagcggcctctccacgtgtgggtaattctttttttttatgcacgacagcgcaactttgtggtggaagagaaattacccttttcatgagttcgttaacataaaaacctttctattgaagggaaaccaaatcccaaatgtgtcacatgactcagacgaccggaggcagaagtggtgccccagaagggggcgcttccaagctacccacgacaagatcggccatggcattccgtgtttccacagggccactcccaacgtgagggaggagaactacattctcaaggccaaagagctcctcgggcacgtgaggctcctgctcaaacacatcaagggcagccccacctaggcggccttctgttagagctttaataagctcttgctcatcaacatgtggcccccggccaatgtttatgaggacgcccttagctcctaatgcatccatgacctgccggtccacaatgtgtctggtctgctcggtcaacgggcatgcgacgacgaggatgttgagttttgagaaggnnaccaccgcgggnanacttganggggancaggntaatggtcttagaagatt

SEQ ID NO: 133739 - DNA, 681 bp, Arabidopsis thaliana
  unsure (1)..(681): unsure at all n locations
ctacaagagcgtggacggggcgagcacgcgtacgtaagcttggatcctctagagcggtctgcccttttttttttttttcgaaaacaaatgaaataacattgcgacaaatatttacatgctcaaaagagagactttagattagattctcggaaaaaaaaagacacacaaaacaggatgctgaccaaagtttaggacaactagtctcctgaaaatagcttaaaatggtaaaataccaaacaagcagatgacggaaaacacgaaacacaaatacattacatctcccatagctttatatgagccactacgtcccttctccattctatttgctactagtagtcggtactattatcttttgtttttttttcccttcccttataaaactaagattttcaggaacaattgcggccttaaaagtgttctgtaacaaagcttggagaagcaacatagccctgcgccaaggtgtccctaaagtcccttcttaaattctcacaaatgttttcacttgctaaaggncatcctccgagtacctacgaggctgcttgcttggaanggtgctttgccgtnctgaaaccccattctctgnaccncaggattttccaggggttggcagggcatnanggggattgggcaacggccttgctggngaanccnaaaggaagggaanccngggtnttngnttgg

SEQ ID NO: 133740 - DNA, 677 bp, Arabidopsis thaliana
  unsure (1)..(677): unsure at all n locations
gcattcccnnctagggncaaggtggncccccccgggggngccncttaaactngnggccccccgggttcagggatccccgcccccggttccccnaagggtaccaaagganctttntgggcacctcaaggctccttttccattacaataattctctttaatttccaggaagaagctccattacccattggaagaacagagcaacaacgaatctcacagtatggttgcaaatgcagtttataaatagtgttgaatcttatggaggccactacaaggtcagaaactcagaagtagatgtctgattgcttggattgtgcctttagatcctttagtttcttcaatatgttgctgaagtaatcctgcaagtacttctctagagtcaccatatccttctgatccacacctagtagactattagtctcagtcatcggagcagagaagaccgtgtcactcgagagaacctctgagaaggccagtctatccgcgacatcatttgtccattgaaagaaccgagttaactgacgcgtgactctcaatacagaaactggaacggttgtgacatttgcatcttgcccagcaagtctctcacatagtgttatcacttcttgtgttgtccatgcacgaggcggccgcgaattcgatatcaagcttatcgataccgtcgacccgtagggggggcg

SEQ ID NO: 133741 - DNA, 958 bp, Arabidopsis thaliana
acggggctacacgcgtacgtaagcttggatcctctagagcggctgctctgttttttttaattctttttttttttttaagggaatctcattatctttttttcccccgcggtttctcctcaaggtaacaaagaatctctctgggcacctcaagctacatttacattacaataattctctttaattacaagaagaagcacaataaccttggtagaacagagcaacaacgaatctcacagtatggttgcaaatgcagtttataaatagtgttgaatcttatgaagacactacaaggtcagaaactcagaagtagatgtctgattgcttggattgtgcctttagatcctttagtttcttcaatatgttgctgaagtaatcctgcaagtacttctctagagtcaccatatccttctgatccacacctagtagactattagtctcagtcatcggagcagagaagaccgtgtcactcgagagaacctctgagaaggccagtctatccgcgacatcatttgtccattgaaagaaccgagttaactgacgcgtgactctcaatacagaaactggaacggttgtgacatttgcatcttgcccagcaagtctctcacatagtgttatcacttcttgtgttgtccatgcacgagggccaccgaaagtcagaagttttcccattgatcttctcattacgtaaagctataagtgtcagcctagcaatatcctgtgtgtccatgtaagcaacacgcgttggtgcatctgttccccaaaccgatttctcctccagaattggaactgcatattgaccaataagaccttgcatgaaaccacataaccgaatggtgatgtggtttaaaccagattcctgaggaaccttctcagtgcagtacttaatctccatgagaggaacctcaggatgcttatcgcaattgtggattgagtaaaagacgtatttctgaatcccctc

SEQ ID NO: 133742 - DNA, 541 bp, Arabidopsis thaliana
  unsure (1)..(541): unsure at all n locations
cgattgtnnnnnnnnnnnnnnnnnnnnnnnnnngacggggctacacgcgtacgtaagcttggatcctctagagcggttgctttttttttgtttatcctttttttttttttggctggcagagaagtaaatactaaatagacaatgttctaattgttcagtttcttatgtcaaacagaagaatgtttcaatagaagggaagtttacattttgttatagtgtgatgtctaccagaactagtaacaggactttccaatggaagctttagatgatcttccttatacttaacagacacaagacaaagaccatgaggcgacgcaggcaaactagtatactttgcaagcaccctcctgtctttggtttcgagaatcattgggacaatgtctgaatccagtgcttcttttccaatctgaatcagcaaagctaccatgtttctgacttgtctgtacaaaaagccagaaccttcaacttcaagctgtagaagagatcccacttgaatgacatcgaagcgagatatagttttcaaaggatcaggtactccatt

SEQ ID NO: 133743 - DNA, 536 bp, Arabidopsis thaliana
cgtacgtaagcttggatcctctagagcggtctgctctatgtttgtgtattcttttttttatattacagaaggggatatttgctgtccattctagtaagcaaaataagataagaaaattacatattataactgctggtcattattttgattacttttttgactgttgctaatcaatcttacaaaaacgctaaacaggtacaggcagataaagctaaaacaactgatttaactgtaacgctcattggcatctttcctttgtcttgcctcaacaacatacctttatacagaggccagtttatgacaactagtactcctgttatcacaaattgcatccccattgttttcaaatctccaccgtctccggaaacaagtctcgcaaccgctgcggcgaagcagaagagattgagcataccgagtgttccgaggacgagaaacatgggagactccactccaaactccattacctcttccttgtatctctctgctgcttcttcttctgctacttttgctgtgatcacaaacgcagactcagaaac

SEQ ID NO: 133744 - DNA, 494 bp, Arabidopsis thaliana
  unsure (1)..(494): unsure at all n locations
cgcgtcgtaagcttggtcctctagagcgtttgccttttttttttattctttttgaagtggcaaaacattttatatgcattccctaacaaaaggcatttacaatgtaatttttacatttttaaccactaaaaggccagaagaagtgcacaaagaaagactgaccaaataataaaataatttttcttggcggttgtcaccaaaaccatgctattccaaaatgcacttcctttgcaacaaacggcttatatccatatgaatccgacagaggaagacaaaaggatttagtcttgtgatgtagcagagtattcaaaaagcaaacgtttggaaggtgcagattgcagaaggacacgcaagcggctcgtgagctggtaaataagtgttccattgcattgccatctcagaatctttcatctgtcttaccacagaggcctgaagacgttntccgagctgcacttcaacttccgttccaaatgatatgttgctcgccagagact

SEQ ID NO: 133745 - DNA, 695 bp, Arabidopsis thaliana
  unsure (1)..(695): unsure at all n locations
gtaaatccgttnnnnnnnnnnnnnnnnnnnnnnnnnnnnnnnngcgtacgtaagcttggatcctctagagcggttgcccttggtttttttttcaaactaaattgtaacttgaatataaaatggtttataatttaaaatgtaagaacatattaagcttttacaagataaaggtagaaattctacaaaaccaaaggcctctcaactgaagaagtttttacctttttcatcattaagtatcaaaaactttcacaatctttctcaaattttaaggcttttcagggatcttcttgtgtctgcatcttcttgctcaacctcaacaactactcttggtttcttctttgcttttccattatcatcagacttctttaaagctcttccctttttatgaatcacaacttgttcttcagcatcatcgtcatcctcgtcatctgagtcatgatcatcaccttcaaggtaagactccttagatggaagaccagagaagtcttccatgtcttcttcttcctctgcttcgagttcatcatcgccttcaacatattcaatcactccttcctcctcctcttctttctcaacttcgtcgttggtttcgatttctctatcaagcagtttgttaaacacactgtcagataaattgtatatttccggacgcgtgggtcgacccgggaattccggaccggtacctgcaggcgtaccag

SEQ ID NO: 133746 - DNA, 509 bp, Arabidopsis thaliana
acgcgtacgtaagcttggatcctctagagcggctcgcctgggggtttaatcctttcttcaataagatgatattatgtattaatatcaatgggtgccaaaaggatacacatcttcttggtgtggaacatcacaacaaaggatcaatctatatttctacacttctaaagctggtcaaaaatattaccccctcacctcctcctttcggggatcaaaacaatttccgttacctattacctcaaattccacagagatcatagtaacatcattaaaccggaagcagaacctccaaccaaaccaccaacttcaaaatcaataaagaatagaggtgtcatcacctggcatgcgagacagatgccgctttgagaaaaatgcatcaactctttgggggctaacccataccaggcgacctccccactgttgggggctctgtttcacttctcactctgcgggagaaaagaacatatcccgccgggctttttatttcagattcatttacagatgacacatga

SEQ ID NO: 133747 - DNA, 485 bp, Arabidopsis thaliana
acgcgtgcgtaagcttggatcctctagagcggtcgccctggtgttttattctttttttaacagtagaatttagtagaattataaaaccattcatttgaatagcacagggtttaaatagaattctaatttctttcagattcaataaaaatcctacgttcaataaccccccctaagtcctttcggagtttagtaatcctccagacggggcaagtaaacataagtagaactctcttgagacaatcatgtcaacatctataaactaaggttcacgaccatctttgtctaaagaagaagataagaagctcaagatgaaaccatctaaggctccttcaagaaccgagtcaggatcagagacctcgtagttgggtcgcagatccctcaccattctgtatggatggagaacataagttcggatctggtgtccccacctgacctctgttagtgattgtgtatgttgagcgttcattgctgtctgacgagccatt

SEQ ID NO: 133748 - DNA, 484 bp, Arabidopsis thaliana
gccgcgctcgtaagcttggatcctctagagcgttcgccctttgggtttttttttttgctttcaaggttctgtatagattcttatgaagcttaagatactcattcttatacatggttagatcattatacatatcattctccttcatataactgataagctccattactctctcaaaatacccgcctctgagattgtgttccacaaggttgtctaacagatcttgtgttgtctttaagtttttgcttgcaatgttcctcttgatatctccccacacgattgtgatctcccggtacatgccaagagatgagtacatgtcgatcaagatccaaaagctttggacaggtggtgggattttcatcttggggattttccggtaggttattaaggcatctccttgcattttagctttgcaaaagtactagagggacgagtttaactcatagagcatacttggagctttcatttgttttcctgcattgattca

SEQ ID NO: 133749 - DNA, 542 bp, Arabidopsis thaliana
  unsure (1)..(542): unsure at all n locations
aacccaaagcagacaaaaagaggggggggggaagncccttgttgtaaccggcctcggagttttagggggagaacagcacgcgtacgtaagcttggatcctctagatcttccgccctttgggtttttttttgcaaatttacaattcataaaatatataccgaaatgaaattcaaatcatagctcatacatatgggatccactttattttaatcatatgacgaaggcatcgaatttacaaaaaacacactaaacttgggaataatgcattttcgtttagacggggaaaagctcacacaactctctgcgtagcaagatggagcacaatgcgaaagaattgaggagggtacattggcggctgctctgctaatgcctgttggattaaaacagtggaaggagtcattccgggaactgtgtttacctatataaccagcacctctccggtttcaacatgcacaaaagcatcgatccgggaaaacccttctaagccgagagtttttgaaatcactcaatgccttgtttgcatctctccaaagcttccttac

SEQ ID NO: 133750 - DNA, 472 bp, Arabidopsis thaliana
gcacgcgtacgtaagcttggatcctctagaggtccgccctttgggggttgtttttttttttttttaaactgatgtggtttggatagtgttcaatgaaaccaaaagctactattaccaacacacaccttaattgattgtgcctggacaagtactattgcagtcagattctagacaaatttctccatttagtagagagagaactaaacatgtaaaaaacttaaaaataaaaaagaaccaaacttgttgctaagagatccaaactaaaagcttaagaagaagacgatagatagctcagtcttcgtagtcgccttgggcatacttgtcttcggggtaatacacagccactacttggtttcctccaaattttcttccattcatccccgatctggcctttgatgagccatccacatccgcatactctaagaaaaccttcccaactcctgggggtgggtcatgatctggattaagcctc

SEQ ID NO: 133751 - DNA, 478 bp, Arabidopsis thaliana
  unsure (1)..(478): unsure at all n locations
gcacgcgtacgtaagctaggatcctctagagctgtcgccctttttgttttttttttgaggacgaagtaaacttttactcagtaaaacaccacaatcaaatttacagttacattaagagaaaaaaagaagaaaacaattgtgagatatactaccaaacaaaatatatgtgtgttgactagtgcagcaacttgggtgtgtcttaagctcgaaggagacgcttctcgcatgttagaatcctggtacttgcgtgaggaccctcggatgtgtcacgcaaagaaagatgccaacccatgggctttgaggattcttgaatttcatccaagacaagaattggatcccagaatgggtggctcttccaccgggggttaaatatccgggccatatctaacaaaaggggggcagctaaaattttttttttttcatcgaaaaaaggccaaagggaggtnaaaagggcttatgttcggggggtggtataaaa

SEQ ID NO: 133752 - DNA, 564 bp, Arabidopsis thaliana
  unsure (1)..(564): unsure at all n locations
nnnnnnnnnnnnnnnnnnnnnnntgacgtcgctgcgccgcgtccgtaagctgggatcctctaaagcggccgccctttttttttttttttgtcttttttttacttgtttttttttgagccacttaacacatgaagatcttatacttataaaatcaagactttaatcgtacattaaagaaaaagaagtcaagtctaagaatctaaaccaaggggttcccattgaggaactcttttactgaagaacctcccaataactctggaatcaagaatctcaagagctcctccagatttaacacatcttggagtcttatactgattcaaagatgatccttgtgagacacaaaaatccattaacgaatcaaacgtgcccaaactcaccactcttatctccaatggcccaatcgacttggccctgttcctgcatctcctggagacgtaatccaaacaatcctcaacctcagagcaacaatcctccattgtcttgtcgtcaagctttggtgggtcattgctgtgacgtggctttagctcccagaagagcacgtaatgccctgggattgatgacgtg

SEQ ID NO: 133753 - DNA, 430 bp, Arabidopsis thaliana
  unsure (1)..(430): unsure at all n locations
aacaaaaccagaagtcgtcgccattatcattcagacaatattcagccaaaatcagttttaaatggaattttacaaagaacccaaaaaacgaaatgacaaacgttttagaaccaaaaaagagagccggacttgttttgatgttcatcagctacttattgcaatatgcagagagaaagacctcatatgatagataaacacatgaaagtgaatcacgaaaaagatgaagcttctaaacggcgatcccaagggacttcttgaacttctctacctctaagtagacagttgagtaaggtaggaactccagagaagtaatctccgcttaagtggttgatggctacagcgagtttggggatctctaggggttctccgttggtaagggtctaatgatctgcggattgcnccccnagtcacngngggnnctctcnggcgt

SEQ ID NO: 133754 - DNA, 504 bp, Arabidopsis thaliana
cgcctgcaggtaccggtccggaattcccggttcgacccacgcgtccagcccacgcgtccgcggacgcgtggggagagggacggggctccatggaatccaacacatgttggagatacctcagtcttgcacaacgatggacacaatggactctctgaatcctcaggttccataactcggcttgcctccatagtcgtccttcgaggcgggatggctacagtttctagaaccgggagaatcggttctaatgatatcagcggtgaagaagctacagaaaatcacaagtaagaaggtgcagctaatactcaccaacaaaccaagactgatttacgttgacccatcaaagcttgtagtaaaagggaatattatctggtctgataactccaacgacctcaacgttcaagtctcaagtgccttcccatttcaagatttgcacaccgagagaaagttttatcgtttgaaagatgcgaagcaaagaactttggcagaggaaaaagggccttctat

SEQ ID NO: 133755 - DNA, 551 bp, Arabidopsis thaliana
  unsure (1)..(551): unsure at all n locations
gcgcacggaagcngggatcctctagagcggcctgcccttttttttttttttttgattgaaactgtctaaagttttgatatgatttcgaaactttaacatctttccacaagttaacactgttagatgacaacaaaaaacaaaaaagctttagaccaagaagaagaagctttaaaggctaacaaaatagctttagcttggtcctgtcttaagctaaaatcgcctgtggtttaggatatgaagacgacaatgaaaaacaaaaaagctttagcctactcctttcttaagctaaaaccgcctgtggtttaggaggatgattcctttccttcttgtaacgcaactgccctggatcaaacccaccttcctgcgctccataaaccgcccacgatggtgtttgagccatatagtctgtgctcgtgaacggttctccagaagcaaccagatcgtggaacttttcatagtcaatccaggtgaaccaacttccaccacttggactttccggtcncccngaggaccancaaaggggnggcccgaaggacncgaacccatggntt

SEQ ID NO: 133756 - DNA, 476 bp, Arabidopsis thaliana
  unsure (1)..(476): unsure at all n locations
agcnnggatcctctagagcggttgcncctggtttttaaatcttttttttttttttttaattcacaaatctattaataaaaaggcacaatcaaaaggagagatgaaatcaagaaaacacacataggctcacaaaaacccacaaatgatgtgacaaatctgttcaaaagcttaaaaccaccatcttgtctcaccatatttgtcattcaagcatggcagcattcaaccgccatcgccaaaacatgttttacaaatggagtcgctaatagccaaaccgcagattgcgaatcttcaaactcgagtggggtcattacaatggcctgaggtggcactagagaaaaggattgatcactttttgtcatcaccaccattttcacntagcttgactctggnttggctcttgatgttggaanctgangctggatggttgatctagaagtcatgggcnaaanccatcggcttctactggccaagnattt

SEQ ID NO: 133757 - DNA, 438 bp, Arabidopsis thaliana
  unsure (1)..(438): unsure at all n locations
ttttttagcagcaacacaattgtnataatttgcaactaattaaaaacttcaaacatacgnaacacaaactctgcaatacttgcaggtcagatctcttcatagagagagcacattattgaaaatttgagatatcttacaaaacacccacaaacatagagtgattggtagagggagggatatccaaggaatcctctagacttcggacaaaagcacccncgcccttgattggggtagctcggccaacaactcgagcaggttttccggaggcgccaccttcttgtcaatcctctcatattttaagggacacttaaccacacttccccgggctcttttacctccggggtttcctggaatagtgaccaagaaagcttttgaactcctgtacgggagaatctccattgtattaccccggagcccctaacaagattcttttcccgg

SEQ ID NO: 133758 - DNA, 934 bp, Arabidopsis thaliana
  unsure (1)..(934): unsure at all n locations
tgttnnnnnnnnnnnnnnnnnnnnnnnnnnnnnnnnnnnnnnnnnnnnnnnnnnnnnnnnnnnnnnnnnnnctttttttttttttttttttatttaacgtaattctattgagacaaaggatgtgaagtgtcatacatcttaacaacaaaggaggcggcataacgagagtaacattggctgcgtcacgggcgagaagaacgattattggaaacaacaatgaatgtacatagaatcttgggagctgatttcgaatagatcaacctcaacactgttgcatggaacagattcatccggattgtttactcgagaaagcacaagaagaattatatgacattattcaaccaggaaatggctttaagattcctcgttctctcacccgattcatgcctcttgaggcatcggttagtttacctgctctctcaatacaaagccgccacaacccaaatgcaaccccttgctattgacattaggatcaggatcctaacctctgaaaacaacggactcaaccatctcaaaaatctttccttcgatgaggtataaacctcaggcatttggaaatgaacttcatcagggaaaacacatccttcctcttgcatttctctgtaaaccgtgtctgctttttcaaactctctttgtttcccgtacgcgttcaacaccatagctatcacattcgaatccggaaagtaaccagcggttctcattttctcaaacacttcgatgacatttacgtatctttggtttcttgagtaaagattgatcatacagccaaatactgatatgtcttttacctccccggattcaaaggcttgacgaaaaacccatgtcgcctcttccgttctcccagctttagccagaatggtgatagcggtttcccgaggaatattatccgggagctttaactcgtgaagcagacgtttagcatgacccattagac

SEQ ID NO: 133759 - DNA, 588 bp, Arabidopsis thaliana
  unsure (1)..(588): unsure at all n locations
gagcggttgccctggggggttaaaaccccnnnaacagaaacagaagcacatattgaacggaattctattgagacaaaggatgtgaagtgtcatacatcttaacaacaaaggaggcggcataacgagagtaacattggctgcgtcacgggcgagaagaaccgactattggatacaacaggggatgtacatagaatcttgggagctgatttcgaatagatcaacctcaacactgttgcatggaacacattcatccggattgtttcctcgagaaagcacaagaagaattttatgacattattcacccaggaaatggctttaagattcctcggttctctcatccgattcatgacctcttggaagcatcgtttagtttatctgctctctcacacaaagcccccacaacccaatgcaactccttggctattggcatttgggaccagattccaatccctgaaacaacgctcaccactcaaaccttctncgtgggataacnccgcattnggaatgactcancngggaanaacctccctgnattcctgaacnggtgntttcaaacccttgtnccganggntaaaccaaggaaaattt

SEQ ID NO: 133760 - DNA, 801 bp, Arabidopsis thaliana
acacgacgtcgcatgcacgcgtacgtaagcttggatcctctagagcggccgcccttttttaaaatttagagctggtagtagtttcatttcatcatttataatccgggaagatttttatcacatctattgaaacaaagaccgacatattttctatcgccttagctttccttgagcttgaccagaaattcagagacatcaaaactatatcctctctgcagaaaaccagcgtggacgagttgttattcccaagaggaaatgctctatgtatgttgttgcctatgtgtctcatacttgatggatcttccacatgccagttctgtatcccacagacattaaagcaagctcccaaagcatgtttggaatgctcaacatactgactttagacccgggaatttcggaccatttcacagagatttcaaccattggtatattaaaacgcttgcacaagtacaccaattcaacatcaaagcaccaccttttcagatggacgtttgtgaaaagtctcctagcagcagccctagtaaacatcttgaagccacactgtgtatcccgaataccaggaccagcagctaatagaaccacgagatggaaacccttcatcagaaagttgcgataccatttcctctgaaattgaaagatgtagcaagagctttctcctcgagatgagcacgagaaccaaatgcggatacttgaacatcacctattttgaaatccatatccttagatgctggatttctgattgaatattcttctctggctactgcattgatctgattttcaagtttttctaggtccgtaaca

SEQ ID NO: 133761 - DNA, 527 bp, Arabidopsis thaliana
  unsure (1)..(527): unsure at all n locations
nnnnnnnnnnnnnnnnnnnnnnnnnnnnnnnnnnnnnnnnnnnnnnnnnnnnnnnnnnnnnnnnnnnnnnnnnnnnnnnnnnnctttttttttttttttacaacaaaatcaatcattcatattgctcatgagctgtcgcagctgattacagccgcaaacacagcgttttaggtcttacatcaacaaattacaaccaccaagatcaaaccctattctagtatactgtaaattacatattagtcacaattactagtagagtagagatcaaaaccctccgattcaacaagagacttcatcttccattaaaccgtcttgatcacaaagaggtttgtcttctttcagcacatctcatctccttcccagttatctttctcctttggccctgtgggaccttcttctccataaagagcaatgggaaacaaatcaacaatgttctcaatagagaacctaacaaccaaaggaagaagattcatgatcttattgatctcagaccctgaatcatatgcaatggtcggaccccattctct

SEQ ID NO: 133762 - DNA, 410 bp, Arabidopsis thaliana
atctggaaccaaggtttaattacacaaaggggcgcttattatttagctaacagaactggcaaggccatggatgccaaactttacagtgtaagctttaatcaacattctaatctccatccatggaagctctttcagaaatctctacaccaagaacactaaataacttcaatctgtaaaactcactgtaaattcctctttcaagctgttctctcgccagtggtggagtcacattctcaaatgactctcaatggttcatctaacagctgcagacattcttgtgggttggcgtagaagtagtcttcttccttgggtctattgggaatcactaaccgtctcttagggcttcccattcgagtagagtgaaatgccttcaccgtggatgaaaatacatcccaactcaacaatccttc

SEQ ID NO: 133763 - DNA, 475 bp, Arabidopsis thaliana
cgacctaaactatttttttatttatcaccgaaaaataacattttcattttttaatattcatcgtattctattagtacaataaatacaacaatacatgagtcacttgtttttttttgtgaagcctctcttttggttttatcatcagcctcccatgctacttgaagggtaggaacggagaccatgagattcttctgctgtagaatctcttgacgctaacaaattcaccttgactatttcagaaagtgagcttgaccgtgcgtacgcagccaatacactcatattgaaatccctgaaggggtcaccgcgtagagactgaacatacatcatggaaaagtccgagccgtttccctctagagttacatccctaagtcgtcttccagtttgagcacaacaacacggatcacattctcatcgcagcttccacttatgatgtagtcattaccattcatgtagtatgatcgagtatagttcatcg

SEQ ID NO: 133764 - DNA, 520 bp, Arabidopsis thaliana
cttgagacttgacgcgctgccgcgtcgtagctggatcttagagcggcgccttttttttttttgtgagcatttctcaccattacttaaacattaaccagaatttgaaacacaatgacactattcctacaaatacatcaaacaagattgagacttgagaccgtggaagaagaatgaaagacctgtcctctctagtgagctatcaagtgtagagaggtaaagcagtccaagcaccagagacatgaccattctcacaaacataagctctcacaactgggttcaccatcatcatgaaaccccaacactctttctcaaacaaaacgatgaatgcaaatccccaagtctcatcgcacaaacaaaacgcgcatttcaaacccgaggtcttactccgattaccgccgtttatcgttctccaaactctagaccttttgaaatccttgaagactcctctaaacaacatgtaatttcgtttctcttctacgtgaatacacccaggccaattgcaaatgtagagacaatcacc

SEQ ID NO: 133765 - DNA, 399 bp, Arabidopsis thaliana
gacgtaagagtttatgcatttgaatcgagggctaatatgttgtcaacattggagacaaaacaaccacaatatgttgagccaattttcttcaaccattacttaaacattaaccagaatttgaaacacaatgacactattcctacaaatacatcaaacaagattgagacttgagaccgtggaagaagaatgaaagacctgtcctctctagtgagctatcaagtgtagagaggtaaagcagtccaagcaccagagacatgaccattctcacaaacataagctctcacaactggttcaccatcatcatgaaacccaaacactcttctcaaacaaaacgatgaatgcaaatcccaagtctcatcgcacaaacaaaacgcgcatttcaaacccgaggtcttactc

SEQ ID NO: 133766 - DNA, 505 bp, Arabidopsis thaliana
tcgcatgcacgcgtacgtaagcttggatcctctagagcggccgctttttttttttttttttttttttttttatcatcaggataaaacttggaatacttgaatttttagcggttatacaaaacatgagaagcatttgaagaattttggggttattatacattaagctgcaaatgaagacagctgaagatggtacaatttgaacatgtgtgagagttatgcttctggacttttcaactaagcaggggggaggccggcacatcatagatagttcaaactagtaagatggctgcgtgaggaatgaaaggaaggcgtcctcgtatgtctacttcttgtggcttaaccagaggatcaatgggtgtctctccatccttcataatctttgggagaaccagcgccaggcagctcgaattcattgacgtataaggacggtgtgccggacactcctctggagacgcttgaaggaaactctgggggcaagatcagattgggagttgccgaagccaga

SEQ ID NO: 133767 - DNA, 408 bp, Arabidopsis thaliana
catgcacgcgtacgtaagcttggatcctttagagcgggcgctttttcttttttttttttttttttttttctagcaggaatgcagaagcaaaggacttgagattcttttgttgttctctttcgcccattgattcttattacgaaaaatatgggttctggggaatacacaacaggagatcctcacactattgggatcaagtggaatgcgccatttttacaaggaactcgttcatctgagtaatctgatgcaagaggtgagctattctctcgtctctctctttgattgcatctctgagatgagcagcgatgatttcacctttttcaagtcgtcggcgagtttcggttacccttccaccaccaaaggaatatgaccataaccgaataaaatgaccgcagagtctttgagaag

SEQ ID NO: 133768 - DNA, 670 bp, Arabidopsis thaliana
  unsure (1)..(670): unsure at all n locations
cgcgtacgtaagctgggatcctctagagcgtccgcccttttttttttttcctaatggaaataataatatttttgatcagagtgagttcacgcagtttccatgtatattcatttgttcctaatttccatgtctggtctcttttgggggaaatcaataaataaaacgaaacttaagcgcgtgtactccactccttgcctctaaagcaacgagtgattaacacgcgctggaacaggagagtgggactcacgggaactaagctatgttccccaaatcagaagactgtcactttttttttggtgctctctctcttcttcttcttcttcttcttcttcttctaggccttcagcacaaatctcaaatcacggagatttcaatttccaacacaaagaaagacaaaatccctcaataaaaaatcccaatcagatcgccgatgatgggatccaacaggatcgccaagaacatcgaagggctctcctccaagatcggacctaacctttaggnggancatgggcaagaaacggananggggttggccccttgaagcggctaaggggttccccgggtccccagggantttccaaaccggggtagcgggaaagcccagaaaggancgnggccggaaaaacgggggtaccgcnggggtaaggccgnttgggcaaccaggggnggg

SEQ ID NO: 133769 - DNA, 535 bp, Arabidopsis thaliana
  unsure (1)..(535): unsure at all n locations
nnnnnnnnnnnnnnnnnnnnnnnnnnnnnnnnnnnnnnnnnnnnnnnnnnnnnnnnnnnnnnnnnnnnnnnnnnnnnnnnnnnnnnnnnnnnnnnnnnccaaaaatccaatgaattctaatcaacacgctccaatataaaaagaatacaaactttcaaataaaacctaaactttcaatggacaatgttaatcccaaacacatcaaggggatctaaagaatcaatctttttgtcaaactatttgtctttgcatgcatttcactgggaagaatctgaacctgagtaacaaagaataccctcttatgataggatcactagcccgagatagagcgatgcacaaagaaacgcaaatgatatcattccccagatgacaccccagccacaaccggtacagcaaggacagatctctgcgaacttctcagcatcgctcgaatggaccctccgagatatcaaatcatcatagatatcgtaaactgaaaataagctattcatcacaccaataaacagaatgacataacggagaattttgactgtag

SEQ ID NO: 133770 - DNA, 1016 bp, Arabidopsis thaliana
  unsure (1)..(1016): unsure at all n locations
aaaggggggggaatcgggggtggcgggggcctctccctttccgcgtatattagccacccccaagcctgtggcggaaaaaagggggggaaatgtgttgtttggcacaagagtgcggaaactattaaggtttggggggttaaaccgcctcccaggggtgtttttttcccacaagttccaaaggggccggtttggttaaaaaaacacaccgggaccaaggttgaatattttgagaattttaagggttggcccccttataagaaagaagctaatttacgttcggcaatggcacgccggtaggtaaagcttggaatcctctaagaaccgcccgccccatttttgttcagcatttttgcgatgagttttctaatccaaaatcaaagtatcagaacgttctttgagaccacaacgcaagaatggagagagacaaattcgagcagaaaccaaaaaaaaaaaacaccttaaaagttcaaaagatttgtcagacttttttttaacaaaaaccagaaaaggggattttaagaagatcaatactcccacttcttgagctccatgccatctggtggagtgctctccactttcttagtcccaacttctttccagtttgtcgacagtaccgtcccattcgactctgcaaatgatttgttcattgcccgcctcatgtcttcatctgcactcgagtatatgtcgctgaaaaatttgttcatagctgcatctccatcaagcttctcatccttctcctgtttcttcacttcagcttccaacttgtcccagtcttttgctggcttagaagatgggtacactggtctctgcgacagcgctgatgagacattgggtttgggcaaaacactttgccctcggacgcgtgggtcgacccgggaattccggtccggtaccgcagacnnnnnnnnnnnnnnnnnnnnnnnnnnnnnnnnnnnnnnnnnnnnnnnnnnnnnnnnnnnnnnnnnnnnnnnnnnnnnnnnnnnnnnnnnnnnnnnnnnnnnnnnnnnnnnacccgg

SEQ ID NO: 133771 - DNA, 627 bp, Arabidopsis thaliana
atgacgtcgcatgcacgcgtacgtaagcttggatcctctagagcggccgcccttttttttttttttttttttttttaactttaaaagtttgtggttgattgaattcaaaattatgacaaacaatattacattgagaagggaactctaggtatcaggcgcatttgatgtacttttcgttgttgggtttatcttaaggcttctctcacatcttttgtggtgcaatcaaacagtgtatgtttcaccatgtttacgattacagatgtctaaccaaattctaagctcttaaaatgggcaaaatacaatcaagagaaaaagagccaattcatttctgacaattcttaatgtaacaactccagagaccattcacctgagcttccaaccatcaggtagatggcactaagctcttagggtttagatcccaaagcaagaagtatcttcttcctcggacccatcggtatgagcatagccttgaggtcatcatctgtcatatgcatgagagcatccatatcaacttcttccacttgaaacgctgttgaatatttctcgagacccaatgattcaagaaagctatcaaccgatgaatcagcctgctgtgatttcttcctggtagcttgactggaagttttt

SEQ ID NO: 133772 - DNA, 518 bp, Arabidopsis thaliana
actatgacgtcgcatgcacgcgtacgtaagcttggatcctctagagcggccgcccttttttttttttttttaataagaaaacaacttccattaccatatacatatgttatcttagaaaatggtggaaatgacaaaagattccttcttcttttacgtaatttatgcattaaccccgaaatttttaaactctttcaaatccatccattgatagacgatggatggcacaacgtttgtacaccaaccccgaggaaatcccgagtttgccctcctccacccacttcaacctccaccatcaactcttctacgtttccaagggtaattctgtaattcatccaaggcagacgcaaccgtaacgtcatttctagcgttctcgatctcttgatgatcatgactacgactcattaacccaatgttgttgttagacccgaacaaagcaaaaaacttttcgccactgtcataactggtggtttgatcggtggatttaagcgggaaactttgaagaaacgttgatgggtcat

SEQ ID NO: 133773 - DNA, 515 bp, Arabidopsis thaliana
  unsure (1)..(515): unsure at all n locations
nnnnnnnnnnnnnnnnnnnnnnnnnnnnnnnnnnnnnnnnnnnnnnnnnnnnnnnnnnnnnnnnnnnnnnnnncttttttttttttttttttcgtaacaacttcacaatccacacctctctatttaaacagcgtttcccacattttttcatatattcatcaaacaaatctcaatcagttcaaaatcatcttccaacacaaaaaaaaaaaacagagcaacacttaacgataacattctccgtggggatcaagcaatcaccattcttgcttttaacaacaatcttgttcacggttgctgtgtttgtagcagcgcttgatcctgcacctgaagaccccattttcgaactctacatgcacgatttacttggaggaagcagccccaccgcgaggcccatcacgggtttgctcgggaacatttacaacggtcaagttccatttgctaagcagattggtttcactcctcctgagaacggtatagccatacccaatgcaaacggggcactaccaacggttaac

SEQ ID NO: 133774 - DNA, 535 bp, Arabidopsis thaliana
aggtgcactctacaagagcttgacgtcgcatgcacgcgtacgtaagcttggatcctctagagcggccgcccttttggtttggtttttaaaggctttagagaaacaagtttcttgatgcttaaaggcataagattgacacacaacgtatgtattaaaatatatctctcttttcttcttgattaattgtatcatacgaaacataaaatggcaaaagtatatttgaagttttactaatgtggtggaataaactagatcaatatcgaattctcatttccgcaacttcaaagtcctttgccaaggtttcttggtattggtctttgcacttttctctcatgggacaatatcaaaagcggcgactgatatccgccggacaaaacggggtacccaagctaccccgggggcctagggatgttgaaaatgcctaagccttccttgctgctctttcatgtcccctccacacaagaaccgccaccaagaactcttccttcaccgggcgggttaattttgtgaaacaaaacctaaatctccccaccgg

SEQ ID NO: 133775 - DNA, 594 bp, Arabidopsis thaliana
  unsure (1)..(594): unsure at all n locations
nnnnnnnnnnnnnnnnnnnnnnnnnnnnnnnnnnnnnnnnnnnnnnnnnnnnnnnnnnnnnnnnnnnnnnncttggggtttgtggttttttattttttttttttgggggttgaatactaaacaggggatttgaccaaagacagagaatgagctaatgaagttgtgacttaacaagcaaaatcgctgtcgtatacaccatgtgtaatatctcttctagttttcaccaaccaagtattaaataaccaacaagaatacaacatcaagcaatagaaggattgggttttccggcgatcagtaaagtattttccggcgagatgcttgccgggatatacttcactagctttgaatttaatccatgtttcttaacccacttcatcctccctgcatcgatgatctgtttgcatttgaatcctaaaacagctctttccatgggtttcattttcttcacaacttcctccacgctgatcaaagaagcatctcttacttctccttcttcctcctcctttggcatttggatcaaganggcaatgtcacaacaccgggaagctgggaccgnganaacatnaatgccagctagtgacgagcatgttggaa

SEQ ID NO: 133776 - DNA, 488 bp, Arabidopsis thaliana
taggtgccctatacaagactatgacgtcgcatgcacgcgtacgtaagcttggatcctctagagcggccgcccttttgttttttttttttttttacgcatcaaactgatatcatatatgaagtcgcaatgggttacaacttacaagctcttgaaatcgatatttggtcacaaaggtgatccttaaatcgataactgatataaagtactgtacagagttggctaaaccgatggctaccggccgccaaaaaaacctccaggtggagctcctccttcgttcatcaacttatccagaaccacgttgaggtcaacagcttggccgttttcaggcagttttctcactgttgctctgacttggtcccttgggaatcccatggttggcaccctgtccattacatcatcgatggggggctctgctttctgatctaggggaactagacccaccaccggttggtgacggctgaaaccatttgcaaggctgtggcaatgga

SEQ ID NO: 133777 - DNA, 674 bp, Arabidopsis thaliana
  unsure (1)..(674): unsure at all n locations
nnnnnnnnnnnnnnnnnnnnnnnnnnnnnnnnnnnnnnnnnnnnnnnnnnnnnnnnnnnnnnnnnnnnnnnnnnnnnnnnnnnnnnnnncctttttttttttttttctcatctgaatttggaaaaattgatcattgtatgtgaaaaatctaaaacccaaatgacatttttgaaaggggactagagtgttgagagagagagagatggtaaaaaaactctcatatgtccccttacaagttaagggtgtggataaaagtaaccacgtgttgcattgtcattgggaggttgtggccggaaatgtgagaatcctgatgatgctgctgcaactgagaacaatggtggtggttgtggtcccggtggctgcggtctcacggcgcttgtttgcccccggtctctgccatccccagttactcatcatcccctcaagcttcacttcctccttttccgttgctccttccctccggcgggattaattataacccgggcatgctccgttccagtaaaggcgatgatccgagggtccataaggaagaggtgaatcaccggctttcccangaatccgganctaccccaagcnaanccacgcgggttccaaaagnntagaaggaatgaaaagcccccaattngcttggggataccggcgaaaantcccagtgngnaanccagnttgcccaa

SEQ ID NO: 133778 - DNA, 694 bp, Arabidopsis thaliana
  unsure (1)..(694): unsure at all n locations
nnnnnnnnnnnnnnnnnnnnnnnnnnnnnnnnnnnnnnnnnnnnnnnnnnnnnnnnnnnnnnnnnnnnnnnnnnnnnnnnnnnnnnnnnnnnnnnnnnnccttttttttttttttttttgttcagaggttttgattccctccctcaaccattacacattttcatttacaatatatgttacaccatttatttgctttaccttaatcataaaaacgcgataattaatgctaacaaataaacagactataaaacctaagaaagagctaattaacaactaaacctttgtttgttgtcgatcgatgcttaattcaatagactaaatcatatatcgcgacttttgtcttcaacgaggagctacattagtaatgggaagcatcatcgactgaacaaagagcggacgtattgatagatagacgatccactaatcctagtatcctacttgttcatgtttactactccggacgaaaaaaccaagtcgttgaggaactgcgagagcaattgagctagtagtgagcatctggacaatagctgacacggttggacgacttcagcttctccttgaacacatagaaagcgatatgggcaatggngcacccggaactncattatccgnaggancncgaaggnggggccccaggccaacggggccatgccccaagncccagccaagggatttagaataaaactnggccaat

SEQ ID NO: 133779 - DNA, 551 bp, Arabidopsis thaliana
  unsure (1)..(551): unsure at all n locations
nnnnnnnnnnnnnnnnnnnnnnnnnnnnnnnnnnnnnnnnnnnnnnnnnnnnnnnnnnnnnnnnnnnnnnnnnnnnnnnnnnnnnnnnnnnnnnnnnnnnnnnnnnnnnnnnnnnnnnnnnnnnnnnnnnaaaaccaaagccacagcttgtcaaacattattgtttcgtgaaacgaattggaccaacaaaatcctacaaatgaaatgaggaatgttttggtgtatagagagaaacattacttaatctcacttgtttctggggatgactctatgggtcaagtcaataagtgcccgcctcgatcttttgacatcttcattggctgtttcaggtagagacccgattgcagctgctgctagattcgcatgttccatggctaattctcttgccctctgtattcccttgctcttcccaagatactctaaagcaatgtcaacattcctaggatctttttcaacttgatcaacaacttcgcgtagttgaggaaactctttcatggcaaagaggattggngctggtatgactccatggcgaatatctgacaacgatccct

SEQ ID NO: 133780 - DNA, 552 bp, Arabidopsis thaliana
  unsure (1)..(552): unsure at all n locations
nnnnnnnnnnnnnnnnnnnnnnnnnnnnnnnnnnnnnnnnnnnnnnnnnnnnnnnnnnnnnnnnnnnnnnnnnnnnnnnnnnnnnnnnnnnnnnnnnnnnnnnnnnnnnnnnnnnnnnnnnnnnnnnnnnnnnnnnnnnnnnnnnnnnnnnnnnnccctgcctcggaaatatttattgctcatctctcattcatatggaaggagtatatacccacataaaagcgtggcaagtctaaatgtcagtaagaggggtgaaaaaagcaccatcaaaagtggaggggtgaaagtcaaaccaaaaaagaacataggggacccagaaaaagattgaaaagcgtggcttcttctataataattcggccacgggacagtgaaaatcatgaacaccagaagccgcccatagccgttgattaaactcttcttgcatctaatctggaacaaacggtgttctacaaagtggacacgttttctgatcatgatccatccaacggncaagacagctccggtgaaatatatgtctgcaatttctcagccaccggatctcttgttctcctt

SEQ ID NO: 133781 - DNA, 584 bp, Arabidopsis thaliana
  unsure (1)..(584): unsure at all n locations
nnnnnnnnnnnnnnnnnnnnnnnnnnnnnnnnnnnnnnnnnnnnnnnnnnnnnnnnnnnnnnnnnnnnnnnnnnnnnnnnnnnnnnnnnnnnnnnnnnnnnnnnnnnnnnccttttttttttttttttgaaatccaaacggtcaaagcaacattacattgtatcaaggtatatgtaatacaccaacttattgtcactgtttaataaacattgatctagttgcttaaaacgtttcatcaggttctgtgcaatggtgttttcatccacactccgcctctaaagccaacatcttcaatcgcgaaagactctagctctggacaccagtttgcggtcacggtcctcaggtacggcattgactgttgcagcacttcccagtccatgtctaggtccgacaatgaacttaacattaaaccttcaattctccagtgagtattctcgtttccccagaatgggtcctgcattttcaccaaattacctgaacatattgacatgtacctcaacatcggaagcttgtgaggactcaaccacgatgggactcgactttccaggatagattggagagaaagcccatgggaccggtgtgga

SEQ ID NO: 133782 - DNA, 525 bp, Arabidopsis thaliana
  unsure (1)..(525): unsure at all n locations
nnnnnnnnnnnnnnnnnnnnnnnnnnnnnnnnnnnnnnnnnnnnnnnnnnnnnnnnnnnnnnnnnnnnnnnnncttttttttttttttttttaaaatagaataattatttattttgtaaaataatagtaatgataatcatatgtgtgatataattttacactgcattttactttttagctaccaaaactgcaaggccatggatgatgatgactgaggtggcataggacaaatttgcaaacatgaccctgaaagcttcaacctttcttctgcatcaactgaagctcttcagatatctctgtacaccaaagaaccctaaataacttctcatctctttaagaaacctaatcttccagatggatatatcattcccattagataactccatccatgtcctgcatcacccccacgaaagacaacattggaggatctgttcattaggtttcttctagtgaattgccattattctcatgtaatagctgaagacattcatatggattagcatagaaggagtcttcttctttcgg

SEQ ID NO: 133783 - DNA, 662 bp, Arabidopsis thaliana
  unsure (1)..(662): unsure at all n locations
nnnnnnnnnnnnnnnnnnnnnnnnnnnnnnnnnnnnnnnnnnnnnnnnnnnnnnnnnnnnnnnnnnnnnnnnnnnnnnnnnnnnnnnnnnnnnnnnnncggccgcgcattacatcaccaagattcacaacctgacttagattcttatcagaaagccccagtagaaaagaatctcctgtattaacaaacttttagtttaacttataagagaagagaagaagaaaaactaaacgaaaaaacaaaaactcttcttttgcgggaatcacacaatcttctatgacccgggcttggatatctcaaggtataccatttgagtatacccattgaacactgacttatccagacgacctaaaccgattcgttggaacaaccggtgcttgccatctgctacgattggtggagtcgctcgagcagggtcataccgcgactgatgggttaatgaaggtcctgcgaccggaggtagctcccaatagacgtcaagaattgattcaacgtagcgactgttttgaaaatgctgattgtatgaaatcggcgtgttagtgtggttgaatcacncncattcccccttaactcccaccatgttncccngnccgaaagtccncgnataatgnttttccagantctccccttggccaccaggtcanggggcnttnaaagtngncg

SEQ ID NO: 133784 - DNA, 663 bp, Arabidopsis thaliana
  unsure (1)..(663): unsure at all n locations
gaatgnnnnnnnnnnnnnnnnnnnnnnnnnnnnnnnnnnnnnnnnnnnnnnnnnnnnnnnnnnnnnnnnnnnnnnnnnnnctttttttttttttttggttaaaggaagagtttttatgagtttttcaaggttctgtcgatacacaacactaatacatatgtatttacaacagaacatggcccgaaagaaaataaagctaaggcattgcacatggatcttacacgataccaatggcattatcaaaaaccctaatatacgaaaacacctaaaagtacagtaggctttattttgttcttgttagtccttagagaaagattgtgtaaaccttagatcatcaggtttacctacagtcttgttcgtcatataatcacagctgttttgcctacctttagcttcttgtgttgctgctgtagtagacgtcatcccctgtgactttgacttcgtatctggttcatctaacccgatcgggattgcgcctggttagagtttttatagcaaagtcgatacacggggtcttgccagataatttggacccggggggngggctcggnaaanccaggttttcagagnatggggnaaaatttcccgggggccccgggggaaangngaccccttcngntngggggggtggtaaaggggttanaannannccggngggtgnaa

SEQ ID NO: 133785 - DNA, 1119 bp, Arabidopsis thaliana
ctctgacgtcgcatgcacgcgtacgtaagcttggatcctctagagcggccgccctttttttttttttttttttttttttttttttttttggacacctaaaacccctcaggtagtatttctctgcaacctgtacttgtgagaatcaattatacaaatgattttgttactaaagaaaagaccgaaagaaagaaagagacgcaaatatgatctgatctgattagatcggcgcataaattacccgggggatcttgggattttgtactgttttttcaaaaactgagatgcctctgaatcgtttctgtggcaaagcactcgtaccaatgtttgggtgtccgctccaagtttgccttttcctccttgctgcatctctagactgcttctaaacctcaagtcatcaataagctcccgtgtctcatatccgtgcaactttacaacaagacgaactctggctacttggttttcaaccactcctttcggaagtccatccccaccagaaataaagaattcctttaagacctttacatcttcttttaacagctttgactcgcttggatgaaatacacgagacgcgcctccatctaatagtacacgaagcaacccatcaagtgatgcttggagcaggctggtgactatccgatcccttaatggctccattatgacactacatagctgtccaagttccgtgtctagggcttcgattaatccttccaatcttgattgagaaacatttggcttatacaaattttcaataaaatggctccccttaaatccgcaggaagataatcttggtcccagtaaactcgcaaatacgatccagagctgcattgatatcttttctactcccctcaaaagattccttctggttaaaactcttggatttctcaaccatagattttctgatgacaatcttttcacgaggtttttttgctatccagcgtagccacatgctgtcttctaacttgctcagttgactaacagcataatgtaaagtattgagctgaacgcaaagcatagcggttgcaggaacatcaatgttaatcgaccttctctcatcaaggtgttttgagtcgaatagttccttcttaacaaaaaccttgattgctgtttccttcttgtaac

SEQ ID NO: 133786 - DNA, 553 bp, Arabidopsis thaliana
  unsure (1)..(553): unsure at all n locations
agctacnnnnnnnnnnnnnnnnnnnnnnnnnnnnnnnnnnnnnnnnnnnnnnnnnnnnnnnnnnnnnnnnnnnnnnnnnnnnnnnnnnnnnnnnnnnccttttttttttttttttttttttttttttaagaggctattttccttcattccaagagttttactggaatttccgaacacgctggtctggtccggtcacaacatactacttttaccgcagaacccagaccagagccccatctgggcccagtttgatgaaattgatcgtaaactacaaacatttgtataaaaagcaaagataagtcaaaagaatgacacctaaaacccctcaggtagtatttctctgcaacctgtacttgtgagaatcaattatacaaatgattttgttactaaagaaaagaccgaaagaaagaaagaaagaaagagacgcaaatatgatctgatctgattagatcggcgcatagattacccgtgggatcttgggattttgtactgttttttcagaaactgagatgcctctgaatcgtttctggggcaaagcactcggaccaatgtt

SEQ ID NO: 133787 - DNA, 585 bp, Arabidopsis thaliana
  unsure (1)..(585): unsure at all n locations
nnnnnnnnnnnnnnnnnnnnnnnnnnnnnnnnnnnnnnnnnnnnnnnnnnnnnnnnnnnnnnnctcttgaacaatatttaactatatatgccccttcttcttctttgctgttcttaattgcaacatcttctacgaattaatcaaaagccaaaaacatatacaaataaaagttgagacaaacgaagcaaagaaaagtagaacatacatatacatacagaaacacatttgcacaaatcccaccgttgattatacaaatcatattagaacatcaaatatttaggggttgccattttgctctaactcttttttgtgggctttccactttaaggccacaagactaagtgcttttgtcgaagtcccatcatccttcaacaccctacaagctgcttccttcaactccttcatcttgggtcctcactcctttgccttccttcaccttccatcaatccttttaccactctaggccacctcttctcttctaacnaaccatggnccgggaagggggctaagggnggacggnaantttnncncaaaaancgggttantttngnncggggaaagggncaggtnaaggggaaccgggna

SEQ ID NO: 133788 - DNA, 533 bp, Arabidopsis thaliana
  unsure (1)..(533): unsure at all n locations
nnnnnnnnnnnnnnnnnnnnnnnnnnnnnnnnnnnnnnnnnnnnnnnnnnnnnnnnnnnnnnnnnnnnnnnnnnnnnnnnnnnnnnnnncctttttttttttttttttttgaaattaacttactcgtaaatatgtcgaaaataaaacatagtcactttaacaatggcaaatccagaaaagctgaaagaaaaatatgcgatggccaacaataactaaaaccaccatattaaggctgcttgaatacagggaattaggacgcgatgttagaccaaattaaactaggtaaacagaattttcagaatgacagcctagttcctcctcaatatcccatgtttcctcctgcacaactttctccaggagttgcataagttccatctcttccttctcaatatatatggttaaatgaggctcgaagcaagaagatatcattccacggaagttaaactgccaggtcaagtaactagtgagcaatggctcaagtggcactgggtggcataatttagaggaacccaaaagaaagaacattggcatac

SEQ ID NO: 133789 - DNA, 535 bp, Arabidopsis thaliana
  unsure (1)..(535): unsure at all n locations
tctacagagaaattatatgaaaagaagaaacaagtttctgtgcccaaccctatggtttttacatgatccatggagtgagccaggagaaaggaaggttccggtcccacagttggtttaaaaagcccgtatagaaggaaaaaaaaacccccctaagtctgtctccttgtgccccaagaaatcgagtgtaagcttcttgggagtcttcttgccagtaatgttatcagagaggaggatgatcttcttctggtgtctgtggtggaaccggtttccaaccaggtttctcgtcccaatacatatcgtagtaaatgtgtcctggggtctttgttctcctcacaacaccatattcccacatatctctttacccgtcttctaaatctttcttctcgctccttgtcagaggatccgattgaaagcatcttcaattgaaggaaaccttggtcactttgccatcgtcgaagggagggaatatcgccttaaacggtttttcattgtccgtttnggcctnagncccggggggcttggntttttnttctga

SEQ ID NO: 133790 - DNA, 828 bp, Arabidopsis thaliana
  unsure (1)..(828): unsure at all n locations
cnnnnnnnnnnnnnnnnnnnnnnnnnnnnnnncactatagaccagctatgacttcgcatgcacgcgtacgtaagcttggatcctctagagcggccgcccctttttttttttttttaagaaaaccaaaaatggatttaaaataaaataagtcaaaactcatattttacaagtcaacggaggagagttcataatttattttagaaaaaggtaaaaaagtaaaaaacgtaaagagtaaaaaattagaatttatcctttctctaatctaagcgttaggactcgtcacaagattctcgtacgtgtcaacagagcttgacggaacggcgaccattactttaacggcgtcattttgttcaggaatcggaagcaacaaacagtaacggtcgcaacagaccgatccaacatgaaccggtttacccaaaccaaaatcaagcttctctaaaccgagacgtgaccattgcgacaatatcaagactccaaccgagtcaggactcgctctctccttgctcacagcttccaccaccgatctgacgtactcgtcaccgactcgctccttcgcttgtttcacgagcatcgtcgcgtagcttaatcctttctccgtcaagtctttcacggtggtttgagcacatccgacgacgaatgcgttcccgtagaacccactgggtagactcggtttgactcggtctctaatgttgacgctaaacaaaagcttaaggacctgattcgatggcaagttcagtgatctcgcccagctccgccatacatgtgcagagagtacctcgaacgatgtgtgtttagaattgaactcaccgagtcgactcgcgagtttct

SEQ ID NO: 133791 - DNA, 588 bp, Arabidopsis thaliana
  unsure (1)..(588): unsure at all n locations
nnnnnnnnnnnnnnnnnncnnnnnnnnnnnnnnnnnnnnnnnnnnntaggtacaactatagaagagttatgacgtcgcacgcacgcgtacgtaagcttggatcctctagtgccggccgctttttttttttcgggaagggccaattcctgactttattcatatccacagcgtattatttaattccaaacaaacaacaacaacaaatcgtttttatgcctcgtacagatccaagtatcccctcattttttatgggaaaaatttatctccacaggcaaataaataaatttaattgacccttatacggagagaaggggaaaaaatatattggattttaatagaaagaaatcaaacatgttttttgtaccttatatatgcaaaatgcagaggatgagaggaatgaatcacatcactcgtcttcctttggccgtgaaaatgaaagtgaaaggagcgaacttgtaaccatctccttcggagaatttgttctgaaactcaacccagtgaagacgcagcgcgtgaaggaacgcgcttagtgtctccattaccagcaaacctcccacggttgcgaatatgaaccccaagacgcccacg

SEQ ID NO: 133792 - DNA, 429 bp, Arabidopsis thaliana
gggataataaaagatcattactgggccattttatagtcccacggcctgaaaaaacatatacatgttgggaaggtccaattcctgactttattcatatccacagcgtattatttaattccaaacaaacaacaacaacaaatcgtttttatgcctcgtacagatccaagtatcccctcattttttatggtaaaaatttatctccacaggcaaataaataaatttaattgacccttatacggagagaaggggaaaaaatatattggattttaatagaaagaaatcaaacatgttttttgtaccttatatatgcaaaatgcagaggatgagaggaatgaatcacatcactcgtcttcgtttgccgtgaaaatgaaagtgaaaggagcgaacttgtaaccatctccttcgtagaatttgttctgaaacttaacc

SEQ ID NO: 133793 - DNA, 556 bp, Arabidopsis thaliana
  unsure (1)..(556): unsure at all n locations
ccnnnnnnnnnnnnnnnnnnnnnnnnnnnnnnnnnnnnnnnnnnnnnnnnnnnnnnnnnnnnnnnnnnnnnnnnnnnnnnnnnnnnnnnnnnnnnnncctttttttttttttttaatttttaacaatcttggagcataatcaaacaaacatacgcaaaagacaatgcttatgttttacagaagtaaactacttactctctttaccatctcttctcagtaaaaagaacaaacacttaacttaaggggaatcattattcattaatcataggctactaatccctttttcccacctgggctattatccgaggatgtcgaatccgacttcgatggagaccttgccttggatggggatcttgacactgatcttgctttccccggcccaaggggagattttgaatatgaccttggatcttgagcttgccctccacggactcaggctggggctagcggagggggaccttctctttctgcaagggggagaccggccacggatagggctgcggctgtaccgccggttgcgataacagagaccaggcgatactgagcggcttcttct

SEQ ID NO: 133794 - DNA, 533 bp, Arabidopsis thaliana
  unsure (1)..(533): unsure at all n locations
cnnnnnnnnnnnnnnnnnnnnnnnnnnnnnnnnnnnnnnnnnnnnnnnnnnnnnnnnnnnnnnnnnnnnnnnnnnnnnnnnnnnnnnnnnnnnnnnnncctttttttttttttttttcggaaacaattactatcccttttggttaattaatctcagtttctttacatcaaatttcaacaatttctatgtatcaccaacacacgaatctgctaactaatcaaaaacaaaatctaatctaggtgtcctcataatacttttcttagttttggacttggatttggattgaagtttacgcttcgaacttgaatcactctgagacttcttcttcatcacagtaaaccttttcctcttcttcttcggcttctccatcgttgctgctttcattgccttagcctctggtatcgccttaagctttggcttccatctacgtaaaccaaccaatggaacatagtctttcttcaacttcaccgtagaacaaaccctaccttctccttctcctcctccttattcttcctcttcctattcggttactc

SEQ ID NO: 133795 - DNA, 304 bp, Arabidopsis thaliana
tttccaaatcaatgaagacatcaacatacgtgaaagccttaatcacactctttctttacaaacatcaagaccaaatataattaggggcaaaccaaattgttggtggatgcaataacatatgtagattttcctcctttttacatgaaaaaataattgccagtcccagtatcagaatttgggacgaatacaagcaatttctttgtatatcaaccaaaataatattaggatagtcctgaaacatcccgtacccaagatattccacctggaaacgctctatgaactctgcttcttcccgtgcagtgac

SEQ ID NO: 133796 - DNA, 559 bp, Arabidopsis thaliana
  unsure (1)..(559): unsure at all n locations
nnnnnnnnnnnnnnnnnnnnnnnnnnnnnnnnnnnnnnnnnnnnnnnnnnnnnnnnnnnnnnnnnnnnnnnnnnnnnnnnnnnnnnnnnnnnnnnnnnnnnnnnnnnncctttttttttttttttttattactaaaaaactatatatacgatgttccaattccaaacactgaatttaatttccctccgcagtaaaagaaccagatgaataaaaattagaaaaaaccaaagcaaacaaaaaaaaatcagcgggttttctcgtttctccaatatagaggccgaaagcaaataaaaagctctgaacaaatacgacaactttgctaagcgatggatggatgatgtatcagtggttggtgaaacctttcgtcgggagacttggagagtctcaatgcctttgatagcagaatcgtaatgttttctggtggaagaagatctcttcccttccggcggtgtaacataccggagagtttcttaaaccggcgccggttcggcatttctgtacctcctctgacgttactctcctcgatgatcctggtgattggcaaacagggacgagcttg

SEQ ID NO: 133797 - DNA, 426 bp, Arabidopsis thaliana
gagagtaaatagaaaatgcatttcacaccaaatgtcgagtatacaaaagttcaaaataacattggatataagaagaacgacgctattaccaagtcttaaaaacaaagatcagaaatcaaattaatacactccaaaaccacacaagtggggttttataacagaaaacattacacgggactcggtttttgttttattgccacataccaaaagcactcaagagctgagctcccattggattttgagtctttagagccctttctagcagaacagtttaggtagtacgatttgatacgcctctcccctggccacgtccaccatacccggagccaccgccgccgccgccacggccaccataaccgccataaccacgccctccataaccaccacgtgagtaaccgttgtttcgtccataaccaccacgccctt

SEQ ID NO: 133798 - DNA, 540 bp, Arabidopsis thaliana
tccaagagctatgacgtcgcaccgccgccgtcgtaagcttggatcctctagagcgggcgccctttgggtttttttttagtaaaacgacactgcattcaacatacaaacaaacaacttataggttttcagatcttgacaatggtcattttcggggaaatcaagaaatatataaaacacaaatcatgtaaagtagattaaaaaggtggtaagaatcttggatgttgagcgggcggaaaagattttcaacagattgaaaccggggctccgttccactccttgagacattccaacaacggatcaataagttttccatcagaaatcgctaagaacactttatcaaactcctctcctggcgaccgaacattctctccaggaagcagttcagtatttacctaattcgggaccaacccgagccatagggtaaaaaccgcccttcctttaacccggtttggtttaagcccgtggtccctttcctcgattcaacccgggcggggttttattttttttgggagaagcagtttcaagcccgggtttaaaagc

SEQ ID NO: 133799 - DNA, 530 bp, Arabidopsis thaliana
taggtacaactactagaagagttatgacgtcgcactgcacgcgtacgtaagcttggatcctctagagcggccgcccttttttttttcctttttaatctgaaaatataaatcataacttccgcacaatagaatccaaacagacaagcaattatggaaatgacaaggaaaagtattgaacttgacacgactctcttagcagctcgtaacaagtactaaagagccaatgtatccatgcaacattggtgacatatcatgaattcactcatagatactttaacaaaagcttttctttcgtttttccattatcacatcataagattcatctagaaatctaaaactgacaacaacaaaataagaacaaaccttggcactgctcattgttgtaggtgtgccttctgatctatgaaacactacctttggtgaatatagccatcaacgtaggcaccagctcgttgtgcttcatcacatacctgtctaaaaatccctcatcggtacacgacaaaacagaggacactgcaggtagttcactt

SEQ ID NO: 133800 - DNA, 690 bp, Arabidopsis thaliana
cttgacgtcgcatgcacgcgtacgtaagcttggatcctctagagcggccgccctttttttttttttttttagtaaactcaaatcatgtaataataatcaaatgaaaacaacaacaaagagtgttgagtctaatacatacacattacattaaaactattgttcagattccaaatttcttcttcttctccaatattacaaactacaaagagagagagagaatggtaataagagaagaaaaacagtacaagagaatcatcatcttgacaaatcttcaaatatctaaatcctccaactgaatgttgctcttaagaggcacataatctccaagatacccaccaagttgatcatacaaagcggtcttatcaatagtctgatgatgataactcttacaaacatagtaaaacacactctgaaccaacaaacccacaagattaaccatcacaagaacaccaactaacaatccaccaaccaaagtcctagtaaaagttccatacttcccaccaccatgaaccacaacagcaccaaaaacaactcccatcaatccacagaggaaaagataaacaaagattaaccccatagccatcttagtcttccctttaagcaactcataagcttttctcatagcggcgattccgtaaaccggttcaagaacagagattacactacctaaatgccataaagcagtgaaat

SEQ ID NO: 133801 - DNA, 581 bp, Arabidopsis thaliana
  unsure (1)..(581): unsure at all n locations
atnnnnnnnnnnnnnnnnnnnnnnnnnnnnnnnnnaatgaaactggttcaatttcatccaaatatgttctacacgaactctttttttctttttgtaaaattcaacaatatcatatacaacgaaacatttacatcaacagataaataaatttgttcacaacccaaaaacaactgattaaagctaatcacaaactgaaatctgtcaaaatccaacacgcacactacacttgtgttctctacttagacacccctccctgtcatttggaactgaataaatgaatctctcagaccagtgagtcttccgatatgacagtgagcagagagtatttagctttgattgagatcttgcctgcctcaacacaaagtttagcaccagtcacaacccaatatccaggttgttcctctggacctctcatcacttccttcgtgtctacaagactcagcaactttggtttcacaggcggtgatggccctctaggatacactgcagagtttatatccaatcttaggatgngggctaagtggtgccggggttggnctaancccggggtaagcctggacgggcaccgggaaaancgggtt

SEQ ID NO: 133802 - DNA, 479 bp, Arabidopsis thaliana
gacgtcgaacgcacgcgtacgtaagcttggatcctctagagcggtcgccctttgtgttttttttttttaaaaaaagatgaattatatgattatcttccttatgaggtattattcccggttgatacaaaatttagatgttaaaaaacagaaaatgacaaaattagcaacaaagaaaaagggcaaacaaacacgcatacaaaattaaatctttttgaatggccttttaaaactatacaattgcggcttagccaaatctcacacttcaattagccacaaccaattccgagccgactcctttaaacccgacatctccaccggtctgtttcttaaaccggacattcacctcagttaaggctcttctagtctcttcgtcttcaggggtctccatcatcaacaacttataaatcttgaatccgggtgtggccatttcttccaacttgggcataagaaatcttgccctggcgccggctttgcctttc

SEQ ID NO: 133803 - DNA, 545 bp, Arabidopsis thaliana
ccgcgtacgtaagcttggatcctctagagcggtcgcccttttttttttttttttttttaaaaagtctagataagaaatatgtaaagagaatgagaatgtcacaaaagatgtacaacagatcctctaaaagccctaaactggtcagagaaaccttattccagttaaaaactttacattgagaaaagttaaaaaaatctattccagggggggagaccaaatctttgcatctatgtcagaatcttacataatcatcaataggagtagtaatacacaaaggagagacgacctccaaggctgcagcagattcatttagagaaggaacccaccctctgtcgtttgagactggggctcctgctccagcttggtcacattctggctgcacctgctgcatctgttgctgcgcccagcagccatgggcggtcaagactcgggttagaagttcctgcggcactggctctcctctcctctgtggtggagatttcttaaccgtgtggaccaagcgtttccatttatccttgagatctacgtaagtgcggtggtcagca

SEQ ID NO: 133804 - DNA, 489 bp, Arabidopsis thaliana
  unsure (1)..(489): unsure at all n locations
aggtnnnnnnnnnnnnnnnnnnnnnnnnnnnnnnnnnnnnnnnnnnnnnnnnnnnnnnnnnnnnnnnnnnnctntgggtttgtttttttttttttttttttttgtgagagagctgagccatttttttttcagaccaaagaaagatctacaaagtctgaagagggcaggacactcatatggcaactcaaagcctcatcagctttatttgcactatttgcaaatcatcaaaacaaacaaacaaaaacccctccctgcctttctcctctcccattgccaaagtagtagctaagcttttctcaggaacaaaaagaccaaaagaagaaaaatattttaaaaaagaaattagaaactatctttccaaaaaccagtactttcttcagttttgtaaagttgggttcaggagtcttaagctacatcctctcttgcttcatgtatcagggatagtctctccgggaaataacggcccaagttcttgtactgttcaaaaaa

SEQ ID NO: 133805 - DNA, 491 bp, Arabidopsis thaliana
ctctagaagattatgacgtcgcacgcacgcgtacgtaagcttggatcctctagagcggccgcccttcgggttttgggttttttttttttttttaaaggcagaaaataaagggttggtgctaaaccgtgggaagcagacccaaagtacaattacttggacagaaacaacggttctatttctagttctagttctagagctgaccgtttgcgctttggtgttgcaactgtgggtgttccaagccatcactatgtatatgtatgtcttgcgactgacctgggggttcctgggtaggggaaacctgggggtgagacattctataataggggtccttcagatcgagtttgcacgatgatgtctgggggattccaccttgattggcacccggaccccacattttaggtgaaaggggttaatttataggggaactctgagcacttggggcaatcaaaagaagtctacccaggattttttgccctcccataacttgaata

SEQ ID NO: 133806 - DNA, 527 bp, Arabidopsis thaliana
  unsure (1)..(527): unsure at all n locations
taggtacannnnnnnnnnnnnnnnnnnnnnnnnnnnnnnnaaacggccgccccttttttttttttttttttttctttttttttttttttttttgtttagagcaataatcataattgaaatccatttaaattttacaggcgccattacaaatttctgccaagattgtgttcatagttatttcgtatgcaacaggaatctaggaaatatagatagaagcaaacaatacatattgaaacactagtgcttgatctgggacaacatggtcctgacatctttactgttcggcctctgttttggatcatccaaagtacagtaacaggcgatcttcagaaccagaagcatctgttcatcgaatccttgatccatcaacttcggatcaatcgcaaggctaggattttccgatgttattatggtcctcatccactttatcagactcatctcggcagtatgctgaaaaaactcatctgaaggaagcttcccaatcaccagaatcccaagaatcactccaaaactatagatatcacatt

SEQ ID NO: 133807 - DNA, 519 bp, Arabidopsis thaliana
taggtgacactctcccaagatttatgacgtcgcacgcacgcgtacgtaagcttggatcctctagagcggccgccctttggtttttgtttttttttttcgatgtaatacgaaacacttagtcaaaatatgagtttaaaaccaaagagcaccccaagggatttggtttgttattgaactaattgatctatttggtacaaaaattataacattacaacacatttcatgtaaaatgctggagtagctttagttttctttgagccttttttaattccttcttacctttggtttcttcatcacctttcagaaatttcatgaaccagtaagcagatgattttgggtggacggggttaaaccggtcttggtggtttacatataccaaaccaaatctcttggtggacccttgcgcccactccaaggttgtccagcagcgaccacgcaaagtatcccttttatgtccactccgtcttcaatagcctgggaaacgttggcaagtaactcttgaatagtaactctacgtta

SEQ ID NO: 133808 - DNA, 922 bp, Arabidopsis thaliana
  unsure (1)..(922): unsure at all n locations
naggtgcactctacaagatctatgacgtcgcacgcacgcgtacgtaagcttggatcctctagagcggccgcccttcggtntttggtcttttttttttttccattaaccattattaattcctcaactaaagtcattagaaaaaaagaaaggctatttaattaactcgaagatgctggctggggttaaaaaattaacccaggggtttggttacaaacttcttacatcacggacggggaggggtgtaataataaaggaaacttaacggccgtcagcgagagggttaacggcagattccttgcaaggacttggaggtagacttgactttcctgacgcaacaagacgttgcacgaaaccctctattctttctccgttactctccgtttaggatccgttttacccccaacgggcgccgtttccacacctctctctttcagcaactcctccgttccgccgttcgtcaaaccgttcgcctggattctaacgtaatcagtacggttccagcagaaagcgttccccagcatctgatcgccggtatcggaaacgccgtcaaccactatgtccaccacacttgacgttgaatagtctccgttacgacggagtttcctccctggtgatgatgacatggtcgacggaccgtttcccaacgacagtacaagcaagtcatctacgccgtttactgacgggaaatctcgtttgttgtgtagcacgtgcgtgacggcagctgctgttggattgttcatcaccaaaccgccgtctacggctgagcatgaggttttcccgtccaccgacactacactgaacggcttgaagaggcttggtgttgctgacgtggcacggcagactttccacagctcgaagtcgaagctcgcggacgcgtgggtcgacccgggaattccggaccggtacctgcaggcgtaccagc

SEQ ID NO: 133809 - DNA, 605 bp, Arabidopsis thaliana
atgacgtcgcacgcacgcgtacgtaagcttggatcctctagagcggccgccctttggttttggtttttgtttgatcatcttttatatacaggggaatcacaggagttgaagcagggcctattaatgccaagacttttctattcagtcgaatacattttcatgttcttaaagaatacaatcttgaaacagagtaacccattgatctacaactgaatgaagctgttctctgttcattatactttttcttgtgaggtatacggtgacttactgagctacgcagctttcactttctcagcgtatcggcttgtatcttcggagtacagtacaccatcccgcgatagaaggcgggaaagagatagagaaaaccgagcccatgggaatcccacgagagcataccagcagcctctcaaaccaaatcctccattgctcagaagcataagtagaagcccagcgaccgctaagcatccagtcattgacaagctgatatatctaagatctcttccagccttcatttcatatacaacagtcttagttcttctagattaggtttgcaggtgatccagaaatgtactcggatgtgacaaccttgtcacgtgtgaagatgc

SEQ ID NO: 133810 - DNA, 531 bp, Arabidopsis thaliana
  unsure (1)..(531): unsure at all n locations
nnnnnnnnnnnnnnnnnnnnnnnnnnnnnnnnnnnnnnnnnnnnnnnnnnnnnnnnnnnnnnnnnnnnnnnnnnnnnnnnncttcgggtttgttttttttttttttttttttttttccaaattcaaactcattatgtttcaaaaatattaatatatcatattaataacctatttgactttccataacagcgacccaaaaagaaaaaaaaaaaggggggaaaatctcattcgaccggaaaacattaaaagggagagcagcttcaagggattcatttataactccaaagattatctccttcatgattctccggcgaatcatcttccatcgtcggatgtatcatcattctcgggggactcatcaacatcccttcagccatctccgtcaacaagaggcggcatattcaacatcgtttcctcatccataaactccaacgaacacgagttacacgacacttcttctaattcttcctctttgccgggttgaaccggttccaataccttctcatccccaccctgatccggttgcttcat

SEQ ID NO: 133811 - DNA, 524 bp, Arabidopsis thaliana
  unsure (1)..(524): unsure at all n locations
nnnnnnnnnnnnnnnnnnnnnnnnnnnnnnnnnnnnnnnnnnnnnnnnnnnnnnnnnnnnnnnnngttctagtctttggttttttttttgaaaaataattgtcaaaaaatttcaacagactctgtcggagatattacaattgttccgctcaccaaaagcattaaagcccatacaaggaaaacaaaaacaaaaactcttaagccactctgattattttcctcactgcacacaaatttacacgaaaacaacaaaagatgaaagaaagcatcatttttcaaaatcgaagaggtttcttcagaatcaagcaaactgtgtttcccctttgatgttcaaaacttcacagtaacttaccaagaaagtaaccatggtgatctacttaaaccacttgatatctccatattattttccgataacccgaaacaatcagatccatgttccgggaatatactctctttcaaagaatcacaagtaatttccggcgaaacccactgtgaataacctctcacattcgagcattcccatgg

SEQ ID NO: 133812 - DNA, 491 bp, Arabidopsis thaliana
  unsure (1)..(491): unsure at all n locations
gtgtgnnnnnnnnnnnnnnnnnnnnnnnnnnnnnnnnnnnnnnnnnnnnnnnnnnnnnnnnnnnnnnnnnnnnnnnnnnctttttttttttttttctcaaggaaagaatcttccctgtataatttagaaaaccctcctcaaccttttcacattcttcacaacacacacacatacactttattttaattaaattacacacacctctctgttcaccactctttccaatctctctagcctcattccatatcggcaaggattcagatagagctcacggcccaattcgagcctgcacgaaactggggacttccccaagaatccaccattttaaactaggcgcaggatccacaaatcccgcggaataatatagagataaatatttatgagaatgaatgttcattcttggtgtggagaggaacaacgaggtcatgtgcataatcaaggagcttccacacatctaactggcctgccatactttgggcctcctttaaaac

SEQ ID NO: 133813 - DNA, 527 bp, Arabidopsis thaliana
  unsure (1)..(527): unsure at all n locations
nnnnaatgaattatgtgcactataaaagagcttgacgtcgcatgcacgcgtacgtaagcttggatcctctanagcggcctcccttttgtttttgttttcaggggtcatgcaaatacataggccccttcccttctcttttggataaagggggggctttccgatctacggtccctcggaacaaagggttaggcaggtagtattgggccctctgacttccacctatgtgcttgcgcggctcccgcgaaccggagggggggaagctctcttcgaccttacgggggagcttacttttactctctgcctctttgatgggggggcggcgcggcaaagccccccctacttaagattcccttcataaggataattttttgctgtcgcgaccgctttggttaggcccacttataaagcaaggtctagcttctatagaggccctcccacttcccttctgggggagcttggattttggcctgagggaatttttccaaccaaaaaagggcgagcagtattagccccttttttgggaaccg

SEQ ID NO: 133814 - DNA, 676 bp, Arabidopsis thaliana
  unsure (1)..(676): unsure at all n locations
gattgattttnnnnnnnnnnnnnnnnnnnnnnnnnnnnnnnnnnnnnnnnnnnnnnnnnnnnnnnnnnnnnnnnnttgcccttttttttttttttcttcatacactttaattggtttattagacatcaaaagtacactttaagcctttgttctatcaaattcgcaagttctaattttacatccgactcaacctcgtcgtacccatcttcttcgcaatctctctaagtacaaacttcataaccttccccgtcgaagttttaggcagctcatccacaaaggacaccgttttaggaaccatatatttcggcatcttcttcctacaatactctatcatttccacctccgtcggtctttgagtcaacccacttttcaaactaacaaacgcacacggtgtctctccccaaaacacatgaggtctcgccaccaccgccacttcattcaccgccggattcgtatacaaaaccgtttcaacctcaacactactcacattttcacctcccgttataattatatctttcgatctatctttaatctctagataaccatcggaatgaatcacaccaacatctccggtgtaaaaccacccgttctttaaagctttctctgttccgaccggatcttttaagtaaccgagcatgatcgagcttcctctcatcactatttctccgacggtttc

SEQ ID NO: 133815 - DNA, 699 bp, Arabidopsis thaliana
gactatctatcacgtcgcatgcacgcgtacgtaagcttggatcctctagagcggccgcccttcgtttttttttttttttttttttggctgagtccgacttattattaatcatgacagtcatgtccacttgcaaatacactcaaatcaaaggtacatacagctcaagtcggttccgaacaaagaaataaacacattgcacaataaggctggtttcttcttttttttaaaaaaatatggaaggcactaaatgaagatgaatccaaagatgaagcatctaggcataagtgaagaagaagatgaagaagaccgaggtgtgtctaagcaaatggattgcctccagtaaatgcaacagggccttgtgctgctgaattcgttgatgcttgccctgccatgtatgctaagccaccttgtgcgactgctggagcaggtaagtacgagggtacagaatctgcagcgagccacggttgtgatacaccattaaggaaggcttgtggtgtctggatatcgggcagtgccccttgtaacgaactcatgtccaagaacatgtcatttgagtcgaactcagaatcataggggagatcaaatggattagctgacttttgttcatttacatgctgccaagcttcttccgagtatgatggtgccatgccaatatttcctggaaaaccaaaagcagaaaagccagcagggattctggtg

SEQ ID NO: 133816 - DNA, 525 bp, Arabidopsis thaliana
  unsure (1)..(525): unsure at all n locations
aannnnnnnnnnnnnnnnnnnnnnnnnnnnnnnnnnnnnnnnnnnnnnnnnnnnnnnnnnnnnnnnnnnnnnnnnnctttctttttttttttttttattgaaattcacatgacattcatatattatagtacatagaggatctgtattcgtatacaagacaggatttggattattaattaaagagacatgaacacacacacacaaaagcttaatcaaagacaagtataggagatgaagattgaaatgtttcaaagagaagaagtgaagctataagaagaataagacaaggtaccaagttgccaacttgtatggatttgctctgcctttgcatctccacctgctgcacccatcacaacatgtaacggatacaaatgctcgggccacggatgcgccattttcgcattcggagctttctcttcccactcattcacatctccataccttccttgaagtagagaatctctaagccaatgatcaaactccaaggcccaaggaacgggtgagccatcagtgatattaaagtca

SEQ ID NO: 133817 - DNA, 609 bp, Arabidopsis thaliana
  unsure (1)..(609): unsure at all n locations
nnnnnnnnnnnnnnnnnnnnnnnnnnnnnnnnnnnnnnnnnnnnnnnnnnnnnnnnnnnnnnnnnnnnnnnnnnnnnnnnnnnnnnnnnnnnnnnnnnnnnnnnnnnnnnnnactaaacataacctatttttcttaattatagggtaaaacatgaaacgtggcagtaacaacacatgttagggatgcgtaaagaagagagattccaaaccataaagaaggaatcaatttatttattccgacgggaacaaaataagataagcccatgttgaaacttgtggcgtaagagtagttgcacaaaaataatttgtttaaacggtgaggcaaatttttttgtttggtctctcgtcatggtcaccacttagtttctttttatgtcttcaatagccagaaaatcatacaacccttgacgacataaagcctcatggcctttgtcatggacatgccaaaaccatttaacacgacaaagaataggcttcatgatttgagtttttatcattaccttgaagacgtttgtatcgtttagttcgaatcttcgaatggagggcaagccccactcttccggtttaaaatcgactaggagaggttatgatttgatctgcaacatcttg

SEQ ID NO: 133818 - DNA, 1036 bp, Arabidopsis thaliana
  unsure (1)..(1036): unsure at all n locations
nnnnnnnnnnnnnnnnnnnnnnnnnnnnnnnnnnnnnnnnnnnnnnnnnnnnnnnnnnnnnnnnnnnnnnnnnnnnnnnncttttttttttttttttcgtgaagatttatatcgcttatttagtagtgaattccaaaacatattctctaaagtaatgttcaataaaatatagtgtgaacagataaggtacctctccccgtatataggatttttattttacatattacatccaacaaaatccaataagttagatcacaccgtccggtcatgtattttcttctttctcttgctgctgtgtagttaaaaagtctcacctcaatacaagtctttccaacgtaatgtatcaccagttccacggtctggtttgtgatttagctgcaagatgtagcgccattgaaccactgctactgcttggaccgttgcagataccaagcctgatgatgaacgaagctgtgcagcctttctctaggccttcactttctatccacatgtatcctcccattagcccgacaaaccgtttacagagagctagcccgagtcctccaccggaatggttcctctgagttccggtccgaggctgtacaaatttggtaaagagcaaaggaatgtcttgtgtgtgaattccacaccctgtgtccttcacctgcacacataggtagaagtgactgtcactgagaactggaaaaaattctggagatggtaattcttgtaaggactcgggtttcatgatagaggctattatggagatgtagccttccttagtaaatttcacagcgttgcccatgatgttaagaattgtttgcatcagacgtttctcatcaccaatagcataagttggtaagtctgcagacagaatcagattcgttgatagtttcttcactgatgcgattggctttatcaaagagatgacctcttcaaagatcgcttgtagactgaatggttcattttccaagagtaagctcccatcttccaatctcgaaagatccagaacgtcggacgcgtgggtcgacccggaaattccggaccggtaccgcag

SEQ ID NO: 133819 - DNA, 622 bp, Arabidopsis thaliana
tgcttgatgatgaacgaagctgtgcagcctttctgtaggccttcactttctatccacatgtatcctcccattagcccgtcgaaccgtttacagagagctagcccgagtcctcctccggaatggttcctgtgagttccggtccgagcctgtacacatttggtaaagagcaaagcaatgtcttgtgtgtgaattccacaccctgtgtccttcacctgcacacataggtagaagtggctgtcactgagagctggaacagattctggagatggtaattcttgtaaggactcgggtttcatcatagcggctattatggagatgtagccttccttagtaaatttctcagcgttgcccatgatgtttagaattgtctgcatcaaacgtttctcatcaccaatagcatgagttggtaagtctgcagacagaatcagattcgttgatagtttcttcactgatgcgattggcttcatcaaagagatcccctcctcatagctcgcttgtagactgaatggttcatttaaacaagagttaagactccccatcttgcccgtctcgctaagatcgcatacccatcgtgacgcgtgggtcgcacccggaaagttccggcgcagctaggtgtacatgc

SEQ ID NO: 133820 - DNA, 598 bp, Arabidopsis thaliana
atgttgacagcgggcgagccttcctgtaggccttcacttcccatccccatgtatcctcccattagcccgtcgtcccgcctcacagagagctagcccgagtcctcctccggaatggttcctgtgagttccggtccgagcctgtacgaatttggtatagagcaaagcaatgtcttgtgtgtgaattccacaccctgtgtccttcacctgcgcacataggtagaagtggctgtcactgagagctggaacagattctggggatggtaattcgtgtaaggacccgggtttcatcataccggctagtatggagatgtagccttccttagtaaatttctcagcgttgcccatgatgtttaaaattctctgcatcagacgtttctcatcaccactggcataagctggttagtctgcagacagaatcagattcgttgatagtttcttcactgatgcgactggcttcatcaaagagatcccctcctcatagctcgcttgtagactgaatggttctttattccaagagtaagcatcccatctggccgtccgcctaagagcctcccctccgtacgcgtgggtcgacccggaaattccggaacggtactgc

SEQ ID NO: 133821 - DNA, 659 bp, Arabidopsis thaliana
  unsure (1)..(659): unsure at all n locations
aatgnnnnnnnnnnnnnnnnnnnnnnnnnnnnnnnnnnnnnnnnnnnnnnnnnnnnnnnnnnnnnnnnnnnnntgccttcttttttttttttttttttggttaattatctgattttataagcaaataacaaatgtaaattcgataacaatggttgcgtcttctgtctctatgcgaatttcagaatcaatcaattacaaaaagcaagctaaagaacgcaaacacatggttcagctcctgtggggtattacaacaacttttcttcaaaccttcgaaacatggaaaccaaaatcgatttttcaacacacaatctttggatgagtctctatggagatgctgaagatagaactgctcctgtgtttgatgactcttcttggctctaaagaaaaaggcaaaagtggcattgggtaaaagactagaaaatcccagaggaaatgcttgaagttgcgtttatcttcagtgactgctctggaatgtatctacgacctttctcctttgcatggatctgaagagtatccagagtgattatgccatcagtcaaagggagtagctctagcttgattgtcgccgtagatttcgaaggagcgcatcctaagggctctcgactttgtagccagagatgtgtgcaacctaagccgctctttggaacaacatctgaagg

SEQ ID NO: 133822 - DNA, 519 bp, Arabidopsis thaliana
  unsure (1)..(519): unsure at all n locations
nnnnnnnnnnnnnnnnnnnnnnnnnnnnnnnnnnnnnnnnnnnnnnnnnnnnnnnnnnnnnnnnnnnnnnnnnnnnnnnnnnnnnnnnnnnnnnnnnnnnngagccacaattattagttttcgttatccttcatcctcttacattcggtgactaaaacatatgattcatcatgcctcggttggatttgttattcaacttattattatagacatatattactttattcacttgatactttatcgacactggggtttcatcctctctacgggcaaaggagtgtgcttagtagcgttttgagatacgcggtaccgtagtactagtgtctctaccgtcatggtacagccgcagaatcacagccgcggtttcttcaatcgccttattcgtcacatctatcactgcccatccggggtttcgctcatagatccttgacgcgaaatctagttctttccgaacaagatcaatccccgaggaattgttctctgcctctgtatctacgcctagcgttttaacccttgttc

SEQ ID NO: 133823 - DNA, 645 bp, Arabidopsis thaliana
  unsure (1)..(645): unsure at all n locations
atgnnnnnnnnnnnnnnnnnnnnnnnnnnnnnnnnnnnnnnnnnnnnnnnnnnnnnnnnnnnnnnnnnnnnnnnnnncttttttttttttttttttagcaaatcccgtagtcttgaatctcgattgttcacatttggtaagaaacgttcttacattaatctatcatatttccttctcaacactagcgagaaaaacaatttttttttttttttttttttggtttgattgggcaaaaaaagggggaaaggagaaaagggtcaacaaatatctccctcctgaccccaaaacacttggaaagagtaaagagaaacctataaaatatcgaatctgtttcactttgaagccttgtgagctggtggtttggattggttcgaagtagctgcagttgacataacacgtaaccgaccagctatctccgtgaaggatggccttgctgttgggttaggcgcccaacactcctccattaatattcgccagtccgagtcacagtagctcggtatggtcggcctcagtgtgttgttcaacctatcccacctcattataagcaccggaggtgcatattaagcatatgggttcctcgccggttagaatctcccacaagactataccaaaagagaagacatcgaccttctctgaaactttgct

SEQ ID NO: 133824 - DNA, 663 bp, Arabidopsis thaliana
gcccgccctcgagtcgacagtatcgataagctagatatcgaattcgcggccgccgcttttacgcgagaaagggggaccaccctctaagcctaagtattcctcaatgaccgatagcgtacaagtaccgtgagggaaaggtgaaaagaaccctatgacgggagtgcaatagagaacctgagatccgatgcgaacaatcagtcgaaggagtagtcaagcgcactcactctaacggcgtaccttttgcatgatgggtcagcgaggaaatgggaagagcggcttaagccattaggtgtaggcgctttccaaaggtggaatcttctagttcttcctatttgacccgaaaccgatcgatctagccatgagcaggttgaagagagctctaaccaggccttggaggaccgaacccacgtatgggccaaaatacggggatgacttgtggctaggggtgaaaggccaaccaagatcggatatagctgggtttccgcgaaatctatttcagttcagagcggatgatgtcgatggcccgaggtagagcactcaatgggctaaggtggccccatttcgccttaccaaccccagggaaactccgaatacaggccgttctcgtttgtacagacagacttttggggtgctaagatccaaagtcgagagggaaacagcccc

SEQ ID NO: 133825 - DNA, 856 bp, Arabidopsis thaliana
  unsure (1)..(856): unsure at all n locations
agctcnnnnnnnnnnnnnnnnnnnnnnnnnnnnnnnnnnnnnnnnnnnnnnnnnnnnnnnnnnnnnnnnnnnccacgcgtccgggatgcccgggcattgagaaggaaggacgctttcagaggcgaaaggccatggggagataccgtctgtgatccatggatctcccctcgcgtccccgtatccaagctccgtggctagtctgcgctctttggactttgaaaacttagcgaactgaaacatctaagtagctaaaggaagggaaatcaaccgagaccccgttagtagcggcgagcgagagcggatttgggattttaagaaaaagaaagacgaagcttcgttccaaagtgttcacttctttttcgccaggtttcattcgatttattgtggattggatgatggaaaaaccagcaagcccctcttctttaagccgagttactttcgaccttgactgaagattcctaaagggcgctgtgaactgtaattgtgaaaaggttggaagatctggccaaagaaggtgatagccctgtagattcgttcctatggttcgatccttcccagtaaaacgcggcgtgttcgaattctgatcgcttttacgcgagaaagggggaccaccctctaagcctaagtattcctccatgaccgatggcgtacaagtaccgtgagggaaacgtgaaaagaaccctatgacgggagtgcaatacagaacctgagatccgatgcgaacaatcagtcgaaggagtagtcaagcgcactcactcttacggcgtaccttttgcatgatgggtcngcgngganntgggnngngcggctttngccatttggtgtgggctttccanggnggatcttntngtcntcc

SEQ ID NO: 133826 - DNA, 812 bp, Arabidopsis thaliana
  unsure (1)..(812): unsure at all n locations
atgnnnnnnnnnnnnnnnnnnnnntagacaactatgacttcgcatgcacgcgtacgtaagcttggatcctctagagcggccgcttttttttttttttttgaaaaagcaggaatgaataatacaatttgccaatgccaactgtctcacaacaagaacaagatgtctctgatttaccacaacaaacacaggatggattcagatcttattgattgtacaaatttgcgaaaggaagacttgaatgggctgtgttgagaccctcataactcatctcgtgaaccacttttgctttcatatgatgcataagctttgatgattgaaacatacacctcaatgcctttcaagtactcagctttacccaaatactcattgtggtcatgaagcagactcggggtgtttgatatgggagagaacccaaaggcaggcacgccagccttgcgaaagtagcgagcatccgttgatgcagggaaaatctcaggcttactggtcctacctccggcttccttaacagcattttccaagagcccccaccaaggatttgaatcatctgctgctgtaaggaattgcttccccgtaagcttctgcttgaactcaaaggacatgtttcgtgctgctggagcccattcctccactaaacgtctttcgagtgcttcagcatcaacgctgggtggaacacgaatgtcgaaaccagcttttgcctcagatggttgcagattcattacgaaaccagttggagaaggtgggccagccttgaggaaggccatgttcacagagacaacatcgccttcagctattccaccaggttggagaagata

SEQ ID NO: 133827 - DNA, 737 bp, Arabidopsis thaliana
  unsure (1)..(737): unsure at all n locations
aanatgnnnnnnnnnnnnnnnnnnnnnnnnnnnnnnnnnnnnnnnnnnnnnnnnnnnnnnnnnnnnnnnnnnnnnnnnnctcttttttttttttttttggtagaaacttcttttattagattccaagcagcaaatgtttatccaaacaaacaaacaaccagaagaagaagaagcattgaacgtatcacttaaaacactgatttattctctttccctcttcttatttcaacggcctatgtggaaagtttttgattgagaatccaaatcacacattacatcaaatcagaactcattatgagtcactaacgagttcagacatgtcgcggctgatgctgttctcatgtgtggacaatggagttccagatataaaagccttgaagagcgcaagagcttgcttcggtctgtgcaaaggaacttcatggcctgcacctctcactgtcacaaagttcagaccagcatactgctgactccaccctcccacctgtccatctaagtaccaaggaccataggcactcaaaggacgaaggtttagtgcatcgatactgtaccgggttgatgtgactggtacaacggcatctgcgtccccactgaaaacccagatacgaagcccagcagctataagctcgtggtaaatgtttagaaccgaggaaggagagtcattccagtgttcactcacgacatcactgcaagtatcccattttgatggtgcaagtcctggtgggacatggagggctttt

SEQ ID NO: 133828 - DNA, 558 bp, Arabidopsis thaliana
  unsure (1)..(558): unsure at all n locations
atgnnnnnnnnnnnnnnnnnnnnnnnnnnnnnnnnnnnnnnnnnnnnnnnnnnnnnnnnnnnnnnnnnnnnnnnnntcctttttttttttttttaaataaataaattgttataactttgtagattttttcgtcggttcttttacattaatagagattaattagaactagtccaaaaaaaataaaaaactatgagaagagaagaaaaagaatgattgataatttgtttacagcttctttctaaagatatctgatgatttcaactgcaaatttacctttcttcgtttcattgatctctccaatcttgagtctccctttcccgctaacggagacaacatcaccagtcttcactatggttccgttctttgtaacggttgcccagttaacccgaacatccttgctactaatcaaatcaactagctttgaccgcgaaatcttgaaaccagcactagctactgcatcaattctcaacgaggcctccacggttttaaaggaattagtcctaggcggttcgtattcaagagcaagcaaaggtatcttactacaagttacaccaacat

SEQ ID NO: 133829 - DNA, 523 bp, Arabidopsis thaliana
  unsure (1)..(523): unsure at all n locations
atgnnnnnnnnnnnnnnnnnnnnnnnnnnnnnnnnnnnnnnnnnnnnnnnnnnnnnnnnnnnnnnnnnnnnnnnnnnnncttttttttttttttttttaacagagaaacaaaacctttgtcttgtatcatcaaaaatttctcttcaaacatgtggggaaaggtacaacaagttacaacacaaactagttttgttcgtctctaaagttctttgtttcagcagagaatcaaacaatcatccaagtcaagtgtctgtatccagcccattttgcagcaagtcggacgccaatggctaatgctgcagccaacaacggcattggtggtgccctccttaagatctgactctcttcttctgaggaggtcttcgttgaattgtgatacatggctagagccagataccctgtgatagccaccactctcacccatggctcccctactcctgccagaacagctgcagaaggaagagccgaggtcacatcgtctctcttctttatcaaccgcgagtacccatacaaacctaacaag

SEQ ID NO: 133830 - DNA, 519 bp, Arabidopsis thaliana
  unsure (1)..(519): unsure at all n locations
nnnnnnaatgnnnnnnnnnnnnnnnnnnnnnnnnnnnnnnnnnnnnnnnnnnnnnnnnnnnnnnnnnnnnnnnnnnnnnnnnnnncttttgtttttttttttttattgaaattaatacacttcttatttatttaaaaatttttgctttgatttattgcctcttttttcaacctctcatcagacatcatactgattataataatgtaagaaaaaaacagttttttttttaagaaagatgtgtctaagaagaagaagaatcatgggtcttaaagctgaaacaacaagccgatacttgtaaaaccccattgggtgtttgtgaacataagtctgagccatcactctctatcatttcccctatcttcttcactctctcctttggaagtagtgagaaaagaggagagaaggaagagttgtcaaagtgtactctctgcaattctccagaaacagaaagtgccacagcagcagcaacttcagaggggctaacctccaaaaaggcattacctttggttgcgctggcta

SEQ ID NO: 133831 - DNA, 515 bp, Arabidopsis thaliana
  unsure (1)..(515): unsure at all n locations
annnnnnnnnnnnnnnnnnnnnnnnnnnnnnnnnnnnnnnnnnnnnnnnnnnnnnnnnnnnnnnnnnnnnnnnnnnnnnctttttttttttttttttaaaaagtcaatatacatgattataaatgtatttaaaataatatatctatgtttactcttttcttttacaatgataaagcatacaacaaagtaaggttatctcaaagttgcacaaataaatctgaggaaagtggtatacattatacaaagggtgatgaactttaaatccaatactagaagagccaatgcttcctgcgcggttttcttgttggaacatctggaagagcaagaactccattagcgtataaagaattgtaatgcacttcgctccagaagctgagccaagcctctctaagagggttcttgttatgaggaagaatctcgatgtaggattgatcccgaaaggatgtgactaagcagatcttggcttcgaatctatccgctgcagcttgaagagtaacatgatctccccattcacc

SEQ ID NO: 133832 - DNA, 526 bp, Arabidopsis thaliana
taggtgcaacttagaagatctatgacgtcgcacgcacgcgtacgtaagcttggatcctctagagcggtcgccttttttttttttttttattgtgatatagttttcattaaagcctttgaaagagactgccttattttgttcacaaacacgagcggatagtttttgatgttcaaagttacaaatgttggtaatcataatggtttttaaaatagagggtattcttcggacatgattaagaggagaagtgcacaccaaccggtgaagacacgtgcaccttctccagttccttttgtttgatcgtagtgttcccagataattccagtctggtcatagtttctaaccacgttccttattagattgctccttaggtcctacgtaaatcgtgcgtgctttgctgttggacggtccatccactgtagagtaagggcgcagggaagaaagaatcatgtagttcatgttcatccatatagcacctctccagtatggggcttgatgctcactgttatacttcatgtacaaagaacta

SEQ ID NO: 133833 - DNA, 950 bp, Arabidopsis thaliana
  unsure (1)..(950): unsure at all n locations
nnnnnnnnnnnnnnnnnnnnnnnnnnnnnnnnnnnnnnnnnnnnnnnnnnnnnnnnnnnnnnnnnnnnnnnnnnctttttttttttttttgataagaaactcttttaacctttatagctggtcgtaacattgtcatctaaagccatgatccaaaggattcaccacttccctactaacatcatttacaacaaccctttcattctagaagaaacgagaggtatataaaccaaatggcaaagaaatagaaagctaccagcgtgtatgaacatatccaacggttttgctatagacaaacccaccaatccaaccgcattattactcccaacaccaatccaaccgatatgtgacaaactgaccagtcaagctgaattaccagattccaacgcctgtaagataactgactggttgaacttgaagtttatgaaactgccaccaggttttatgtcctgagaatggtcgactacaggctttgtattgtggctttctactgttgctgttgtattgtggctttccattgttcctttcctgagttcaggctttgtactgtggctttccattgttgttctcttgagttcaggctttctactgttgctttccattgttgttgtcctgagttcagactttctattttggctttccactgttgctgtcccgttccctccaacactagtccttgcattccacacgcagagtgctttaaggggcttgttaggtctccgtgctacaggtgaaggatgctttaatatccacgacttcaatgacgaaaggaaaggtgcccccatgtacaatttgagaccagaaactccatgagtaacgcttcgttccttgctggctgaagatgatcaaggggatcccatgtcatttcactgatttccttcttctctccggaggcagaagctgtatagtaaccaaacacagccacaatcaatggcggtagtctttgctgcctg

SEQ ID NO: 133834 - DNA, 813 bp, Arabidopsis thaliana
taggtgcactatagaagagttatgacgtcgcctgcacgcgtacgtaagcttggatcctctagagcggtcgccctttttttttttttttttgaaaaaataatgtctctgtactaaggaaaaaaagtaacaatattcggcagattcttaaatatcataagtttaggggcgtttccgaagtttatattataattaaattttctgtttaaaataacggggaacccacatggtagctaatgaccggcgaaacaagtagttagctaagttttgctctgaacaccaaacaattgccacctaactcctcaacacagcttggttcagtttaccgcctaaaccggtttggtttcaattcatggctcatctcaaatcaagttctccaaaaccagtgtaccaaaactcaaaaagcaagagattgttctgcaaagccaataaggaccaccaaaaaagaaaaaaccagaaatgaactatacacaaatgtggaactactagaactaggtcctggtttaaagctactacggtttctggttatctaatcagttcagtggtttgttcggtttgcccggtccccaaatacggatggtttggtcatcactagcagaggctagcatccgaggatttttcgggttccagcttacacagtttacggtcatcgaatgacctgataacacttcaagcggctttgggttctttagattccatatgtaaacctgtgaatcctcacttccactggcgatgaacgaactatccaacccaccaaaacatgaccgtatcacgtatttgctctgcctgtgacccgagaacttcaatggttgtttc

SEQ ID NO: 133835 - DNA, 565 bp, Arabidopsis thaliana
  unsure (1)..(565): unsure at all n locations
taggtgcactatagaagagttatgacgtcgcctgcacgcgtacgtaagcttggatcctctagagcggtcgccctttgtttttttcttgttttttttgggtggagatctaacacataaccttttagattaccaattcacaacacaacacaacccacgtgtataaaaaccagagcattgtgcacattgcactccaaagaaaacccacacaaaacaaaaaccccaaaaaaaactaatccttcttcttgtctttcaacggtcctcttgggattttgctgaatacctttgcgtccaacacagcgtattgcttcttcaactcagccattgctttctcaccgcatgagtctactttgtcttcgcacttgtcgtagaaaagaggaacagtgaagagcagaaccagagctatgtatgccaatgtcaagaaactatagcagccgcccaagatcgatagaacccacattccggcaatagcagagaggaacttcttgatatccctccccgacgcaatctcacgaagagaagagatcncacggttgatttcgattctaagacccgaagcaagctgaag

SEQ ID NO: 133836 - DNA, 507 bp, Arabidopsis thaliana
tgacactactagaagatctatgacgtcgcatgcacgcgtacgtaagcttggatcctctagagcggtcgcccttttttttttttttttagataagatcgattttacgacaacaccatcataactctttaatcctactttactccaatcggtcaactaaccacgcaattggcttgcccttgtagaagttgatgacttccttggacttggcagcgatctgatcgggatcgaatccaaagcgagtgtaaagctgcttgaaaggagccgaggcccccaaagacctcatgccgatctggtagtgtgaatagcgctcccagccatggatacccgcagcctcgattgatacaacgagtgcccctgcagggaagacctgcttcttgtactcagctgactgttcatcgaagaggtcgtagcaaggcatacacacaactcgcacgtttacaccggcctttttcaggagctccccaggggcgacggaaagaaaaacttctgaccccggagaaaccggga

SEQ ID NO: 133837 - DNA, 504 bp, Arabidopsis thaliana
  unsure (1)..(504): unsure at all n locations
aatgnnnnnnnnnnnnnnnnnnnnnnnnnnnnnnnnnnnnnnnnnnnnnnnnnnnnnnnnnnnnnnnnnnnnnnnnnnncttttttttttttttttcttttaacctttttactaaactgattcttaatatttgtccctcattttcttcagcctattttaattaatatggtcatcaatacattactttatcgccacggcattgatttacaatagcattagataaatgaaaccaaaaaaaaaaaaactctggagtgacacatctttactacgatggttctttacttggcgcaggcttaactcgaaaagaagtctttacttggcgcaggctacaccttcacaatcctgactagtctcaccggtcttgagatgattcattactcggagcaggcttgacgaaagagaactctttagaatcagtttcagtgtcacggctagtctcaccggtattggtcttatttggttcaactttcacaacaagctcgaagcttggaggagatttgggag

SEQ ID NO: 133838 - DNA, 530 bp, Arabidopsis thaliana
taggtgcactatagaagatttatgacgtcgcacgcacgcgtacgtaagcttggatcctctagagcggtcgcccttttttttttttttttttaagatagaaaatcttaactatgatatttaacatcatccaagaagtttactacacattcatgtaattacattctccaaagattcaacatcatcaaataagttcagtaacacatcagaccataacgataaggtcaatatcgcatggacatcgatacttccttcttcgatccctcgaaaaactacaagcttgccaccaatgccattagccggtccagctcgaacagccatcggtttacctaaaccgaaatcattatcgtacacttggaaccaaggagagttactgcccataaaaccatgatcacccattctacttctaacatcaattcttgggatcttaccatttctaacccaattctcagaaaaagttctaaagttttcattcgggggcaccctcacagttttatttatttgcaaagcagcccatcccagtccacgatcga

SEQ ID NO: 133839 - DNA, 510 bp, Arabidopsis thaliana
  unsure (1)..(510): unsure at all n locations
taggtgcaactatagnaaaatttatgacgtcgcacgcacgcgtacgtaagcttggatcctctagagcggtcgccctttttttttttttttttttttactgcagtcaaaaaaataaattaatttacttttcaaaagcaaaattaaataaattatgaaacaaatattatatatgcagctcgctatttacaatcacctatgaccagattttatgtacttcaataactcatatgtcgtttcccgggagggtctgagctagagctctgaccagcacttatagtggcattactccgagttgaagctttaaaagatgcgggggtacctctaacaccagttcccgtgtttgtgttcaggtttgaaccgaaagaatctgtgctggaaccagtgggcgacaatgttccaagggatgctgctcctgaaggacgttgggttcgccgacggtatctaaatcccgggacaccaggatgagccggttatttagatggcctggttttctaaagagaagtagagatc

SEQ ID NO: 133840 - DNA, 831 bp, Arabidopsis thaliana
  unsure (1)..(831): unsure at all n locations
nnnnnnnnnnnnnnnnnnnnnnnnnnnnnnnnnnnnnnnnnnnnnnnnnnnnnnnnnnnnnnnnnnnnnnnnctttttttttttttttttttggcaacactctgtgtcaaagcttgcataacattatggcccaacatagacgatcatgtgcaaaatttgaatacaaagaccacaatacttcacacacaaatccaaccttaattgattcggatttttttttttaatacaaacaaagagagacaatacaaacatctaaggattggatctgaaaggatttcgctggtttgatcttggatctacccttggcgacgatgcattgtatccatgcagcatttctctgatctttgagtacatcactgcttgtgacgcttcaccaccattcccaccactttcctgctcttttatcttttcaaacagatactctttctctgcctccgcctcgctcagcctcagtttcaaatagttacttgcgtattcctcttctgttttctcctttttcgctttcacaatcctttccaatctctctgcttccacttttgcctcgtttgcttttaactgaaacatctctgcctctgcttgcttcagcctcactatcctctccacctctcttatctagagatggttcttttgcataatcatctgaagactcgccactggctttgctttctcttctacctatctctcgcattccttaagcccgattcgcgctttgttggacatcctggatttttccttcaccactatataaatttttgcttagtgtttttcttttacgactggagccaattggggatggattgcatcctacgaggtggcttattttaacccccc

SEQ ID NO: 133841 - DNA, 611 bp, Arabidopsis thaliana
taattgtttttctttttcatgtgcaaaatttgaatacaaagaccacaatacttcacacacaaatccaaccttaattgattcggattttttttttaatacaaacaaagagagacaatacaaacatctaaggattggatctgaaaggatttcgctggtttgatcttggatctacccttggcgacgatgcattgtatccatgcagcatttctctgatctttgagtacatcactgcttgtgacgcttcaccaccattcccaccactttcctgctcttttatcttttcaaacagatactctttctctgcctccgcctcgctcagcctcagtttcaaatagttacttgcgtattcctcttctgttttctcctttttcgctttcacaatcctttccaatctctctgcttccacttttgcctcgtttgcttttaactgaaacatctctgcctctgcttgcttcagcctcactatcctctccacctcttctatctgttgtttcttcttctgcctctccatctgcagttccgccacttgctttgctttctcttctacctctctctcgcattcccggacgcgtgggtcgacccgggaattccggaccggtacctgcaggcgt

SEQ ID NO: 133842 - DNA, 522 bp, Arabidopsis thaliana
ttaggaccactatagaagattatgacgtcgcctgcacgcgtacgtaagcttggatcctctagagcggccgcccttttttttttttttttaataggggagttcttacttattattccagatacaaaatcgaacaaaactcactcctatctctgaaagcgaaagaaagtttccataaaccacacaaataatgaaaattctaagacgtgaatctatgaacaaaaaatgttcttccactctttcactgatcaagacttaggtctccccattggaccttgtgttttgcggctagataatgggcaccgactggaccacgactgccgtaaggatagaattctggggttgtcttcttttcttctatctctttgagcaatggagggaaaagcgcccaagcagcgtcaagttcatcgcttcttatgaacattctgcgttcaccttcgatcgcatctaacaaaagcctctcatatgcctctgggatctcttttaataccttggtgaatagagaaaattaaaggtactctgatc

SEQ ID NO: 133843 - DNA, 477 bp, Arabidopsis thaliana
ggtgcactatagaagatctatgacgtcgcacgcacgcgtacgtaagcttggatcctctagagcggtcgccctttttttttttttttttttttaggaagtaagatgtctttagagaggacttttggagttttggttaaggattcataaagaaaaactcaaatgagttcgtgtgtaaaatacattgcttgttctatgtaatcccaagtttccttttgatagtataccacaagagcatcacatcacattacaaagccaaatagagaagagagcttttgtatatccttcactagtctcctttcaagacaatcataattgtttcttcctcttttccaagtatgaatgatttctttggaagttcaatatagcccagagcagatgcctcaaaccaatctcaggccacagagcagccggagagcagagctgggtattacctgtttgccataagaaaaattgctcacccttgtttctccctgactc

SEQ ID NO: 133844 - DNA, 725 bp, Arabidopsis thaliana
  unsure (1)..(725): unsure at all n locations
atgtnnnnnnnnnnnnnnnnnnnnnnnnnnnnnnnnnnnnnnnnnnnnnnnnnnnnnnnnnnnnnnnnnnnnnnnnnnctttttttttttttttttttgagaaacccatcatattatttgtcattctgaaacagttacacaagagttgaaattcagagaacaagcttcatgaacaatttacacgaaagaaaagagaggcaaactcaacaatttactgaaatatttgatatcaagagtgttatgtttataaacgagatatagtctttcaagtctcaaaagaaattttagagactacctgagctcctcttcctttagccatatatagacctccatggggcctcaacccctgggggtgggcctgggcgcctttgatgtctttcgcaaccttgaagaggaaggtcaaaagtagcacagccacgggggtacactaccacatcttctacaggagaaagaacaccgtggtttcgggcagaaagtgcacgtagccacaaaatcaaacacacatatgtctgtacagatacctacaacgacaataactttgatctgtttttccttaacccaatccacaaaaacattagaaccatcactctccatcgaacccacaaacccattaatacaatcctttcgtctaagngtggcacaatcctcactttcaagcnatttcagagcaggaacaagttctattcttcagttcctataatacaatgaggaggataaggtctctc

SEQ ID NO: 133845 - DNA, 511 bp, Arabidopsis thaliana
  unsure (1)..(511): unsure at all n locations
nnnnnnnnnnnnnnnnnnnnnnnnnnnnnnnnnnnnnnnnnnnnnnnnnnnnnnnnnnnnnnnnnnnnnnnnnnctttttttttttttttttcactgtcgaatatctctttagtcaaaagacaagagttcatacatgtttagtctgtgggacctatagatcaaaagaaacaaacccctcttttggtttctgcaataatgggttttttagtacaataaagtttcaggaaatggatttcaaggctaataaaggaaatgactccttcaattcaatgcccataaaaagaggcacaagaagggcaaaacacctcatacaaccagaagaagagggtctatagttttgcattgctcttgagtgttttcccatcattgcgctcaaaagattcataccccttttacttgggaagatgttctttaatctttcccaacaagaaaaatcttaaaggctatatatcttacttcactgggggaactccattcttctttgcttaaaggttcgagccctttttcagg

SEQ ID NO: 133846 - DNA, 617 bp, Arabidopsis thaliana
  unsure (1)..(617): unsure at all n locations
tatagaagagttatgacgtcgcctgcacgcgtacgtaagcttggatcctctagagcggtcgccctttttttttttttttttttttaaaaagaacgcatttacattcttcttataacgttgtcggcgaaacgtttttaaccttacttttataagctttattaggcttcttcaagccttataaaagaaaagaaaaaaaaggcaagttagagagagcgagagatttagcagcgggtaaaggaaagagagacagtgacaattgagaagtaaacgggcactaaggatctgtagaccttttgatggtaagctctgctctgagatggagaatgccattgatgaagtattgactatcttccgctataaaagacgtccatgggaccccaaacaggtttctgtaacctactgctttccctcctggtgaaggtgtagctccccttggattggcttatgaaaccctctgcgggctttgaccttgccgagaattcatagtccactccgaaactcancgnacccctttctcctgcatccctaggnncagcccggaaacagtggnacgagctctgttnggccaatggtgcaagtgacctgncagggaaaanccctggcctnccaagtgantc

SEQ ID NO: 133847 - DNA, 653 bp, Arabidopsis thaliana
  unsure (1)..(653): unsure at all n locations
nnnnnnnnnnnnnnnnnnnnnnnnnnnnnnnnnnnnnnnnnnnnnnnnnnnnnnnnnnnnnnnnnnnnnnnnnnnnnnctttttttttttttttttttgatcaaacatttccaatgtaattatctgaaccgaccagtttataggggtctcaagtctcaacaacaatcaactgaatataataactgagaccgtaaaacaaaaatgcaaaggtcaaaaaaagacaagtcacagaagaatacaaaaaaggacatggactcatgcccacaaagaagagtggtgagaataatgtcataagaaaaagcttcaacgaagagcaaaactatttttgagttctgagaatccttttctcctcctccttcaagcttacaacacaacattcatcgcacaagcataagacccagagagagcaaaatcgtcaagtaatgattccttttacagattccgacaagcctctatgtctgcagcctgtgaggccaacaaggacttcccctgctcgcttgactccacaatgcgtacagctgcatcgaccaccatcttttggacctatcgncttccatttncccttnatttttttanccattttgganncncaccaccagccnggttaggttttcctnaatttanccaactgtttgggnctngggagcaatttc

SEQ ID NO: 133848 - DNA, 505 bp, Arabidopsis thaliana
  unsure (1)..(505): unsure at all n locations
nnnnnnnnnnnnnnnnnnnnnnnnnnnnnnnnnnnnnnnnnnnnnnnnnnnnnnnnnnnnnnnnnnnnnnnncttttttttttttttttttaggaaaagtgcttactataaagatttttgggtagtatattacaatggatactacttgtaaagatagaccgatgtcgccatgaacatatctgcatagacgctaacaacacaaaagccattatacatggatacatacatactttttacatacatcaaatattgcagcccgaaatgaatataacgtatttataactcagcaaacatatataggtgacacgaactcaccctctcttggtgaaatccatgtagcttgggagcgatggctgcccgtttgtactcatctggtggttcgttttgttcccaaactgattcattgccgattgctgagatgagaattgagcccggttgtaagaatttccattcccctgaggaatttctccagctaccaccttaaggccggtcagttaatccccga

SEQ ID NO: 133849 - DNA, 548 bp, Arabidopsis thaliana
aggtgacactactagaaaatttatgacgtcgcacgcacgcgtacgtaagcttggatcctctagagcggtcgccctttttttttttttttctgctattctgatattattattatggcgaaaacaaaattacagacacaaaagaactgcttaaaaggctaaaaactagaacatcttacataacttatcatatatatggcaatgccttagagactagtatctgaaacagactcaccaacattcctgggcgagaaaccacaggcattcgcaataagcatttgaaaagaactctctgaatcatcaaacatcagtcgcggaaactcgtggaaccctccaaaattacatgtatcaaagttcattggtgagaacgactcctcaaaacatatcctcccatcagtcattccaggctgtgtggtttcttggttagcatttgatgcacaaccaagattgaagccaaccattccttggttgttgttcccgccttcagagctccctctctgagtagatgtactggctgatggttttgtctcttcaagagggattgcaggcgt

SEQ ID NO: 133850 - DNA, 500 bp, Arabidopsis thaliana
aatgtattaggtgcactatagaagatctatgacgtcgcctgcacgcgtacgtaagcttggatcctctagagggccgccctttttttttttttttacgtaaatttgatctgacggatggatctataaaaaaaacagtagtacaacaaaatgtttctcgccactttccctggaaagaaactagtcaggagaccaactaaactcaacccccaaaccgaagtataacctaaccaacagttagacaagcggcgactacaagatatacagggtagatcaatggaagaagtagctgaatttctacagaatcccacgtctccgagtttaggagaagcctcaaaagcctttcttagcagtattcaaacttcctctaagctgaacttccaactggtctattcggatagccaaattatgcttcccgccattcttcaacccatcagcacccatatcaaagccccgtgatatgggaacccaacccatgtttgtaatctcaaccaagtaattag

SEQ ID NO: 133851 - DNA, 512 bp, Arabidopsis thaliana
ttaggtgcaactatcagaagatttatgacgtcgcactgccgcgtacgtaagcttggatcctctagagcggtcgcccttttttttttttttttacacaaacagttgagatattctaatcaagagatcatctcagaagaaatggtaaatcacaaaatacaacagagaatttcagaaattccaaaagaattatgaggatttttacattttgattcagaacatcatttaccacagaggggaaagccggggcgcggggcgtgtagttggaaatttagcgaacaccatactgcagaacactcctacagctacacgcaaagttgtgagaacctccactaattcagctggagggttcgggatagaaacagttaaccacattcgtgaccaaacaaaaccacggctccaaaacccagaaccgacatattggcttgtacgaagtcgattaacccgttttttctcccttttgaagaagttctggaagaaaagtctctcgcccatcaatggtccaaaaaccctgg

SEQ ID NO: 133852 - DNA, 538 bp, Arabidopsis thaliana
  unsure (1)..(538): unsure at all n locations
annnnnnnnnnnnnnnnnnacgtctcatgcacgcgtacgtaagcttggatcctctagagcggccgccctttgngtnnngactcctttttttgtttttttttggatgcaagactaactcaccttttattaagttaattggcggctggaacgaaaacataagagactctatccattaaacatacttctaccttatttaggcatcaaatctgtttatgcgagaatgagatgatggaagctctaagtggatcaacacggtcctaatctccatcgggtaaagctccatctccagctttcttggatcaatttctctccctctctttgccttcttctcctctccataagatccttcaccttctactttccacaccaacctcttcttctccatcgtgcttctttcttgatttgctgataggctcatctccgacaatttcccgatcttctttccaggaaaaagctttttgagttccacgcttgctactcctgatagttccttgccctcttccacctcataaagatgagctagacgcaggagcacgtt

SEQ ID NO: 133853 - DNA, 607 bp, Arabidopsis thaliana
  unsure (1)..(607): unsure at all n locations
tnantttacctggattccnaccagagtcatcaccaaaaaggggncaaaagccaaaggggctnggaaaaaaaccatgattaaggccaaggttnttagnanngattgatnacccttttcncaaacctaacaacnttaaggggcatnacatcacctncttggtgagttaagttgacaaggccctaacaagtttacttgaactctagggccttgggatccccatgtatgctaagccgtggagagactcttactcctaggactaggccttggagaaggaattgggccgtatggtgacggaaaacgtgtagaaccaggcgaaatccgaggagacaaactgacttgttcgaacgcttgtgactgaagttccattggataatctctaacacacccaattcttggaccaactccactgttccatttgcaagacagcctctttgcaagctggaacaccggtctttctctctctttctcttcttcttgttcctctgtaacgatggtttctgctggtttcttctctgcttcttcttcttttgttgcttcttcttcgtagccactggaattgaatgacgaatattcctcattcacagagcatctcttaacattggtcata

SEQ ID NO: 133854 - DNA, 577 bp, Arabidopsis thaliana
  unsure (1)..(577): unsure at all n locations
anttagnnnnnnnnnnnnnnnnnnnnnnnnnnnnnnnnnnnnnnnnnnnnnnnnnnnnnnnnnnnnnnnnnnnnnnnctctttttttttttttatttttaacaaaattttatttaattcaaaaagttgttgtttacagttcacctaataaatttacagccttgggcatttcacctaaaccagaagttacgatgcagccaaaaaaagaggaacaaaaagaccaaaagggacttagaaaaaaaaacatgaattaaagaacaaaggatgatgagaagagattgatgaagccttttctcatacctcactagcttaaagggtcataacattcacttcttggtgagttaagttgacaaggcctaacagtttacttgaactctagggcttgggattcccatgtatgctaagcgtggagagactcttactctaggactaggccttggagaaggaattgggccgtatggtgacggaaaacgtgtagaaccaggcgaaatccgaggagacaaactgacttgttcgaacgcttgtgactgaagttccattggataatccctaaaaccccattnttgggcncccccngg

SEQ ID NO: 133855 - DNA, 439 bp, Arabidopsis thaliana
  unsure (1)..(439): unsure at all n locations
atgaannnnnnnnnnnnnnnnnnnnnnnnnnnnnnnnnnnnnnnnnnnnnnnnnnnnnnnnnnnnnnnnnnnnnnnnncttttttttttttttttttttaggatgagaacaaatcgtagatcacgggatgaatctcagaaggtcgtaagacaagcctacttccaatcttacaatacccggatctaagttaagccgtctacagaagatgtgcgtcaataataatttgaaattgcgatgcaggctcacctaactcacctattccggcaagcagagagaagcccattgtttgaactatggcagaagcctattcgcttgcatttattattgattagacattgctttccagcatggattctgacttaggngcggtcagtcataatcctacagatgggaggcttcacgggactagctggtcagctaaccctatttacccattatc

SEQ ID NO: 133856 - DNA, 587 bp, Arabidopsis thaliana
  unsure (1)..(587): unsure at all n locations
gcaatgcaactgtagattattatagataatgtttcttacaaaatcataatagcctcaatgaaagctagtatcttatatagtttttgaagggggaaaagatgggatcacaagaagtcaacaactaacgaatacatttagatcaaacaagtatgttgcatatgttaaaaagatatacaaaccaagccaaaataaatagatgtggtgacgatggtggaattagccaaaaggttttaggatatagttaagaaccaaaggaaggacgagaaagagggatggtgaaccaatattctgatagtttcctttaagagagggaggactttgtaggacttgtaatgcactcctccaagatcagcatcgcacgtcaagagaacccattcttgatcatcgcctagataccttgggactgaagttacttcccaaaccatcatccatcccaaaccgctttnggntctcncttctgggggccgtgagncganattgtggaacaggnncatctcnggnncgatccccaacanagcctcccttcanccggcctngnttcctggggaatncgntgatnggggagggtaggcccgaagccttgccng

SEQ ID NO: 133857 - DNA, 558 bp, Arabidopsis thaliana
  unsure (1)..(558): unsure at all n locations
nnnnnnnnnnnnnnnnnnnnnnnnnnnnnnnnnnnnnnnnnnnnnnnnnnnnnnnnnnnnnnnnnnnnnnnnnnnnnnnnnnnnnnnnnnnnnnnnnnnnnnnnnnnnnnaaaagcattactttttattgaaggtattgatatacaacaggtgatttgttttaaggctcaaaggcatccaattgcaaaattaatactggaaataattaaataggcatgtaatgccagtcactggtaggctgtttcaagttcttaactctatacatattatttctactaactgcacttaaatcattaccagatgctacttcttttgcagtgaacactggatatgtgctgttaacatttcaaatggggtcaaaaatgagctccttcaaaagttaagggaaataaacttgcaagaaattattctgcttaagggttaaatggcattctcttttcagtaaaatgcacaaatgagctaagaataattggcaaatttctcactaaaacttaagtacattatattttcatttgaaattgggtgctcatcaatttttaataagtagttggcaatatt

SEQ ID NO: 133858 - DNA, 724 bp, Arabidopsis thaliana
  unsure (1)..(724): unsure at all n locations
nnnnnnatttcnnnnnnnnnnnnnnnnnnnnnnnnnnnnnnnnnnnnnnnnnnnnnnnnnnnnnnnnnnnnnnnnnnnnnncttcttttttttttttttttttgcaaaaatacacacttcattttataaacagtttaacgtatctttgaccgtagcatcaattgaaagacctggaaacaagattaaactgttacaaacacttttctctaaccagccactctattcacttttgctccccagaaactgctgtaaactgattgaacttgaccacagtagagaaaagaggcatgcattcttagaaatccactcatcttcctcctatattttctttgtcatacattttatgaagagaatccatattgttaactcttgtgcaaagatctggtagcctttgatgcaaaaaccattgctttggcttcgtcgcttgacatcatccaatccctctcagcacgacgttgacgttgccttgcattctttgcacgtttagggggccattcttgcatctctctctgcaaatgctagtctgaacttctttgctattgacagttcattgcttaacgggaaagatgtgggcttctgcacaactccagtaacaacccaagtcttaggatcaatatctttgacaaatggttcgtccagtgcaacatttggtagtgcttctcgagggaacctcgttttggtttgtaccgccgaccaagtggaaggggctttggggaattttacc

SEQ ID NO: 133859 - DNA, 520 bp, Arabidopsis thaliana
  unsure (1)..(520): unsure at all n locations
aatgnnnnnnnnnnnnnnnnnnnnnnnnnnnnnnnnnnnnnnnnnnnnnnnnnnnnnnnnnnnnnnnnnnnnnnnnnnncttttttttttttttttttcgacataatcccatcaaatttataccataatgcattgatactcttcacttaattttaaagcttttgttgtctctctctctctatgtgtgtattagcatataattcttacaacaaaagacaaatttatgaaaaatttctcaagactcgggtgttatctcaggagtctgcaaaggaatgggactgttatcttcttctttcgcgtttggattctcggcttgtttttcttcaggttgggaggctacaccattctctgatgcatcctttgtgtccgtgctgatgacctttggagatttgttggatggttcttgagaggacgatgcagctaagatgcgacccagaccttcgtatgcactcttggcatccataacgattgtggcaccacctggataacatcggccaaagcatgtggcgcaatgtggaaa

SEQ ID NO: 133860 - DNA, 521 bp, Arabidopsis thaliana
  unsure (1)..(521): unsure at all n locations
atgnnnnnnnnnnnnnnnnnnnnnnnnnnnnnnnnnnnnnnnnnnnnnnnnnnnnnnnnnnnnnnnnnnnnnnnnnncttttttttttttttttaaaaaaaaaacatgatatcacaaatttgggtatgttcattgttttccttggccaacacatcaaagcctttaagctttccaaggtagtcccaataaaagaccattgacagaaacgtactaacatgagctcttccttggtttcttctttgcatgcaacttcacaaaatctaaactactcagttattcactcttgaaacttcacaaaatctacagacactattaaacctctaaattcacagagatgttcttgcctgtctttcccctctcaaggcagtgaaaaccaaagggtcatattccatatcagctatggcgaacaccccatcatcgccctctccaactaatgtttctggttttccaagctcaccctttggctgacaaaatcttttgaccccttcgggggattggttggccaccctctggagaaaaaa

SEQ ID NO: 133861 - DNA, 525 bp, Arabidopsis thaliana
  unsure (1)..(525): unsure at all n locations
atgaannnnnnnnnnnnnnnnnnnnnnnnnnnnnnnnnnagaagaaaacggatataattttcacaagaacttttttccgtttggctctcttttttatcatatacatgtttggaaatttactaaacttgaagagaacttcaattttgctttaccaatattacgagagataaataaaacagacacttacaaaactcacatcttcaaaatatatacagttttattagtgaaggggtctctcttacgccgtggacaaaacctccaactctgcccaccaaagaggtgacaatttcggtgtagcatcgttcggtgacaatcccgtgatctcccgtaaccatcctgtgacttcttgcattggaggtctctctttcgggtcagtcctaaggatggattgatcacttcacctatattctcaatcttggcatcataaaattcccggggtggatctaccattttggctagaaggctctccttttaaaaaacaacccgcgagcctatttactgggtcaaggtttgtaaacggtttta

SEQ ID NO: 133862 - DNA, 655 bp, Arabidopsis thaliana
  unsure (1)..(655): unsure at all n locations
atgnnnnnnnnnnnnnnnnnnnnnnnnnnnnnnnnnnnnnnnnnnnnnnnnnnnnnnnnnnnnnnnnnnnnnnnnnnnctttttttttttttttttttaaccaaaatcttgagcaataataacgttgcgatcaaattgggttcagaaacatgatacataccagaatttagcagagcaccgacttcggccaaaaacaaaaaaagtagagcaccgacaaaagctcagttctcagatcaaactgaaccaggaatcaaaaacgggttactctgaccgagtactcaaaagtggtttggtaaaaattacaggtctcactggtgtaaataaatactagcagagccagaggggagcttaggacaaattacctcaaaaactgggatcaaaaacaggggtctgaaccaagctttttgttacccggagaattcaaccatttgggaccccgcgggcccgcaacagctatttggggatcgggtttcatcaaatggctttagcatctaggggcctctggctcgggcacgctgatgactatatgagcgtgctcgatcagtttaccatctttttcgagaaaccaacatcgaacacgttgatcaagacctgtcgagaacacccagttcgtgtccatccacacgcctttgatggcagagctatgagctgatgc

SEQ ID NO: 133863 - DNA, 737 bp, Arabidopsis thaliana
tacactataaacgagtttgacgtcgcatgcacgcgtgcgtgagcttggatcctatagagcggccgacctattctttcttttttttttacaactatactatctttttttttttttttttcccaataagcaaagagagaccccattaacatcatgaacaagcagaagcatcaaaattaggtaacacaatgaacgacatcgacaatggcaagacattaagcggagagttcacactacggaggaccggttcaaggctcgggatatctcctgttgccgtcggttttaacgatttaccattcaagaccattgttttgctgcgcaacacaccgttttctggtgtcagatgatactcttctctattcaaatatccatcagaagctttgcttccaatccaagaaaatggtctttttaaagtatccaacaatgacttcttcttccttgattccgcattcaaaaccacgtttatgccattgctgacactaaccgtaaaatccgattgattgcttagatttatcagtagcaatgtcacaccggctcttccttttgaacaatgtgcgtaaacccgtagctgaggcggtccatctgtctgcaccgcaagaaccctttttcccattacacgatgcccaagcggagcgctatagtaattaggatttggaacaagcgttcccctttttgagcaaggcgcgtataaaccctccaaaccaaaggtcttgtactgcaagtaaaaactttttaaaagg

SEQ ID NO: 133864 - DNA, 363 bp, Arabidopsis thaliana
gtaattatgttgtattgaaatatgaaatgatacatttatcaccagcattagatacaattaccaaaaaaattacaactattctttatttttatttatttttctcccaataagcaaagagagaccccattaacatcatgaacaagcagaagcatcaaaattaggtaacacaatgaacgacatcgacaatggcaagacattaagcggtgagttcacactacgggggaccggttcaaggctcgggatatctcctgttgccgtcggttttaacgatttaccattcaagaccattgttttgctgcgcaacacaccgttttctggtgtcagatgatactcttctttattcaaatatccatcagaagcttt

SEQ ID NO: 133865 - DNA, 559 bp, Arabidopsis thaliana
  unsure (1)..(559): unsure at all n locations
gaatgatttattgtgannnnnnnnnnnnnnnnnnnnnnnnnnnnnnnnnnnnnnnnnnnnnnnnnnnnnnnnnnnnnnnnncttttttttttttttttacgtaattgtttatgtggctccaatatatcactgagattacgacaatatgcttaaggggtagcatgcataattacatataacctaaagaaatgtagaggatcaatgtttggagtacaataagacgatttagtcttctttttcactcgtgtggcacttcatacatgtactggtttacttttctcattgtttattttttattgaatttgatccctaacttataaggtttatcatccatcttagttttggcaacgttgattcattatatttaggcattctcctttgttccataagacgagtgatggctttatcgaccacttggcttcttcaggagaccaaagttacacggaatttcatctcagacctattagaacagcgtgtctgtagctcttttaactgaaggcaaatgctcctttgctatcaggtcatatgattgagatttccaaccagataatattagaca

SEQ ID NO: 133866 - DNA, 469 bp, Arabidopsis thaliana
  unsure (1)..(469): unsure at all n locations
nnnnnnnnnnnnnnnnnnnnnnnnnnnnnnnnnnnnnnnnnnnnnnnnnnnnnnnnnnnnnnnnnnnnnnctttttttttttttttacaaatgatatacattacaatttgacaaagggggggctattcatgtaattattaggactttccgcatacaattatacaaaccaataaccactccttggtatctatctaaagactcttcacgctctcatttttgcagctgcttctttgatctggtcaatagtgaaaatgcccaagaagtcgtcatctttaacagcgctgatcacagcaagtgctaaatcatcgacgttaaccggtggcgccaagatgagatcagatgcagggagagacctcaatggtctaatgaacctctctgctgaatcatagatcttggctaggggctccccgactagatcaagcgggacctcgattccgttcacttttcgtttcccgaatatgaaaccggg

SEQ ID NO: 133867 - DNA, 578 bp, Arabidopsis thaliana
  unsure (1)..(578): unsure at all n locations
atgnnnnnnnnnnnnnnnnnnnnnnnnnnnnnnnnnnnnnnnnnnnnnnnnnnnnnnnnnnnnnnnnnnnnnnnnnnctttttttttttttttgttcttaaaaaaaatatcacaaatggtaattttgattacttgcacatcacaaagcaactcactgttaggtagacacacctcttagggtgttaaaaaggattgtggccagagcaaagttacctgtagccaaacccaaggtcgagttcatgacccacagagccttgacgattaggaccaccggcttgacccactgccggtatctgtttggctgggtccatcctctgctgaatccccaagagtgtctgcagtgaagctggatgctctcctctgttgacttgagaacctggtgggtgggcataccgtagttgggctggcgatggggcaaagggaaagccttgtgacgggtttaactcaggaatgagacccggcatctggttgtttacatgaggagagtgtggggttgtgtggaccactaccgggggaaacccttgcattagatgatgatgttgcaggttgtcttgcatatgcatcttctgcatcatatg

SEQ ID NO: 133868 - DNA, 584 bp, Arabidopsis thaliana
  unsure (1)..(584): unsure at all n locations
atgnnnnnnnnnnnnnnnnnnnnnnnnnnnnnnnnnnnnnnnnnnnnnnnnnnnnnnnnnnnnnnnnnnnnnnnnnnnctttttttttttttttgcctaaataaataaattaatgaaatttctacagacattcaaacaacatatatttttgcataaatgcaaaatcaaatagcttaatgactcttttgcagaaatcaatgaattgagacaatctacaatcaaaagggttaaaacaagagagaccacacattgtctttcttcacgacccaaagaacataacaaaaaaaacataactttatatgtatgtctccttcaatcgcccactctacgttccctgtgaccctgtacaatgtttcttcacatggggaacaatgaagtctctacctcatgaacaaaacgagtatacaatagagagaattcttccttttctccattacttgcgtagatttccggcatctcaatcgggtaatgtgtatcttcttccatgaagataatactatcagtgccttaccggcctgtgtatttgcaggaggaatcaactttactgctgaggaatttggtaaacgataccttcgagatgatta

SEQ ID NO: 133869 - DNA, 511 bp, Arabidopsis thaliana
  unsure (1)..(511): unsure at all n locations
aatgnnnnnnnnnnnnnnnnnnnnnnnnnnnnnnnnnnnnnnnnnnnnnnnnnnnnnnnnnnnnnnnnnnnnnnnnnnnctttttttttttttttttttaatggaaatggtatgaatcatacaacactcggtattgtacataatgttttggcacactcactctcacaatgtatacgaacgttgagtgtatatctaagattgaatctcagaacctaaattctctattcaatcatttgaattgcctgccatgccgactagtttgagcatgttgcgatcttccttaaacctctccagaacagtacctttcatggcgttatgtttggtgtcttgttcatttgaggcctgaacgattccccagcattctatcacttctggctgaattctgctcgtcttggaaaggctcgggctaccaaacgttgtgcattcgaatgtctggccttgatcgaagcttgctgatataaacaggccaaagtgatttatcttacctccaaatcctatcccattcggaatg

SEQ ID NO: 133870 - DNA, 529 bp, Arabidopsis thaliana
  unsure (1)..(529): unsure at all n locations
atgatttatgtgtgannnnnnnnnnnnnnnnnnnnnnnnnnnnnnnnnnnnnnnnnnnnnnnnnnnnnnnnnnnnnnnnctttgtgtttgtttttttttttttattggggcggaagacagattttataaaaggcctcaaacggacatagaaaacagtacatatcaaagcccaataggcccacacattggtttatcaattattcaacttatttttgactgaaaagggaaaagttgatgagtctttagtgtttgtgagactggatatcttggcttcatcaatccttttatgtttaaagacttcttctatcttgaaacaggttcactgcgagctgagtggtttttacggatgattacctcttgcggcatatggtcataccatcgccgattgataccatactaatgcttacacgttgatcatccattaaattttttggtgaaatttccttaggctgagggccctctaatcattcacccgggaaataccgcaccccatccatgccaaaaaaacattatcaattcaccatggctt

SEQ ID NO: 133871 - DNA, 682 bp, Arabidopsis thaliana
  unsure (1)..(682): unsure at all n locations
atgatactccnnnnnnnnnnnnnnnnnnnnnnnnnnnnnnnnnnnnnnnnnnnnnnnnnnnnnnnnnnnnnnnnnnnnnnnnnnnnnnnnnnnnnnnnnnnnnnnnnnnncggccgccaatgcacaacaaactgtgtattctttagacaaattttataaataccaaaggttttgaccagaagaggagtgaaaaatgttcacgtatgtcaaagacaaaactagtgttctaacaaaataagacataacaatacagaaatgaatccaaagacaaaagtcaacttcaaacgcttgttccaatccagaaatcatgttccagaagctaactagacaaaagcaaggttttttaagttgctgttcctccactatagtttatctctctgcttcagatcatggaggatagcctctttaccggggatatcgaaagagcttcaagatcaaacaatgtcttgttttgtgcttcaggcgacgcgggggttaaccatctccgatttcccggattctgaactatcttcgtcatcgtcatcatcttccttcacactccgtctgattcccctgcaagctagttcacggtgcagctgcaacgttccttctcgacgctcgccttgccttttcctgcagtccgggcggtgttcagaggccttggaaatttntgctttgacctgcttntcaagngcntggnttt

SEQ ID NO: 133872 - DNA, 519 bp, Arabidopsis thaliana
ttaggtcaactctagaagatcttgacgtcgcctgcacgcgtacgtaagcttggatcctctagagcggtcgccctatctgtttgttgttttaataatatcaaaacgatcaacataatgttctctttatggttcaacaactgagaatctgctatgaataaagacatgtggtccagaaacatgaactttgaatgcaaaactaaagaaaataatctgtgtatgacttgaatgtttttggtttactagtgagagaagtgaaggagccattgataaacatctatttaagagaaatctgggaggggatcaagcggatacacttacaggttcggtagctttcttgagccattccatttcagtctggttcataaatggggctaagatgtctttgcacttagaatgaatggtgttcaaccaggcaatctcttcccgtgtcaacttcggctagatcgataagtttcaccttgatatggtgcccaagtgatttgctcaaattgaatgtaacccttgtcgccaaaattgaat

SEQ ID NO: 133873 - DNA, 528 bp, Arabidopsis thaliana
tgacactatagagagctatgacgtggcatgcacgcgtacgtgagcttggatcctctagagcggccgccctttgggttttgttttttttttaaccaaacaatcaatttatcttttcatctaaatactcttatatatatttacatatcaggttcaatcattttctttatctacagttagttacatctgaaggtgggcttcgttcaaaagcgtgtcatgtgctttcgattccagttggctttcatctgatagagaagcttaatggcttcaatgtaaatcccattctgcatataacttgcgaccatagcgttccagcaactaacactagtctgggccttactactcttaaaaaccttttccgcgtctttcaccttcccatacttcccatacatctcaattaaccgacatcggatcaaacaatctgactcaaatccgagctttatagcattcgcatgcacttggtgcccgcttctcccaccgtcactgacccatgagcatgcttttagaacattagagaacactgagacgttc

SEQ ID NO: 133874 - DNA, 511 bp, Arabidopsis thaliana
atgacgtcgcctgcacgcgtacgtaagcttggatcctctagagcggccgcccttggtttttttttttttataaagacgacatctttctctaaagctttaaggaacagatcatctatgttttacactctatttattcgctgccttgtcttgacaacgaaagattcgttggaaccattttccttctctgttacggcgtggctaaaagagttgcgggggggcgagtgtcaagcccttgtacaaggaggggacgacccctgcccaagccgtttgggttagatccttcgattattggtcgaagaaaagctcgatgggcaggcaaaaatatcttgggatggacctagcgcgttatcgggagaaaagcttcttatttctccacccttagaaaggatgttaaaggtgaagggccggcttcccaaagctgaggaattcggagcgtcaatcacgcaactcgatctggctcggccttgggcgcccccgctactttcggccggcgcgacaggtcttggaccat

SEQ ID NO: 133875 - DNA, 701 bp, Arabidopsis thaliana
  unsure (1)..(701): unsure at all n locations
ttaggaccactatagaagatcttgacgtcgcctgcacgcgtacgtaagcttggatcctctagagcggtcgcccttgggttttgtttttacttattcgataacattattataagatcaaaatgtcacaatggtaacacattcattacttgagtttccaaaattttgtcatgagagacaaaactcaaaaggacacactgaaacaaatgtccaaatggtactcatctggctcactagtccagtttggacctgcgggtgaagcttgatgcttccaccttaatcctgtgatccgcagtagataaaagcggcttcaccctgttgccttctcctctagtgtggtcctctcttccatagtcgttccttcagaggtttcatcattcaccttatcgacaacgaatagctcagcattgccttcatggatattttcttcagagggttcaaccattcttcttatagacaatgacttcaatcccggtgggatttcattggcttccgtagatcagggtaagttcccctgggtccagagaatgnaaccaaatcggcaaaggtccanccttttcttcagcagagcaatatggggataaacaaacttccatttgaacnctnaagnanntccctggancctncaatggaacccccccaagggtgggttnaaccctttggtgaancgggnanagggtctncaggggaacaactntggggtc

SEQ ID NO: 133876 - DNA, 459 bp, Arabidopsis thaliana
acggaatccgggttttatttataccccccatcattggggtttaaaaaggtaacccgacaagaagggaaaaggcaaacataaacatatatatcccttttttcaaaattaaaaatccgttaagtttgaaactgattcatcgtcctaattagcaaggatgttttgctaaacgtcagaagcaaaatatgattaaatatggactttggttcgtgagtttattaagtttcaggaaactaagatcttggaggtgtgaaacgcgaacacttgttcttccttccgctgcttttactgaggccacagacacaagtctcgagcagctgatagtcctcttcccagaacaagagtgatgctttctcagattgctctattagtttcttagctgccaagaaacccgctatggtccaagtctggtaaagccttgattgtttccccacaaaccttccgcttttcgtgtcataatac

SEQ ID NO: 133877 - DNA, 510 bp, Arabidopsis thaliana
taggacccactatagaagattctatgacgtcgcctgcacgcgtacgtaagcttggatcctctagagcggccgccctttgttttttttttttttcacagtaaaagcataaaactaaataagattacttgaaagtgtctgcagaagttatctacgatttaatcttactatctctaaaaggggaaatgaagatgcttaaaagttcctatagatacgttacaacaaatcacatattccttcatgtggccggcctcatatctctttggtttctatacaaagaccaacctaaatgagaaaaataagccctaaattctctttcactgggttaagccaaagtaacaatgcctgcgttctgtgggaatattacaagcccccatagatatcattgttgtggaagaagccatcttctgagaaatcatggtctgggatcgatatatcttctgaaaaatgaaggttgttgttccaggcttgctttaaaactgttgtttccacttgaacctcggcctccccctg

SEQ ID NO: 133878 - DNA, 772 bp, Arabidopsis thaliana
  unsure (1)..(772): unsure at all n locations
gaatgaannnnnnnnnnnnnnnnnnnnnnnnnnnnnnnnnnnnnnnnnnnnnnnnnnnnnnnnnnnnnnnnnnnnnnnnncttttttttttttttttttttctaccacgcttatttatttaccaaccgaattttaggacttaatttacaacaattatggacaacaaattagttacaaaatgtgactaataagaaaaaaaaaaaagaagacatcttgaggtaactttatttacaaggaaaagacaagaggctatttataaaatcgtccacaaccttggattggatggctacctgcttccctttgatgtctctgcaagttcagaatcttcccttgctcgttttaaccttgttcctacataatccatcttcttctctactcttaggagctgggagggggctggaaataagggtgctgcagagcctcatctacgggtactctgtcctcagggtaccattgtaatagacccctcaccaaccttaatgcccaaacatttggaaacccaatctcagtgggtctctgctctttatccggtccgcaaaaaatccttcagggcatttccatgacgcaaggggaattccaccctgctttgaggggcgccaccatgttttaaagggctacccgggattagggggcacatctccattaaggatcgaagcttgtatgcaagctctttaaagttttcactccaacctntgatatgntgatccaaaagggcacgtgtaacagaactaatcttaaaaacattgggtgatcctaaaatcatctctaacat

SEQ ID NO: 133879 - DNA, 770 bp, Arabidopsis thaliana
  unsure (1)..(770): unsure at all n locations
gnnnnnnnnnnnnnnnnnnnnnnnnnnnnnnnnnnnnnnnnnnnnnnnnnnnnnnnnnnnnnnnnnnnnnnnnnnnnncttttttgttttttttgaccaatttatccaaaaccttttgatacaaataatccaaacatagaaaacagttgttgtccggagtaataaaagaactctgacatcattcaacgatattactatacatttaaactcttggaaaaacatggatgaagaatcacataaatgcagtagcaccatggtaaacaagacttgaggaaaggtggactaactctgggtttgtgttttacttagagaggaaatggctggacccctgagaaatcagatttgtgtcacatcagagagatatggagaagttaacacataacacagcatttgcttgcgttttcctggatgcatctctatttcattggttaattcttcaatccagcttgatgtcgtttttcgactgttctattttcttcggctctgccgggaaatatttgattccgctaaggtcacctactttgcttataaccttgagggctcttataagatcttctcttgaatgagatgcggagatgcaaatacgtgccctagccagcagtagaggtgtagctgggaaacccacgaccaccactgccactttttgtcgcagacattctcttgagaaagctgggatttttgctgggttgtaaagcattataggcatgactggggaatcattgtctccaagtacctcaaatcccatcttctgcagctcagcccggaaaaag

SEQ ID NO: 133880 - DNA, 518 bp, Arabidopsis thaliana
gaatgatttattgtgtactatacaagacattgacgtggcatgcacgcgtacgtaagcttggatcctctagagcggttgcccttttttttttttccttttaaatatcaaattaggtgataacacctttttattttattaagcataaacctttaatccgtgttacatattccttagatactacaacgataaacactcaatattggggtgactagatttagtttttaaacttggcctcaaggtttttaacaacattgacgtctaactgaaacgcctgagccaaaatatctggattaatcggaggcgttgacccaaacacagtatctgcaatcgtgatgacaccagcattttgactacttagtccagcaaaggccactgcaagggtcttcccgatattcactgtgaaaatggatcattcctatgggggaacacaacacgttcgccggggttcagcactttagcgaaataacgggttgttgttttgttgggagaaaacaaacccacatataatgttccttaaa

SEQ ID NO: 133881 - DNA, 512 bp, Arabidopsis thaliana
  unsure (1)..(512): unsure at all n locations
nnnnnnnnnnnnnnnnnnnnnnnnnnnnnnnnnnnnnnnnnnnnnnnnnnnnnnnnnnnnnnnnnnnnnnnnnnncttttttttttttttttagtcaaacaatgacaaatgcttttaaaaatgagatacaataatctttgttttttgtgctgacactttgaaccggttctacataaaagccaacaagtctataatgcaaaaaacccaactcgcatcattggaaaaccccatctctaatccggtagctacagctctctaccgtacctaagtaacttacccatctgataggttccttgttcttgaacacaccgagtcgaaatcacgaactaatcatgttgaaatggaatctggatagctgctgcggaatggttgatataaccggtccatatctctgaacattgtcatagagttcgaacaaagggacggccaagagcttcaaatttttgggcacagcaaagtactctttctcagacaagtgaacaatgtagagtctcttgcattcctttggtttc

SEQ ID NO: 133882 - DNA, 510 bp, Arabidopsis thaliana
  unsure (1)..(510): unsure at all n locations
annnnnnnatgtgaactatagaagagctttgacgtggcatgcacgcgtacgtaagcttggatcctctagagcggttcgcctatgttttttatttcttttttttgaccaaaatattattttttcctctaaaaggcattacaaattgggaattttatcatctgaattttagaattttacaacataagagacaaccagaatttgaagacaaaagccaaattaatacatacaacatattccctctttttaagatttttacaatggagaagacgaagcaaaatcacagacaagaaaaagggaaagaagaacatttgggcttcttgctggttcttcttctctgcgagaggagttttttttaaagtattggtatcatcagattgcttactccattaagagctgtctatgtcgagtgagatcgttaaggtaagaggaagaggtgtgatctaagtcgcaatcgtcgagactcactgttcttgctacaccctgggttttgttcagctaactgggcatctc

SEQ ID NO: 133883 - DNA, 642 bp, Arabidopsis thaliana
  unsure (1)..(642): unsure at all n locations
atgaannnnnnnnnnnnnnnnnnnnnnnnnnnnnnnnnnnnnnnnnnnnnnnnnnnnnnnnnnnnnnnnnnnnnnnnctttttgttttttttttattcaatattacaatggaaaattagttgaaaaatatcaaaaacatcattatattacaaagagtaaatcgattattatattataacacctaacagaggaacgacacgtataattcaaccactaataataaaagagctagaaaacggtaacaatttctaagcaccacgtgacaagtccacgacacgttccaaaaaccgttgacactccttggtgactctgcaaagcgactcgtgcgccaaaccaccaccgtcaatgctcagtgacatctccgccgagtctctcaacttcttcactttccttctcatcgcttcaccttccttctcagtcataaccttcctcaccaacgcctcaatcttccacctagaaatatcctcctttggatcatccaatctgactgcgattcccagttcgtcgctgagcaacgccgcattcatattctgctcggcaaaaagtggccatgcgatcatcggaacgccgccaacgacgctttccaacgtcgagctccaaccgcaatgggtcaaaaacccaccaacgccccgatgggacagg

SEQ ID NO: 133884 - DNA, 510 bp, Arabidopsis thaliana
  unsure (1)..(510): unsure at all n locations
aannnnnnnnnnnnnnnnnnnnnnnnnnnnnnnnnnnnnnnnnnnnnnnnnnnnnnnnnnnnnnnnnnnnnnnnnnnnnnctttttttttttttttttcaaaaaatcagtttatttagaaacagagtaattacaaagaataatagtgtgttttgtttgtttgactaaaatgatttcttcacattcttcaaatgcattgaagaatcgacacaatttgtcttctcgatctcgtttctacaacggtttaaattccgcaagagctcgctcgctttctccttcgtcttatcctcgcacccgacttgtaagagcactaagagtttctcaaaggcaccaacttgaagagcttcaactaacaaacgatcatcacattctccgtctttcttattcttccatagcttccaaagtatcgaaaccgaacattgtgtcccgagatccgaaactctaagaatcttcttcaccagaagaggaacgatcaaagcgtttctaagaacatcttctttgccttggctcg

SEQ ID NO: 133885 - DNA, 494 bp, Arabidopsis thaliana
  unsure (1)..(494): unsure at all n locations
nnnnnnnnnnnnnnnnnnnnnnnnnnnnnnnnnnnnnnnnnnnnnnnnnnnnnnnnnnnnnnnnnnnnnnnnnnnnnnnnnnnctcaaaagcctgacgtatcagtgacacatttaacctcaaatggagttgacaaaaaacatcattcatctttaatacttattgacggatatgtcattatcaagtatcaacctatttttctatttatttataatttcaaaacctataattatcaacatagagttttggaatcttgaaaccggggaatgattcgtccttgctcctatgtgatgacgagtggcgccggaggaaccgtaggctgtagcggtgaacaatcccagtctttaccgtttttgaccactaagaaatgtttgggaacccatgactcaccagaagcctttttttgttttaaagacgctttttgcttctcctccacaactatcttagcttcttttgctctttcccaatctttcttcagtattccttcacttactt

SEQ ID NO: 133886 - DNA, 529 bp, Arabidopsis thaliana
  unsure (1)..(529): unsure at all n locations
ttgnnnnnnnnnnnnnnnnnnnnnnnnnnnnnnnnnnnnnnnnnnnnnnnnnnnnnnnnnnnnnnnnnnnnnnntcccctttttttttttttctttttattaagaaatcagtacattgagaatcagagtttacaaatatcaagtgctgacctttttttactcttaaggagaagcaggttcaacaacaactacacacactttgcaaagcaactgaagaataatcaagcagccgctacaaccaaatatttaatgcacaaaaatatacaagagcttgagagaagactcactgatgaactataagctatgagtgtgcccatacacgagacagatagagagatcacagaaggtttagggttaccagaatttcccaacagacaagtaacgagatcccaacagcaacgatcaaagcagaacatctggctcggttaaactacctgaaaagttaactttacaacattttgggaactccaaaccagcttcactgcatctcacttctgtcacatgtgggagagaccttacatctatatac

SEQ ID NO: 133887 - DNA, 405 bp, Arabidopsis thaliana
ttaaatttttctagaaacgtttcttgtgtaaacacacacatatgcaactgtacaacatcattgaaagcttatatccataaagaacacaataatcttacatctttgtccacaaaaagaacattagaaaagtccaaactctgagtgattgcgcgcggagatgccccctgaaaaacttataacatttgtaccttagtatccccggaacctgtctttgtcctgactagaaactggacccctcaaacctgctttacccataataggatcttcaattgaaccaaccttggggcccacatggcttggatcccctctattcgaaccaaccatacgattttgctcatctttaacttactaaaacaaaaagcccaacacctgggggggtttcttcttattatcgaaaaaaaaaac

SEQ ID NO: 133888 - DNA, 780 bp, Arabidopsis thaliana
cgtgacgtcgcatgcacgcgtacgtaagcttggatcctctagagcggccgccctaaccttttagattcttccgtagaaccaaaaagctcatttcaactatatattcatcagagtttgctcttttaccttagaactatcggagcaaatttacatatcacaaagaggaatcttattgtaagagccaaaattcaaaataaaaaaataaacaccttagaacaccacaaaagagaaggtcttttaccttactatggatacccatcagcggtataaacccttaccgcgctgatcaaaccgcaactattgaacaactaatagttctactcactctcattccttcaccccatttggaggaaaactttagccacagatagataaaactatctcatatctgtgtgttgaaagcttgattcgttatctccggtgttttgcctgattcttggattgatggggttcttgatttaccataaaccaagagggctctaggggtacaaatacctaagcttcttctgtatgtatgtatatatttcagaccaactggaaaactttgattgacccattggagctaactgaaacaaccatattcgagcttttttagcacaaacgcttgaaaagaacaggggggtggcctgctctattttcgtacccggaaatggggatcaaatggaaccaacactttgtaccgaaggttatattgggcatgggggaaggaggacccgggaggatatgggcaataaaaaccttcaatttggtctttcaaaaaggccaccaaaagtctattat

SEQ ID NO: 133889 - DNA, 614 bp, Arabidopsis thaliana
  unsure (1)..(614): unsure at all n locations
aatgnnnnnnnnnnnnnnnnnnnnnnnnnnnnnnnnnnnnnnnnnnnnnnnnnnnnnnnnnnnnnnnnnnnnnnnnnnctttgtttttgggttttttttttcttggggggggagattcatccgtagaactaaaaagctcatttcaactatatatacatcagagtgtgctcttttaccttagaactatcggagcaaatttacatatcacaaagaggaatcttattgtgagagccaaaataaaaagggagggggtaaacaccttagaacaccacagaagagaaggtcttttaccttactatggatacccatcagcggtataaaccctgaccgcgctggtcaaaccgcaactatggaacaactataggtctactcactctcattccttcaccccattgggaggaaaactctagcgacagatagataaaactatctcatatctgtgtgttgaaagcttggttcgttatctccggtggttttgcctgattcttgggattgatgggggtttttggtttaccataaanccagagggntcnaggngnagaattacctcagctccttcnggaagganggaattaattcnggccactgangaccttggntgnccnttgngcagt

SEQ ID NO: 133890 - DNA, 452 bp, Arabidopsis thaliana
  unsure (1)..(452): unsure at all n locations
annnnnnnnnnnnnnnnnnnnnnnnnnnnnnnnnnnnnnnnnnnnnnnnnnnnnnnnnnnnnnnnnnnnnnnnnnnnnnctttgggttttttttttgaaatcaaaatgacacgtcaacttttattaaaaagaacttgtgtttgagactttattgaaatgattgagaacaaacttgaaatcacagtaagtgttacattgcgagtcctagtcgatgggatggatcaaaatctttgcaaataaaacaggaggcatgtattgatagtgtaaactgagaccaccaggcttgggtaaattactcgctcacaagaaaataaaagccattcactctttctgatgggcgggctttcatcaaccttctccaagagggttggattttttagtgcaccccccacaccttctttaatggttaagtggttaattaaatgcattttttggtgcataaaaaccaaggg

SEQ ID NO: 133891 - DNA, 509 bp, Arabidopsis thaliana
tgaactatagaagagctttgacgtcgcatgcacgcgtacgtaagcttggatcctctagagcgggtcccctttgggttttggtcttttgctaaattgcattatcatatgcttagctatatatgaatgaataaaagtcttataattatgatgtgtgtacaactacaaagttttccttggagtatagtttgaggatttatccagaagtagcagaagaagcagctacagactcggagagttcttccatgagttccttttgctccaaagcagcacaagcctgcactgcgtcctctaaagcaccgtcaagaaatgttgtaagcgcaaagttcatctttagcctatgatcagtcactctactgtccttataattgtatgttcttatcttttctgaacgagctccagtcccaacctgagatttcctttcattccttatcttctcttgttgttcccttacttttatttcatacagttttgctcgcagaagctggaaagcacgcgccttattcctaatc

SEQ ID NO: 133892 - DNA, 462 bp, Arabidopsis thaliana
ctatagaagagttatgacgtcgcctgcacgcgtacgtaagcttggatcctctagagcggtcgccctttttttttttttttttaagcaacaaaacagatcgtgtttctatcgaaattgttatacaagaggttctgtatgatgaaagttatggacaagaagcatctaaaaccttatggacaatgggacgagctttacacatagcttgcaacgatgtagctttgcgcatcgtggttcctttttcactttctctcatgtctagatacttttctccaactctctcccactcaaaacattgtaccaacgatcctagagccaaggtcactagccgttgagctagccctgaaccaggacaagatcgtcgtccaatcccaaatggcatcaactttttatcctctccttttttctcaaacctctccggcttaaaatattttggctcttcccataactttggatctctatgga

SEQ ID NO: 133893 - DNA, 624 bp, Arabidopsis thaliana
  unsure (1)..(624): unsure at all n locations
taggtacactatagaagactatgacgtcgcactgccgcgtacgtaagcttggatcctctagagcggtcgcccttagtgtttaatcctttttttttttgggtcaaatgatcaatatatatatatatatatatgttttcatgtaatgttacattgggatatatgcacatgctccggtaatggaaaacagagataacacagccagctttgttttatatatatagtacacagctcaaacaataataatcttctctagctctgataatttatcaatatttctgctactaattctcttcggttttttatttacaatgccgggccctcatgtgtttcagttgtctttccctccttgtttatctgtcatgtgggaattctaggtcgttttccaacaccttgaagtgttgtggctgctgcccagagcaatggaggttccacattttgaagtatgacctctccagattcttcacccaacgcatggtgtcgaatagaggacagggtaagcggctagcccccattccctaaggcagggccgaagttttgggttgtcagggccaagaganagcttcncttcgacncccaagtggtaaancacccatggccaacagtgaagggatggcagcccggtgc

SEQ ID NO: 133894 - DNA, 646 bp, Arabidopsis thaliana
  unsure (1)..(646): unsure at all n locations
gacgtcgcatcgccgcgtacgtaagcttggatcctctagagcggttccctttttttttttttctgagatttaaagatctttatttcataaagtcatgtagtaatatattctccacaaatgattgattacaagagcaaaataaaccacacataatttatatgatatgataaagtaaacactcacatatacaaacacacataagatatctcacttctgtttcaagaaaaacaaaagtctagaaacaacattttttgtaaaataaaacaaagtttggaaacatttttcatttggttcttaaaacttagagaggtttgacattgaacctgtaaacgagcttcttcttcttagaggttgggttgtctactgtgagtaaaaccttgccaagctcattcactttgaagctatgggtgtaacaccggttcatcggatgggtctcatcttcctcggtttttggtataaccaccgtggtaagcatctttctcttccggganaaattcagcctggagcccattccatcccggtacccttatcnccnaaaaaggtcncatttcccaaaggttaggtncccnagttgttttntccnggggtaaaagggtcccggggggacnnccaggaaagntggttgngcgagggaanccancccatt

SEQ ID NO: 133895 - DNA, 524 bp, Arabidopsis thaliana
  unsure (1)..(524): unsure at all n locations
nnnnnnnnnnnnnnnnnnnnnnnnnnnnnnnnnnnnnnnnnnnnnnnnnnnnnnnnnnnnnnnnnnnnnnnnnnttttttgggttttgtttttttttttttttttggagaggaacaatataaacaatatacgtgacacttaggccgaagctttacttgcttaaagtatgtatggtcaaatttagaatacaaaggtggcaaaacaacttttcacacaaaaagaagaaacaggataaatcaaagactcacaaaacgaaaacaaccgttgttctttgatttggtcggatttagttacagaggcttacttggtgagtttgaagtacaagatgatgaaaatggcggcaatcaatgcgatgatgatggctccaatggtccatttgttcttgttcatcctcctcggcatgtctggcaagatcttcttgctctttccaatgttatcgtctactccatgaagcgtttcgtgggcacgtaagagagactgtctctgaccgtgcaagtcttggaggattgaaacaccgatttctt

SEQ ID NO: 133896 - DNA, 669 bp, Arabidopsis thaliana
  unsure (1)..(669): unsure at all n locations
nnnnnnnnnnnnnnnnnnnnnnnnnnnnnnnnnnnnnnnnnnnnnnnnnnnnnnnnnnnnnnnnnnnnnnnnnnnnnnnnnnnnatcacgtacctactaatttccaacacagtgggaccgactcttattacatttttttctgactccaatatttatagatactacaaaagcattgaaaactgctaaaacacaacattttttaccaaacaaaaacatatacacagtcttaaggtttacagttaatatggctcatgcgccttagagtaaacctctttcacagagagaagctttcattgctttcagggattcttccatatcatcacaaatcttgtgagggtctgatatgacggtaggatcatacgccaacgaaattatcattttatccgcgtaactcattaaatgtatcaacaatgcatgtgagtgtccgtaagaacttggagcgatgtaagagacaggatggccacggaaactgatttcttccatggggccaatgacgtttgggacacatgtcggtgggggttccncancgggcggaccaaataattcctgctgccgncttggnggcaaacacttttnggagganttgggngntaaaatcantagagccgcggngataggagggttcctncnngccacaaggttttggganttttnnnttnncccngccgg

SEQ ID NO: 133897 - DNA, 595 bp, Arabidopsis thaliana
  unsure (1)..(595): unsure at all n locations
nnnnnnnnnnnnnnnnnnncgtnnnnnnnnnnnnnnnnnnnnnnnnnnnnnnnnnnnnnnnnnnnnnnnnnnnnnnnnnnnnnnnnnnnnnnnnnnnnnnnncacattaaaaaggttttaagaataatgaatttgacattttttttctgtttcacataaatttgatgtaacaagagaggtaccaaataagttcatctaaataaatatatatacattgttgaatcaacaaacaaaaaaatctcacctagtttcatcagaaaaatcttctgatcaacgaagttgatcgattcataactctagtttcaccatcactatccaaatcaataacattcgaattcgaagagccacgacttggtctaactcttctcataaacgaaaccattccacgaacagctcttctcaatctaccaccattaccagaacgaccaccattcctactcatctccggtgtctcatgagctctaacccaagatatccttctcggtccttcattactaccaagtccaccaccatccatctccgtcaataccaccgggaatatcctctcaccttctcttactcccgcgttaaacctaccaacagcgaaaccaccacc

SEQ ID NO: 133898 - DNA, 537 bp, Arabidopsis thaliana
  unsure (1)..(537): unsure at all n locations
nnnnnnnnnnnnnnnnnnnnnnnnnnnnnnnnnnnnnnnnnnnnnnnnnnnnnnnnnnnnnnnnctttttttttttttttttgagtacaacaggtccacgttgtagaaagaccagttgtaatcaataaagtcacatcaaaataaatactttattccctcaacacatcattaactaacctcacacaactcatcaaaatattctattacaaaacaaaacaactattaaacagctaattacttaattagtaaagttacttataactccactaggctccatcgccttagcttccggtgccgggttcacatccttcgacggcgtaaccgccgttccagtaagctccagcggtaaatcattagctaaccctttaaggtaaaaagtgtagaacagttttgtcggatacacaagctgacgaagcttaacctgtccgtacgcaccttcaaagattccagagccaccagtgacagcgaggaacgtgtcttcataagtcaagtattgtccttgtacagacaagtgaccatagtcaccaaagtagaagc

SEQ ID NO: 133899 - DNA, 821 bp, Arabidopsis thaliana
  unsure (1)..(821): unsure at all n locations
nnnnnnnnnnnnnnnnnnnnnnnnnnnnnnnnnnnnnnnnnnnnnnnnnnnnnnnnnnnnnnnnnnnnnnnntcgcgatctagaactttttttttttttttggatgtaaagccttactcatatattctaagattgtcaacaaacataagatctctctttgttacaattttccgtggtagatatacaaacataagatctctagtctctgatactttctctgtgattggttaaacaggagtgatctggtctgtaacagaagctaaaccatgcattaacctgacaatctcagtagtgtcatccaggtaatacttggccttgctaggcttttgacccgacagtacaagcgaaaatctcagctcttggggcaatcgaagggccttcagtggaactgcagatcacctcaaacatgtcttcgtcagaccggtcatctccaatacatagaacaaactcaggaagtgttcctctttcttgcatcatcgaaagcatccttctcgctataagtccctttctcacgccctgtggcttgacctcaacatagttctgtccgcgtttcactgttacaggttcattggcaaggacactttcaagatgatctagaagttccttagcttgacatgagccaaaatcagggtcagcatcctcataactccaaacaagagcagtctccttgtcttcaattgttgagccatcggttgtctcggtgtagagttccatcacaggctcggcaatttgcttccaagaacaatctactgctgccacacagttttcccactctactgccttccttagcctgtgtagtagcggacgcgtgggtcgaaacg

SEQ ID NO: 133900 - DNA, 510 bp, Arabidopsis thaliana
  unsure (1)..(510): unsure at all n locations
nnnnnnnaggggacttataaaaaactttgacgtcgctatgcacgcgtccgtaagctgggatcctttaaagcggccgctctttttttttttttttttttttttttttcacactaatcaccttataaaactaatatataaggaatttgtaaaatactgaaacttatgttatacaattgtcactccctattaacaccgaccaaatagattttcatgctccttctaacattcctaaccaccaaagaaaaagaaaaaacacatttacattagatctatccctttgatttcccagggttaggtatttccaacaggccatccgcaacattctcatccgctgcggtatgttgataatgacgatgagaccacggaatcgtgctaaccgtcggaaagcaacacttgcacccatcaggacaaggtagctccggtagagtttcactcttcttgggggtccttccgtcgtgctggtgctgcaacatggcctcccaaagcggtccccaacattcgaccttgttg

SEQ ID NO: 133901 - DNA, 680 bp, Arabidopsis thaliana
  unsure (1)..(680): unsure at all n locations
nnnnnnnnnnnnnnnnnnnnnnnnnnnnnnnnnnnnnnnnnnnnnnnnnnnnnnnnnnnnnnnnnnnnnnnnnnctttttttttttttttccgaaaacaacctttattttaaaaaatccgaggccatacaattcaattttaaatacatcttttgaattataagaaacagattttcttctagttttgtatttcctttttcaaattcgtttcgttagaaacattaaaatctcttaaaaatattttgggaacaacaagaaaagtgaaaagaaaaaaacagagtcaagacttgatgactccaagagtagaagcttgaagcgacaccgtatgactctcatctccaatatgaatcccatgatcaccgatcggaatccttcggttcccggctcggtccactacacttaaatacttacacacgtgtatattcacctgcacacgcttcttctccccaaccgccacgtgtactctctcaaaagcaaccagctgtttcttcggagcccattctccacccggcggggcgaggaacacaagcattgtgtgcggcccatctctcgggccacgtagaacttccacgtgggcccgggagaggcggttaacccaaggggggggtaaacgggttgttttccctgaaaggggggggtttttcccggaaggattggngcnctttgggggcgggatntttt

SEQ ID NO: 133902 - DNA, 1171 bp, Arabidopsis thaliana
  unsure (1)..(1171): unsure at all n locations
ccccccctgattgaggggggaaaccataggctggttatcgatttcggggccgcttcctaggccttccagttcatttttaattccatgtttggattaataggaaccagattttcttctagattggtattccctttatcaaattggtttcgtaagaaccattaaaatctctaaaaattatttggggaccaccaggaaaggtgaaaggaaaaaaccagattttttattggttgactccaagagtagaggctggaagcgccaccgtatgactttcatgtccaatatgaatcccatgaccaccgatcggaatccttcggttcccggttcggtccactacacttaaatacttacacacgtgtatattcacctgcacacgcttattttccccaaccgccacgtgtactctgtgaaaagcaaccagctgtttcttcggagcccattctccacccgcgggagccgagaaacacacaagcattgtgtgcgtcccatctctcgagccaacgttagtaacttccacgtggactccgagagagacacgatcacacctagcgtgcgtcacacggattgatttccctgaaacggtgccgtttcttccacgaccagctataggaatcacttttggcgcgtcggctatgttgtgagtaaagcgcgtgtaactcaaaccacgcccgaacgggtacacaactggaccgtcgtagatccggtaagtccgacccgggatccgcttcgaatggaccggccgcatcgacatttctgtcattggtaaattggttaaataatcttgcggataccaagtcatcggaagctttcctccgggattagcactgccgaataagatatcggcgattgcggtaccaccttcttgacccggatacccggcccaaacaaatcgctggaattttccgatccttctcagcaaaagatatatcgataggcccaccagacatcaatactaagataactgggcctttagcggccttagcaactctagagacaagctcttgttgtttnccaggcaaaagcaaactgtttctgtccttgaactccgcttcaatagactgatccaaacccattacaagaaccgtngcatcagctccacgagccgcttnaaccgcggcatcgnacaatctatcatccatgcagtgtacgtccacgcaacccttttgatgaatgg

SEQ ID NO: 133903 - DNA, 474 bp, Arabidopsis thaliana
  unsure (1)..(474): unsure at all n locations
aggtacgggtttaaagggggttgaatgaacagnacntngnccannagganccatgnaaaaactaccaaaaaggagaaggaaaaccctctcaccctcctccaccttctttcacttcttccacgaaaaccttggaggataaagcagctaaagccccaggttgattgtgaggttcaaccaaagagtaaggccgtttctttagacctactganaaaggtacatcagactcatcaagcttgtctttgctctcagatgaaatgtagtcgcctttcggattcacctttctccttagttctcctgttgaagtctgtgcgcttaatcttgatgtaccctgtccaatcatgatccactcgttatcttgccaagattgtctaacccgaatatcggatttagtcaccttgaacttcagtgaggaaccaagtaatctnnccaagaaacaaccgtttcctaaaaccttggaaacgattgccatcttcc

SEQ ID NO: 133904 - DNA, 685 bp, Arabidopsis thaliana
  unsure (1)..(685): unsure at all n locations
nnnnnnnnnnnnnnnnnnnnnnnnnnnnnnnnnnnnnnnnnnnnnnnnnnnnnnnnnnnnnnnnnnnnnnnctttttttttttttttaaataaacacacacacatatattaaatttaaagcagaatcacaaacacagacacaaaaagcttttgtacaaatatcaatacctaaagttaggacctcaaacctaaatatcacatggtagatatagtactacaatgttgacaaaaagaaaagctatagttctaaaataataacacaaaatattatttatttacatataaattaaagccaatgtgactacaacaacaattacaacatgatccttttgcctataaagccgccatggccgtacactcgagatgcctcggacatgtgatcaagtggtcgttggttaaaccggcggcttgcattaacgaatgtataaccgtcggaccaacgaatctaaacccacgacgaaccatgtctttgcttatagtctccgatttcgatgtcttaaccggtatcttttggcatgatgtgtattttgtggtgaccggtttgtgtttcataaacccccaaatgtatttgttgaatgaccccaaatctcttttcaccttgagaatttgtttagcgttggcaacaactgcaaggacttggctaaggttaatgccataggcgttgactattgattgtatcttcttc

SEQ ID NO: 133905 - DNA, 503 bp, Arabidopsis thaliana
  unsure (1)..(503): unsure at all n locations
nnnnnnnnnnnnnnnnnnnnnnnnnnnnnnnnnnnnnnnnnnnnnnnnnnnnnnnnnnnnnnnnnnnnnnnnnnnnnnnnnnnnnnnnnnnnnnnnnnnnnnnnnnnnnnnnnnnnnnnnnnnnnaacaaaaaaatcgagacacaaattttcccatagaccaaaaaaaaagggacttagcactatcttacatttttatgggacggagtatatatatggctcctggctcatctcatcggggaagatcgataacgggttcctttactagctttggcaacaatcttttttcaatttcaatcccaagggcatttatttcaactggcaggctatgagtccatgtcctcccgactattttatttttcactagactctctggagccaaactgggggcgcccatgttttctcctgagtcacgcttgctaggctcatctgaaacccagtcctttaactgagcccacacatgctccaccaggtcgaaatgcagagaaccattacctgggcggg

SEQ ID NO: 133906 - DNA, 521 bp, Arabidopsis thaliana
  unsure (1)..(521): unsure at all n locations
nnnnnnnnnnnnnnnnnnnnnnnnnnnnnnnnnnnnnnnnnnnnnnnnnnnnnnnnnnnnnnnnnnnnnnnnnctttttttttttttttcatttgaagtttgcatttggcactgatacttaaacatagttcttatatcagatggattacatactccacattgcacatttgacttcgactaaagatctgaatcagatttgaaggaaaaaagagtggtattgaataggcacaagagttccaactagtgaaatctcataaaatcaaatctaacaatgttcccatatggaggtgatataaaacacctgaggtttaaattacatacgggagatcagaagagggacagaagcaggaccttcctcttccatctcatgtgcgagctctccatagcgctcaagcacacgcatcctgcagtcttcagctgccagcactccggttgaataagcaccgtgcactgatcccgggtagcttgagctagtggcttcccccgcaaagaatagattatccaatggcactctcagtctc

SEQ ID NO: 133907 - DNA, 423 bp, Arabidopsis thaliana
gatttaactgcactatataaaactatgacctcgcatgcacgcgtacgtaagcttggatcctctagagcggggggccgtgttttttttttttttggagacttgaaccaattattattattattatatatttacaaggaaaaaactacataaactatcaagaaacattagcgttgcagtaaaagaccataattccaatattgtgtcaaaaaatagattctaagacgggggtgatatataaaaaaaaaacttggagaagtgtcaattccacaaacaatagccaagccaacacggacaatcgttggtactatcgttggacatgagaggctttgttaaaggaaagagaagtaagacaaacccaaccaccccggctaaaaacgctgcactcaccaaacctttttcatttgcgtatagcacaagcaatcc

SEQ ID NO: 133908 - DNA, 548 bp, Arabidopsis thaliana
  unsure (1)..(548): unsure at all n locations
atttagctgcactatattanactatgacgtcgcatgcacgcgtacgtaagcttggatcctctagagcgggggggctgggtttttttttttgggaacttgaaattttatttaacgcctgagagcgtgtgattgaaaactataaatatggtgcaataatacaagtgtaagtttaaaagaactgatccaatcctctcaaacgcagtattggctcttctgcagggggcggtatccaaggggggagatatcagggaaagcttataacacaagaaccctactttactttaactttcggccggaacaagaaacaaaacagagttcaaaacggcttcatttttaagcggacagaaacctgtttaaggtcattggcggggcaaaaacacccatccctgcaaaacccaccacgatcaacgcacgcatcacttgcccaacaggtcgtcctgaactttctgactctgcagagttctcagacttttgtttctttgatcgctcaatgttcgtccacttgttgttgctatttattttcgcgatgtttatgcaacggcttcccc

SEQ ID NO: 133909 - DNA, 474 bp, Arabidopsis thaliana
  unsure (1)..(474): unsure at all n locations
nnnnnnnnnnnnnnnnnnnnnnnnnnnnnnnnnnnnnnnnnnnnnnnnnnnnnnnnnnnnnnnnnnnnnnnnnggcttggttttttttttttttttttattcaatttattccataatttatttgagaaaaaaaaagttatttgaatacaatcattttcctagacagttgtattaaatcataattatccaatttacagttcgatagttccatctccagcatagaaaagtcgacagagacactctcattagtggctttcatgatctattcaacaagtctatagtttaagaaatccagggaacagagctgaggacaagacattcctcgtattacttgacagctgttgcggctttcagaccaaagcaagtggccttggatgtctcattcacggtggagggaagacacaatggcaccacaacggcttctttcagtttactttttgtaggagcctcttcatcatagttatgaagtcgaat

SEQ ID NO: 133910 - DNA, 493 bp, Arabidopsis thaliana
  unsure (1)..(493): unsure at all n locations
nnnnnnnnnnnnnnnnnnnnnnnnnnnnnnnnnnnnnnnnnnnnnnnnnnnnnnnnnnnnnnnnnnnnnnnnnnngcttggtttttttttttgttgctattagataactaattgaaacattcaaaagcacaaatttttcaatccaaaattcaaattgaacatctctagtctaatcttgatttgggtggagccttgctttggctctttcgagagcttttagcctaggagcttccatacgtactctctgttcctcggaaatgttctgagctttctccattgccttcaatctattagcttccatacgggctctttgctcttctgtcagttcactgcttttatccatgttttggtcatcgctcggcaactttgaagcattatcaaatatctcattcaacatactgtcttcaaaggcatcagcatttggatcagcctcaacgctctttggtggtatgttctcttcgtcatgacttggctgatccatatcttgatcatc

SEQ ID NO: 133911 - DNA, 574 bp, Arabidopsis thaliana
ctatgacgtcgcatgcacgcgtacgtaagcttggatcctctagagcggccggcctttgttttttttttgagaaagaaccccttatgctttaataaagacatgaagctaaacatacgaaatattttttacgatgcttaaatctttcatagtctaaaaatatttcacaaagcaagcaacgtaaaatttgcaattgaaaaatgaggggggagagtcgttatcagcattaaagccaggaatcacgaagaaggttcttcttagctcatctctttccaacgttttcaacaaggccaggagtggggatcttctcataacgggtgtcatctggttggctttcctcaagaacaaaccataccaagcatgtggcggatcttccagcgatcatcttggcttctaaggatcctgcgacgtgaccaaggtctggtttttacgcggctgggttccccacggatctcccctacctttcccataagagggtggagggggcgggggggccttagaaaggccaagcctttgggttcttaaattgggggggcggggtattggggggggcaccagtttgggaccaagcggcgcg

SEQ ID NO: 133912 - DNA, 676 bp, Arabidopsis thaliana
ctatcacgtcgcattcacgcgtacgtaagcttggatcctctcgtaaaacgttatggttcaatatattataagtggaaactgagttcttaaatagcaatgataaacagataggcagcttcttatttagttataggtgcttggccaggagctgtggtggccgaggaccaactatggcaaacacagaaggtgatggcattacaactgagacaaagacagacacgaatcgacgtagataagactaaggcgaggcgagattgagttttacattggtttagtcttcccaccattgatgaacaaacacacctctggctctcagagtttgaagcatgttgatgcagtctgacttgtggttggaacagcggaggaaaagctcatccacgtagcatatgactcctgtttccagtaaaacagttaggaacttcatttccacttgggtttgtgttcatcttaaggactacaaagtctgcgtatttcgcagtttcctcaaaccaagcaaggaaatcgaatctctcatcttctggaaatggttctagctgttcaagcggagttatctttttaccccggtcgacgtgggttcgtctccgccaaatccggatggtaaacaaaggtgacgccgggtttcttgacataggatagcattactgaagtgttgtggtcgacaaagtagacattgaat

SEQ ID NO: 133913 - DNA, 673 bp, Arabidopsis thaliana
  unsure (1)..(673): unsure at all n locations
aatttaactgacctatagttaactatgacgccgcatgcacgcgtacgtaagcttggatcctctagagcggccggccttggggtttttattaattttttttttttttccaggaaaaaaaccagggatatataaaatcaaattctaaatttgcaaactgaaattggtctaaaacgcaattgcgtgatttaccaaaacaacattggggcagtctcatcaatcatcatcatacacttaaactgaaactatgcacacaagttaaaaagaaagtgttacaattttcaaattagacacaaagattggagtagacagacacttgatgagttagtttctttgttccttctatcaagtggcaatcgcttttttatgagattgcatcgagaaacatacacacttagctttcatggcttcagcttcactctcatattctcggaacttgtattcctcttgtttaaacgaaggaggaaccttcccttcaccgtaacactggttacacaaactaaaccgggctttcacttccttaaaccgggatccgattaccgggtaccgacaaaccgagcaaacttggttccatgacgggttccatcggttgccncagttaagggnggaggcatataccaatcccaatcgggngcgacatgggaaaacngtaaaggcctgcncgnggtcantctgc

SEQ ID NO: 133914 - DNA, 477 bp, Arabidopsis thaliana
  unsure (1)..(477): unsure at all n locations
nnnnnnnnnnnnnnnnnnnnnnnnnnnnnnnnnnnnnnnnnnnnnnnnnnnnnnnnnnnnnnnnnnnnnnnnnnntcattttttttttttttttttaacaccgaaaattgaggattttattttggacaggaacaacaaatacagagttttatgtcttatggacaatgatgttgagagcttgtactattttgagtgataatgataataactaataagcaacatatgtggaaccaaacaggaaatcagaaggcttattgctttatgggtttggcttagtcgagccattggctataacttctcctcggcttttgttgatgtcttcaccagaaacattagcaggaacagatcttccactgctggaaacgaggttcttgatggttgacttcaggtcagggtcctttagaagcgagtccaaagtcacgtgtacgcggtatctccagaagtgtttggggtttggaggatcattgattgcctcct

SEQ ID NO: 133915 - DNA, 588 bp, Arabidopsis thaliana
  unsure (1)..(588): unsure at all n locations
tnnnnnnnnnnnnnnnnnnnnnnnnnnnnnnnnnnnnnnnnnnnnnnnnnnnnnnnnnnnnnnnnnnnnnnnnnnnctttttttttttttttttaaacaaacaacaaaaccatttatttgtaatggtaaaagaagaggctttattgtctataaatatgaatcatataaccaaccatctttatgcttaacattgccgtctcaacagcttcagattggtcatcgatttaaaggtgggatttttaagggaaaagcggctggtgtaggagccccgttgtttcgggatatcccaacattatgttaagattctgcaacgcttgtcccgaagctcctttcacaagattatcaatcactgagattatgatagctcttccaggaattcgatcaggaaagacactcatatgacaatagttggatcctctaacggtggggggccgaggaacaacctccttcatccaacactttgaccaaattcttcacccccataagacgccttcattggctggggtaaatcttcgggtctacccccgggagccatttcaaatatattaggcatttgcttcccccggatcatgggttgagagggggcga

SEQ ID NO: 133916 - DNA, 587 bp, Arabidopsis thaliana
  unsure (1)..(587): unsure at all n locations
gnnnnnnnnnnnnnnnnnnnnnnnnnnnnnnnnnnnnnnnnnnnnnnnnnnnnnnnnnnnnnnnnnnnnnnnnntcctttttttttttttttgatgtaatcttaaatcatttacagaaaaagaaagcaatacagagaaacagctttaaagtttgaggattgatttgacagctaaaaacaatctgttttaccaaccaattctaaaatgcaaagtgatggattcttctacaggcttttacggatctcggaaacgaacaaaagttttggtgaactacgacctatctcatatgatggaggatcttacaactcttgttaagaaacttctgatggaatagaagagttactcttcttcttgatcagcttctgtgtcggcaatgtcctgaagatgagaaagagcaacttttggctttttcggtttcgaagaagcttcttcttcctcaccctcctttccatcctcagagtcctttcttttcagatccttgacatctccttcattgctacaactctctggtttcactatttccgtctttttctcattggtcaccttagctttccttgcttgctcttaacaatcttcaaggaaatttt

SEQ ID NO: 133917 - DNA, 575 bp, Arabidopsis thaliana
  unsure (1)..(575): unsure at all n locations
nnnnnnnnnnnnnnnnnnnnnnnnnnnnnnnnnnnnnnnnnnnnnnnnnnnnnnnnnnnnnnnnnnnnnnnnnnnnctttttttttttttttgatagtaaataatcgacttttataagattgattctaacttctaagcactcgaaatcaaaaatgactttccgattactgtttaggagaaacttctgtttttccatgtttgttggttgacatgattacacccggatttcgaatactgaaactccaactttgaagtctctctagcacactcttggtattcttgatggtgatatcacgaatgaaccaagaaaatggcggtagattaaaaggaggatatggctgaaaatattggtccattgtcactttcgatgcaatctttccttgtccgccactacatttcttgtattcatctacactcttcggcttcttgttcttgcataagcgtactgaatctacgtatacaggctccactttatagctaccctcgaatactttcatgaacatcattttctcttttttatatttcgctgtaagatctcttctgttttcatcgacaattagacttatggggatagc

SEQ ID NO: 133918 - DNA, 579 bp, Arabidopsis thaliana
  unsure (1)..(579): unsure at all n locations
tgnnnnnnnnnnnnnnnnnnnnnnnnnnnnnnnnnnnnnnnnnnnnnnnnnnnnnnnnnnnnnnnnnnnnnnnnnnncttttttttttttttttgagaacaccgactaattctctgagtttattagccatctaggtctcaagctatcaattcaaaaacagcttgattcaacaagatcaaccgaaggtagtaagatttcatatttttataatcattgcttttttttttaatctatgaattcgacgatcccttataatacccaccagtttctggtgttgacattcgaaccagtgagcttgacttgtgaaactctctttatcttaaatccaaatagctttgagatgtttgtgtagaactgagtaaacagatctccatccttcttcactcggatgaaagatgtcccaaaagaaggcagcctttggatcttcacaaattatgtacttcttctcacccttctcatccacatttgagcagtcgtaactgctgttgaccccgacacaacacggttttaacgggttcccaaacctcgaaacaccaggttccggtcctttgttcttgaaaacagtcaaaaacgcgttgt

SEQ ID NO: 133919 - DNA, 789 bp, Arabidopsis thaliana
  unsure (1)..(789): unsure at all n locations
tgnnnnnnnnnntccgttnnnnnnnnnnnnnnnnnnnnnnnnnnnnnnnnnnnnnnnnnnnnnnnnnnnnnnnnnnnctttgtttctttttttttttttttattccactaataattgtctgtattaataataagggatattacacattgcatccaagccaacacatgttcagacttttttggctttggagatgttcacacttgttttgaccaatacatgttgagactttggttttgagttttctatcaaacactggtttacacttgataatttcatcccagccgagctatatttctattcacaaatatacacacacacaaactcccttaagagcatctattctctgcccatttgatggcagaccttgctagtgcatccattggatcaacacacttctttagcagaggatcatccccaggcaagaggtcccgcatctcatctgacccgagcatcaccacgtttaccgcctgcactagcagtacctgcaccgctatcctcagaagggtccgggctccttccatggcttttctcttcattgcttctatggatgggatcaccgtgtgctccattgttgccttgtctggaagcacagcctcaaatccattgctttggagtttctcctggtagaaccctgctgataacgtggcgctagtggccatcacacctacacgcagaggattcccagcttcaaggggcttcattttttgccttcttgcagttcttttagcaatgcatttcaccccatgttgaaagcaaagggaaactaaaactcccctttcacattaccct

SEQ ID NO: 133920 - DNA, 543 bp, Arabidopsis thaliana
  unsure (1)..(543): unsure at all n locations
gcactatagttgagctatgacgtcgcatgcacgcgtacgtaagcttggatcctctagagcggccgcgcctttgtttttttttttttttttatttccaatcaaacccataatttcaacataacattccataaaaaaaacaaaagctcaagactccaaagtattataatccccctatattaaaaacaaaaaagctgtactgcaaaaaaaaaattgatatccttgattaagctttttcatctgtatagaacaaattttctctattccaccaaaaccgtctcagacctcatttcccggtcccggaggatcctcaggcttcgcgtttcgtctctgaaactgatcaagctcctcttgagggaaaacttcagattgaagagaaggagagatcttattaacgtgaagccacgttaggtgccagaaactgtcacttcccaaatcatcacctggtaataaaactccncggcgccttcattaccagtaatgggttcttgagccagtccgggatgagggtattgactttttcggtgcggtccctcttgaattcag

SEQ ID NO: 133921 - DNA, 521 bp, Arabidopsis thaliana
  unsure (1)..(521): unsure at all n locations
gnnnnnnnnnnnnnnnnnnnnnnnnnnnnnnnnnnnnnnnnnnnnnnnnnnnnnnnnnnnnnnnnnnnnnnnnnnnnctttttttttttttttgttttttttgatatctcaaatgaataatttatttccttttgtattacagagtgtcagaatcagagattccttttgagatccaaattttttcaaattgatacaataatcagagaggtttggattcaaataagaacaaaaactcctgcagttttagcaatcaataagtgagctgctacttatattctgtaaccgccttgagctccaactagctgttgtaggagaagacggtagaataatcggcggaatccgcttgctttcttccacaaaaggaaagtctgtcatgtaatgaagacctctgctttcatgtctagctaacgcgctgctcaccacaagcttagcgcaacagaacaagtttctcatctcacaagcttcaagagctaccactgtttgttcccatccatgttcaaacaaaaatgtttcccattttg

SEQ ID NO: 133922 - DNA, 720 bp, Arabidopsis thaliana
  unsure (1)..(720): unsure at all n locations
gnnnnnnnnnnnnnnnnnnnnnnnnnnnnnnnnnnnnnnnnnnnnnnnnnnnnnnnnnnnnnnnnnnnnnnnnnnnctttttttttttttttttttttttaagggaacaacactatcagaacacttcatccgttgattacagcttaaaggaaggagaaaccattgttctccaactcaaaaatgtaagatttacagttattgtctggatacatttcccacaaggtttgtttttgtttttcacatcaaaatgattgaaacagagaagcgataaagacagcaagtcaaaaacggtagagaagagtctgggcaatctctcgttggaggataaaggcaagtcaatagaaaccaccattccttcaatcatcctgccacctccacctccgggaccgctttcccctgtcacaactgctcagaagtccccgtcaagtctgccgccaagcctcagcctccaaagatcgtctgaacaacaagatttagatacaatgcgagaagaagaagaagaagagaagaaagaagacctaaaagccaaagatggaggggttgaagatgcaccagatgatgactttggagatttccaagctgcgggttgatttaaacttataatcttttttaccatacacaaagatcgttttataagtaatgtgactgatcaaagtttggattgtttgctactgagagcttatcttctgtacaattccaaaatacaagcctatttctctg

SEQ ID NO: 133923 - DNA, 520 bp, Arabidopsis thaliana
  unsure (1)..(520): unsure at all n locations
gnnnnnnnnnnnnnnnnnnnnnnnnnnnnnnnnnnnnnnnnnnnnnnnnnnnnnnnnnnnnnnnnnnnnnnnnnnnctttttttttttttttttgatgaagtaaattttcataacagtactgatgaaaagatagttattggatacactagcttactttcttcagtactactgtttgggttagttacataactaaggcaaaattctcttctggctgctgatgacgattccttcccgcttctgatttgggccttttctgtataagtccttgagctatggtacaacaaaactggattttggagcagtcccccttgatgttcttttacctcgacaaaacccgaacaaacaaagatggatgaaagctatgactgtcttcttcatcatcctcatcatcagcatcatcagtactttacaaggccagcaccttgagcctttccaaaactgactctatgggtccatcaaagaagacaaagcttttcgcacagcaaaaccccaaaacataccatccactggaggacttac

SEQ ID NO: 133924 - DNA, 527 bp, Arabidopsis thaliana
  unsure (1)..(527): unsure at all n locations
tgnnnnnnnnnnnnnnnnnnnnnnncttgacgtcacgtcgcacgcgtacgtaagcttgaatcctatagagcggccgccctttttttttttttttaaggaactgtgaaattttatactataggggtcacaagacaacactaaaccatcaaattctaattggacgtctttctaagggttttacagtacaaatgaatccactcacatgagcatataaatatatttatagggggggatttttgatgaagaaacttgtaactaaggatagtaaatttgacttataagttatgcaaatatatatacattacaaaattctctcctcatataaagcttcaccatctgacctctcaagaaacagacttcaaatttacgtcatgttgcaagagtttattgagtggaacaacctgatcggtactcgacgattcactcatcatcaccggcttcatcttcttcgagcttccgttttcgccttttattccttcgttaacagagttctgatccgatacctctgcttctccaacgctgatttg

SEQ ID NO: 133925 - DNA, 681 bp, Arabidopsis thaliana
  unsure (1)..(681): unsure at all n locations
acgcccnnnnnnnnnnnnnnnnnnnnnnnnnnnnnnnnnnnnnnnnnnnnnnnnnnnnnnnnnnnnnnnnnnngcnaanaaaangaanccccaaaatttaattccggccgctcgaactcaaatgattgcatctcaaaactcgctcagttcagttacacgcaaacaaacactctcggtttctaataatattacagagacaagaaaaatggaaacagataagcttggatcagaagaaaaaacagagtttattgtttagtgctttgtgattctttcaagtacttggaagtagtcggggaaggttttcctggtgcaaccaggatcgttgatggtgattggaacatcagcacaagctgcaagagagaatgccattgccattctatgatcatcatatgtatcaatctctgccgttttcacctttttgggcggagttatcacacaataatctgaaccttcttccactgtagctcccagttttctaagctctgtgcaaatggcaatcatcctttctgtctcctttactctccagctagccacatctctaatggtggttggaccgtcagcaaagagagcaacgacggcaagggtcatggctacatcaggcattttgttcatgttgacatcaatagcccgcaagtgtctcattccaaaagcatctctaggtggtccctgtcacagtcacac

SEQ ID NO: 133926 - DNA, 531 bp, Arabidopsis thaliana
taggtgacacttacaaaatctatgacgtcgcatgcacgcctacgtaagcttggatcctctagagcggccgcccttttggtttgtttttctctgtacattatccatctcctctatgatctggagagatttaatagataaaataggttaattagccctacaaaatgacccttaatagatttatttacacatttttcaatattaggacaaaactagtcaggaaggtgaacacttaagatgggggccttttggtgcagaaactcttggaaagaccattaatttggcttctccattctcttcccatctatattttggaacaaaggaggtgaagggaagcttgagacttccgagattcctagttcctttccagggcaaaccctaactccacctccaaagagtaagaaatagctctttgattctaagctcttttccatccatctgcatgggttaaagatcatgggatctttaaaaaagagaggtatcataacgtattctctgttggggaaaccgaaaatcttccacctttggggaata

SEQ ID NO: 133927 - DNA, 511 bp, Arabidopsis thaliana
tctatgacgtcgcatgcacgcgtacgtaagcttggatcctctagagcggccgccctttggtttttggttttaagccctagatcatcacaatcacataatcgtttaaaggtatgtgtaagatttggctagagcagagacatgttctaaagtgtaatgtccaagtctaccagttctatagagattcaatatcttagaagcaactcttagatcagcaaactcgcgggcttcttctggaaccctaagaaccgatcttaacgcagcgaattgcgtctctataagatttcccatgctgatttcgtcttctaagtttccggcaaatgctgaaattgtctcgtacagaactcttcgaacggcggacactataaaatcctgggtatgatctggtgcgtattgcctctttatgtttggcatcagacttggagctctcatcggataaactttctgttaaatcctgagatttgcacagtttagcccatttcttgtattcatggctcgaatttagtatcgtcag

SEQ ID NO: 133928 - DNA, 540 bp, Arabidopsis thaliana
aaactatgacgtcgcatgcacgcgtacgtaagcttggatcctctaaagcgggcgccctttgggttttgggtttcgacacaaagctgatattactatatataaaaggtgttacaagatgctaactaaatgaatcaaatcatgaagccaagaaacttattaatacctgcccttacacaaaccaagaaaataaggccttttattgtggcagtttacaaagtgaaacaattccgaaattgaaaaagtagtttaaacttaagtaaaaccttgcttgtgagccagaattgttttatttgggggtttattaaaactgattgccaagttcttgttccatgttctccaaatcccatatggcaactttgccatccaatcctgaagtgctgaatcgcattactttaggactccctggctttcctcaaaaaacacaagggaatttaatgcaacttatcattgaccccccccccacgggattcaaaaaacctgtgggtggggtgtgtggggaccttttaattgacttgccaaaaaaaatttgccaaaaagctt

SEQ ID NO: 133929 - DNA, 531 bp, Arabidopsis thaliana
ttgacgtcttatgcacgcgtacataagcttggatcctctagagcggccgtccttttttttttttttttttaacacgaaaacaagatcgatagtattattgtacattttaatagaagaatattgaaatcacatcagaaaacaaggggaatttatacaatttaccaaacgtagtgaagtgttacgatcgattcttttatctctctccctcattctttgcttcctccaaaggctgatgagctacatcataggttgcatgaagaccaacgaataggtagtacaaaagcatcaccatggtgcagataatgaatctcaagaatgctacataaccgagtgatccgataaggaatagattcatggcgattgaaaacgatggcaaccacggaactagtgggactccccataccttaggaacacgatatttcggaagcaatgccaaccctaaagtgcctataaaccaaataactccagtcactgtgtaagcgatccaacctttaacgcctgagttccaaagcgctgatactccaatggagg

SEQ ID NO: 133930 - DNA, 508 bp, Arabidopsis thaliana
atgacgtcgcatgcacgcgtacgtaagcttggatcctctagagcgggcgccctttgtgttttttgtttttattcaactccaattttaaatttccaagagggaaactaatacaacagagttcaacaagttaataagtttcaacattgaaaaatgaaaagaaggagaaaacacgaaaacaagatcggtagtgttattgtacattttaatagaagaatatggggatcacatcagaaaacaagggaatttatacaatttaccaaacgtggggaagggttacgatcgattcttttatctctctccctcaaactttgcttcctccaaaggctgatgagctacatcatagggtgcatgaagacccacgaatagggggtacaaaacctgcaccatggggcagataatgaatctcaagaatgctccataacccagggatccgataaggaatagattcatggcgattgaaaacgatggcaaccacggaaactagggggactccccatacctttagaaa

SEQ ID NO: 133931 - DNA, 499 bp, Arabidopsis thaliana
  unsure (1)..(499): unsure at all n locations
nnnnnnnnnnnnnnnnnnnnnnnnnnnnttttttttttgatctggggaaaccaacaagataaatatcttttcctaaagtgaaaccagagtaataaaaaggttcctgaggataaaaatcctcaataaagaaacacttagagacgatgagaagagtaccaagtaaacttgtgaacataaaaaaagtgagacagatggagagtcaactcttataagaaatagatgacctttgtctaaaaatcatcatcgtcttcctcagccatatgcttagcaagctcttcttcctgttgcttcctctctctcctcttctcatcgctttctttctccttgtgagtgttaggaggaaacctcaatggctctgacagcttcgttatgcatgttgagggcagaaagcaattcttgagttggaacgcagtttgtgggctcattcgtcgagtagatgtccccagtttctttggggaccatgcatccggttttgtgatcgattgtagcatcaatagct

SEQ ID NO: 133932 - DNA, 566 bp, Arabidopsis thaliana
  unsure (1)..(566): unsure at all n locations
atggggggaagggggaaaagaanggggggaccttgtggtgacctctacaaaattatgacgtcgcatgcacgcgtacgtaagcttggatcctctagagcgggcgccctttgggttttggttttttgtgaagagatcatggatttatatttcaaaccaaaaaattcacattctagtgaacaaactatttaagattgaatctcaggaacaagttcattgatgtcaatttccactagtgtctccttcccaaacaaagtaaatcccaccgttgcctttgcagttttgcggtttagtttctttaggttcccaacaaattcagcaaatgtccctgataaaactctaactgtagaacccgctgcaagtttcttcttcttcgcctttgtttcagtagcaagtgtagcttttctcggggctcgtttcggtttagattctgctacagtctcaataacatctggattagataatgcgagaaaggcccggggacgcgtaggatactccgttttttcttaaagtttttgtggctctttaaaactcctttttgggtttctcttgggcgttcttttggctgg

SEQ ID NO: 133933 - DNA, 528 bp, Arabidopsis thaliana
  unsure (1)..(528): unsure at all n locations
nnnnnnnnnnnnnnnnnnnnnnnnnnnnnnnnnnnnnnnnnnnnnnnnnnnnnnnnnnnnnnnnnnnnnnnnctttgtgttttttttttaagctaataataaatttatttatttcataatttagacaaattattacattattgacaaaaccgaaccctgatctcttgtattggtgctgaagaaactaaaacattatgaaccaaattaaaggactcaacactaacgtcctctgcaaacggcgccaaatacatatacttttcaacaatttcatatcttgtacggagacatatccaacttccgaaacatcacttaccgaacaagtacgtactgatctcattttatcacttatgatggcgaaaccacgacaagttgtttcccgacgtttttaccggggaaagagtccaacgagagcagcaggagcactctcgagtccatcagcaacatcttccacatactttatcttcccttcttttatatacgggaccacaaactccaagaacttcgagtatttgggggaagtaatcgaaa

SEQ ID NO: 133934 - DNA, 503 bp, Arabidopsis thaliana
aaatttatgacgtcgcatgcacgcgtacgtaagcttggatcctctaaagcggccgccctttttgtttttttttttattgtgtgtgatacaacacaaccgtggtttaccataacaacaatacagattgtcaaacacagtaacacacaacacatgatccaaatgaccaaatgttcaggactgaggaacatacatgatattatcagtattcttggctcaaattttgggccgacatacatcaagttggtcatcaaagaattctgtgtgttcttaatttcagagctgaggcaacaccaatcggaaaggaggaatcgcataaggtcccttaagtataccctcagccatcaatctatatggcagcttcagtcatatgaacaccatcccaactcacatactttgaaaggatcggcacaacattcaggtccttgaagtcccacgtttcctacctatggggaattaaacggtccttctaaagcccaaaaggcgggaaggggttgtttataaac

SEQ ID NO: 133935 - DNA, 768 bp, Arabidopsis thaliana
aaatctatgacgtcgcatgcacgcgtacgtaagcttggatcctctagagcgggcgccctttgggtttgggtttccactcaagaggttatatataatgagggaaaaacaacttatccacatcgataacacaaagtaaacccgagagaaaaaacgagacactgacgcaataatgacacagaccagaagagagttttttagttgtttttaaattaagatactcctacacgacattgtacttgcaaatccagaatgatcacaccataatgctttgttcagacgtactcgttgactcgaaaggctgtcactttcaaaacgaaatctctggttctgagcagctcaaacacacagacgtctccttctcctaagttgttctctagagtgaattcgtaccatccttgactgaatttggctctcccggctttgtagagacatcgaacaggccattgtttctccgcaagctggactttgatgaacccggagatcccacttaggtacttctcagcaaacccagaaggaagatacatgatgcaacctctgtatagataggatggtcgcagaaccactctgaagaaagggtttgttggttcgaacgttttggctgcattgatggctctctctctttcttctgcagtcacggttctctttctcgcagaagcactctcgtagaactttgaacggttctctggatcatcatctcgcggagctgatgagtttatttcctcaggatcagcatttttcttctcccttcctctctttttaggtattttt

SEQ ID NO: 133936 - DNA, 606 bp, Arabidopsis thaliana
  unsure (1)..(606): unsure at all n locations
cactatagatagactatgacgtcgcatgcacgcgtacgtaagcttggatcctctagagcggccgccctttttttttttttttttatataatcattgattccatggattattcatccctccatagttattcaaacttgattcatattcactttttacacacaacatagaattataataatactaggcattgatcacatgtaggatttgagacggggtcgcgtaagggactgcgctccatccaccaagacagtggtgcctgtcatgaagcgtgagccatcgctgatcaagtagataacagtggagtagaggtctgtgtccgggttgagccactggccgaggggtgcagcgtccttgaccagcttctgcgctcggtctcttcccacagaagctgtatactcatcatccagatgcagccctctagagatcatgttgacccgtatcttggtgcttcccgagactcatggctgatgcccggacgagctggtgaatagcggcagaagttgaagcgtaagcatcaccgccagggtaaaggcccctcccgtggcgagatggcctgaaanatgggcnccngatcanggcctnacctgnggaanctcaaaaacatgt

SEQ ID NO: 133937 - DNA, 552 bp, Arabidopsis thaliana
  unsure (1)..(552): unsure at all n locations
nnnnnnnctatacatgagctatgacgtcgcatagcacgcgtacgtaagcttggatcctctagagcggccgccctttgttttttttttttttttttccttttctttttacacaagggaatcaaagttttgtattttttttcctccttacaaatccatataatccaacaaagaacacccaaatcggaaaaataggccaagcaaaatggctcaaaatagcggtccaaaacgaaaatgcggttcctcatttaacagtcgacgccacattgcttcagtaacggaccagtctgtttcggcaagaacggatcaatccgaacccaaaccaaagagaagatcgaagcgagaaggatagaccaaagaacaacaatcgtcggtgttcggttttgtctacccatcaaacctttgaggaaaggataaagatgaacaatgacccaaaacgcgaaaaacagtttcccaaaaagcggtccccaagaaccatatccattgttaatagcgtaagaaactccggcaacaacaccgaccatgttgagaataatgagagttgccggagggata

SEQ ID NO: 133938 - DNA, 684 bp, Arabidopsis thaliana
cttgatgcacgcgtacgtaagcttggatcctctagagcggccgccctttttttttttttttttttaaaagataaagccacttgagaagaaaaaaaagatacatagccagaaacaaaccattaaacttttaatcattaagaccaattaacttgagaaacagaaaaagagtcttgaccaatcctacatttaccccatatatagctcaaaatccaacaattgcagcaaactctcacaagcaaatccaccccaacaaaagcacttaccccgatccatatatcacaacattgcagcaaccccaaagccgatcatcgcgcacaaaagagaacaacatacatgagaaggtttatgctggaccgcaaagataaacgagagttaagttgttatagcttgagatggcaatttcgggtggttatgctctgcttcataagtaacaataagcattgccggatcttccaaacatctctcaacatgcttcctcgctggacaacctctcatgctactacatttgtaatatcctctgggataaggagagcccttgatgggcttctgaccatattttcgccatgaataatcatcaggagggatatctgcaaccttgttacttatagccggtactctaatcgatctcctaacccgatgtttcctcttcttagcgcagtggcatcggctagagctcccgcattt

SEQ ID NO: 133939 - DNA, 534 bp, Arabidopsis thaliana
ctatgacctcgcatgcacgcgtacgtaagcttggatcctctagagcggccgccctttttttttttttttttttagaagaaaagagatttgagtcgatttgtcaacgaaatgaagaagccactattggtgttttacacaacttgggagaaccaactccactttttctcacatcatttagttatctcacttgtacaattttacacacttctcttgtgagttttagttacaatcaaacaaaaatcttcatctcgctataactttgaggactttaagctaggaggctccttggaaaggcattaacaaggtatcgaaaatagcattctgtacaaacgtcttcctgaatctctcaagcaattctcctccatcatttgcctgagctgcgcaatcagccgcttcctttgccattccaatacgagcataagcctcgcctctttccacaagatcagacagtttggggatgtattttagagcttccgctttctcatctgcatcaatgcatgcctccacaaatggacgaaaccccattggtgggct

SEQ ID NO: 133940 - DNA, 848 bp, Arabidopsis thaliana
ctatgaccccgcatgcacgcgtacgtaagcttggatcctctagagcggccgcccttttttttttttttttttaatctgaaaaacgctttggtcgatccatgtttatatcggtatcaatgacattacaacagaagactcagtgaaaaagctgttcttttatttgtttttgtagaaaatctgatacttttcagagacagctacaacggagctgatactaggaggacctcatttggtttcacctaattctgtaagcaaaagccgccaatgagtgcctttctcgaatttctcatggtgatcggaaagcttcaccggcgtagcgcacattgccgagttcctcttcgatacggagaagctggttgtattttgacaatcgttcacttcggcatggagcaccagttttgatctgtccgcttgctaaaccaacagagagatctgcgatgaagttatcctctgtctcgccactcctgtgactaaccatcacaccccagcctgcagcttttgagtcaagtgctgcttgaattgactcagtgactgtcccaatctggttaaccttcaagagtagagcattgcaagactgtttcttaatagcttcagctatcctcttcgggttagtgactaacaagtcatctcccacgagttggatatccacagaggattgcaatgaagcccatgagctccaatcatcctggtcaaaaggatcttcgatagagacaattgggaaatccttgatgaattctctgtagaggtcagcaagactctcggctgacagtacgtgagctccatcgtttggctgtttcttgaagttcaaatcgtatctaccatctttcatgaaaaattctgatgcagca

SEQ ID NO: 133941 - DNA, 568 bp, Arabidopsis thaliana
actatagttttagctatgacgtcgcatgcacgcgtacgtaagcttggatcctctagagcggccgccctttttttttttttttttttttttttttttttttttttttttagaaaacaaattaaaggtcttgaacccaaatttggaacagagttttgaaaattgggaatgagtctatacatatatttccggatacatctcagtttggtctaataataagtaccaaacagaaattaccaagaacaatacatattcagctattaataacatcgattagtaatatcttgattcatttcatttttaatataacgttttcccaaaacccctgatccgattcaaaaccctacttcttggtgagtctctctctcaagatcttcacacccatatacctgccaagcatcataaccgtggcttgaggatttgtcccgggacaataaccaacggtcgacatatcaatgactctaagccggtcgataccaataactttttaatccccatcgaccactctgcccacaacgcatcctccatggtaatgccaaatggttgtaactgtatgttggcaaaattcctc

SEQ ID NO: 133942 - DNA, 553 bp, Arabidopsis thaliana
acctatattagagctatgacctcgcatgcacgcgtacgtaagcttggatcctctagagcggccgcccttttttttttttttttgtcatgtaaaagtctaaattgcattgaggaccaaatcacaaaaaacagtcactaaagctaccaaaagctataaagtagtaaaagtacatataagaaaaagactaactattccgattttcgttttgatttggtggaagaagatggtcttgatgataaagggaaaacaatctcagaaacgttttgaaaacttcctctatcatacaaattccgtttcgctatagcgtcggctttgacttcttcttcacgggcagaggatcttccacaaagcccgaagcatttgctttcagctgatggcttctttagttcacatgacatcccggccttgagagcagcagcgctcgccttagcttcactgagcttcttatttaagcttatatactctctccacttaaacgtctcattagttggtgtgttggttaagcagagatttgcatggtaagcgaagataccagcgaggaggagagaaacaa

SEQ ID NO: 133943 - DNA, 590 bp, Arabidopsis thaliana
  unsure (1)..(590): unsure at all n locations
nnnnnnnnnnnnnnnnnnnnnnnnnnnnnnnnnnnnnnnnnntatactagagctatgacctcgcatgcacgcgtacgtaagcttggatcctctagagcggccccccttttttttttttttttgatcaacaccagcttattgaatttatactagaggcagaaattaaaaaccagttactacttggcaagagtccaatacattgaaatcgatccattaatcgacaattcgatgtatgaaaatgtatatatttagagcagacccttcttctgaaaactgatgatgcaatcatcaaacatctcaggtagtgacttgaaggatccaaatcccaactcatgtatcttccttgtatccatactatgtggactattgtctccttctttgttactacacttgttctcaaatgggtaattaggatacttatttctcatcaactcaatgatctcagaccaatgagcaacagaactcgaacatatgattctccctgatgctttaggctcttccatagccaatacatgtgcagcaacaacatcatttgttggttttggtccaagcaatggaccaaccacaaacgaaggattcacaacaaccca

SEQ ID NO: 133944 - DNA, 906 bp, Arabidopsis thaliana
  unsure (1)..(906): unsure at all n locations
tgatctgccnnnnnnnnnnnnnnnnnnnnnnnnnnnnnnnnnnnnnnnnnnnnnnnnnnnnnnnnnnnnnnnnnnnnnnnnnnnnnnnnnnnnnnnnnnnnnnnccttttttttttttttttttttttttttttttccttataaaaagattttcttcttcattaaaattgtttaacataacaacattttttatcaaaacaacatctaatgttacaagtcaacatttcaaacctaaagctgaatgaaatagtttcaaacaaacaaaacagaatatgaattaagatatgatcaagccctaaaaacgaagaagttaccttgaagaagaaggaaaaacaaaggtcacagttttgttgttatatacacgatcaatgaagaaaaacaagagcttttcaaactttatctgatcgtgacaaacttattggttccatgtctagcccaatgagacttcaaatcaatcgcattcccaaagctataaccttctgttgataacttctcaagaaccttcttaaacgcgccttgactcatcttcctacccgaaatcccttgcaccccgtcgcttagtactcaccgggtaatggatacaccgaaaatgttagtcgtgcaacaagcggattgccatccgccgcaaccccaccggtaacattgttgaggagttccagtacaagtgcaaaccggtacaggtaaaccagaaatgtccatactcacaccgttaatcacaagatcaacactcttcttaaccggtttcacacgctgcttctgctgctgctgctgaacattgttgttagtaacatctctctcctctttcggtttacgcatcttcttagctttcggtaccgttggtgttgcgatgctgcctctcatctttctcttcttaccagtctgctcttcacaaggagcagcaggagg

SEQ ID NO: 133945 - DNA, 588 bp, Arabidopsis thaliana
tcagctcgacacgcacacggccccccccgccggaaatattaggtacaacttacaagattatgacgtcgcacgcacgcgtacgtaagcttggatcctctagagcggtcgccctttttgttttttttttataaactgtaacttttagtattgacttacttagtaattgaaggctagtaattggagtctaaaacaattaacatacatacaggcggacacagcagaagacagaacatattggtaagtggtaacaaacacttaaacggttgatcgaagtttgaacatagagagcgagagaggagagaacacacgacaacatttatagtctgagtcctttccttcaacgaccagagagactaatctgttgatagtttttatcaacagactctttaacagcatcaaccactagctgcgtctttcgggctaatactaggcccagtacccatcaggctttgcaccattgttcttgatttctccaaccaatcgagcaaactctctcaccatacatgccttttgtggaagctctgtcttaaccgtatgctcactcgggggactaacccacgcagtcacaaggtcattgaaccaagcttt

SEQ ID NO: 133946 - DNA, 521 bp, Arabidopsis thaliana
  unsure (1)..(521): unsure at all n locations
nnnnnnnnnnnnnnnnnnnnnnnnnnnnnnnnnnnnnnnnnnnnnnnnnnnnnnnnnnnnnnnnnnnnnnnnctttttttttttttttaagaattctcttttagtaaaataatttattacatggaggaattacaatatgataatggggtaaatatgcccaaattggtaacaattgaataccagtttgaatagataaaagcatttggtaacatttaattattcatagcaaggcggcaaatcatctggtggaggcagaatctgctgatttggctctctaccattcttaacaatgaacacaacattcataccccacgtttgatgtctatccaagtgacagtgcatgaaccaaacccgggattatcagctacgaatctgatagcgatccaaccattcctaggcacgggcattgtatttttatacggtggatcgaagagattatatcttgacgacggaactttttaattatggtatagttcccgaaccctactccaccacatagaagctaaaccatggagatgcat

SEQ ID NO: 133947 - DNA, 556 bp, Arabidopsis thaliana
tccgcgcctctacgctcggcccccgcccccggaaatattaggtacaacttagaagattttgacgtcgcatgcacgcgtacgtaagcttggatcctctagagcggccgccctttgtgtttttttttttttttttttttttaggcgaaattgttcacgttaggaaacatagaatcataaagttggctcaaaaagtgaccaccgataagtggataattccattcaccaaaaaaaaagaaaagattttgtttttcttctacagagtaaaaaataagacgcggcatcaaaacagagatagccccaaaacaatttcccaaaaccccccttaaccactatcccaacatcattagacagagcaaagaggaagacccgcaactattctttgaaacctttactcaaaacattgacgacagagagagagagacgcacgagtagtgatgatggaaaagcctttaaatttatgattagagcacgagtcttgcgatcattccttgagtccagcgtgcagtgaccttgagatctttatcctgtgattcgggacactcattgaggaacttat

SEQ ID NO: 133948 - DNA, 540 bp, Arabidopsis thaliana
gcattggtgcaccgccgggggcgcgcccccccgcattattgggtacactctacaagattatgacgtcgactgcacgcgtacgtaagcttggatcctctagagcggtcgccctttgttttttttttttggaaattggaatacctatttttctttgttcgacattgagaagaaactgaagaacacttacattaacattacaaatacaaaccctaccactcccttgttgggttagtactagcagtttacttaaacaacaagaaacttcttctacattgaagggtatatggctcatatctccttaagagccttcaacacatcaagcatgttagggcgcttagctggcgtttcagcaagacagagcatagctatctgaagcagacgaagctgagagttcttcaaagccccagatactagcaggggatcaataacatccacagctttcccttgggtgatcttctgaatcgcccaaccaaccaagttccctccttcactctacttaaagtctggaccggttgggttttttcctgggacaagctccaa

SEQ ID NO: 133949 - DNA, 562 bp, Arabidopsis thaliana
ttacttgccgtatgtcgggcgccgcccgggaattatgggaacaacttagaagattatgacgtagcacgcacgcgtacgtaagcttggatcctatagagcggtcgacctttttttttttttttttaacacacaaaagaaattgatagtgtaaaataaagaaacacactgaaaaacaaaacccacatatacaatagtactgtctactcttacaagagcttattaaataggaaaaccataactaacaagtttcgaaaactccatcactcccggagttatctcataatctgtgattctagtcaattatatataatcccaaatgccttaactttcatgattttagcgtgtgattgattgcacgcccactagagaaacaacctgggtctgcctgacggaagtatcggttccgtaatggccaagttacctatggactcctccgttgtcaccggataaaattaccttggctgaccttgccgaaccaaattttcaatttttgcggatctaaacaaattaaacaggttataccggaaacctaaaaaacttcggatcaaaagtttaaaaaatt

SEQ ID NO: 133950 - DNA, 504 bp, Arabidopsis thaliana
taggtacactatagaagattatgacgtcgcacgcacgcgtacgtaagcttggatcctctagagcggtcgccctatgcgttcgtaatttttctttttttacccataatatttttttgggatcgaatgggaacttattcatcaataaactcacataacacacattaacaaaatataaatcaataaaattgatcttagagaatacaaatgttacaatattacctatcagctaaacaaagaccacaaggataagaacaaatgaacaatgttggactatgggtgttgctactgttactgtgacaggtatcacgatgaggcaaatgtcaaggaatcaaactttatgaaacttgtatttctgtcccaaattgaatcgagatattgggtcactaaacccccttttaaagaagtgtgttaaacctttaaaaacttggtttcagccctaattcatttggtttgccttccaggggggtagatttttggaaaaaaaaacctttatggccatgttac

SEQ ID NO: 133951 - DNA, 527 bp, Arabidopsis thaliana
  unsure (1)..(527): unsure at all n locations
cgatttcnnnnnnnnnnnnctatagaagagttatgacgtcgcacgcacgcgtacgtaagcttggatcctctagagcggccgccctttgttttttttttttgatgataatatacgacaatggatcagcctgaaaatgttcccaaaagatgcagaaacatccaaagtaaaaaaggataaaataaaaagacctagttggttggctccgttccgttttatcctaattttacaacagagattcataaggtttctgatccgtctgaagaagctacatccatagctcatactattaagaagattacagctaagaggcaaagaagaagaagaagaagaagaagacacctggagagatgttgcggtggtttaactagcttgtccactggcgttcttcttcttaagttcctcgttctcctgacgcagcgcatcgattcttgactggagaatgctgatcatagcctctgcactcatcatctcaagcttgaaagtttctttttcaacaaacatctggtgaacactacttttggagatca

SEQ ID NO: 133952 - DNA, 483 bp, Arabidopsis thaliana
gccttcgttaacctggattcctttaaaccggccgcccttttggttttgtgttttttaattttttgggccggaaaagactaaatggatggatgatttttgtcattggaccaccctaaaaaatgttctcaaaagatgcaagaccttccacccaaaaaaaggaggagggataaacccctcagctcaggggctcgaatcctttttatcccatgttacaacagagattcacacagttcgcaatctgtctagaggagctatgtagatgggtcatagttttaggggggttaaagctaaataaaaggcggaggggcaaataaggagtgacccggggagaggtttttagagcctttattggccattagcattgttcttcttgagttcctcgttctcctgacgcagcgcatcgatccttgactggagaatactgatcatagcttctgcactcatcatttcaagcttgaaagtttctctttcaacagacatctg

SEQ ID NO: 133953 - DNA, 587 bp, Arabidopsis thaliana
  unsure (1)..(587): unsure at all n locations
aantcccccaangggaaaancttnggnntgaaanncaaatnnaaaaacncccncnaaggnccaatttnntgacccaaaagnaattcaatggggatttnccccanaattagnactttccaaagaaattcnttttaaacggaaactggcccccccatgccttgagaggacatanccccgccttgaaggcacccgaanccctgtttgcatgacctgtgggaactcagagcaaagagtctttcttccattgtcatcaaatatcttctctaaagagatgtcttgaagagcaactaatgtagtctccagcatgtcaagtcccgcctggtttgcaaatgtgaagacgggcaaggccttcattgagcagcagattatagcatcagtgtgatgccaaagattcttaagactagattcattgccgtcactgtttgatttaagtagctcaacacccatgtagcccctgtaactctggcaaatccaacgagcaagtgtttgggcttcaggagtacccaaaggagtgcgtagaccaacttgtgagctgatatgagaaggagaaagagccaatgctactctctgcaccgatgatatgatac

SEQ ID NO: 133954 - DNA, 706 bp, Arabidopsis thaliana
  unsure (1)..(706): unsure at all n locations
nnnnnnnnnnnnnnnnnnnnnnnnnnnnnnnnnnnnnnnnnnnnnnnnnnnnnnnnnnnnnnnnnnnnnnnnnnnnnnnctttttttttttttttttatcactcttaatcaaactacaaattaagcaagcatttcttgagttttgaaacaaaacactgttttacgtgttcacagcaacatcaagaacaacaacaacaacaacatgaccgttttacaatacagccaaaaggcaaaagcttagtctgaaaatacaaaatacaataaatctcacacaaaggaccaattgatgaacacaaagcagatgcaatgagcattttcttcttcatttagtactttccaagcaactgctctctcatacgaaactggtctccccatgcttgagagacatatcccgccttgaaggcacgcgaagccctgttgcatgatctgtgggaactcagagcaaagagtctttcttccattgtcatcaaatatcttctctaaagagatgtcttgaagagcaactaatgtagtctccagcatgtcaagtcccgcctggtttgcaaatgtgaagacgggcaaggccttcattgagcagcagattatagcatcagtgtggtgccaaggtcttaggccagatcattgcggcctgttggtaagagccaacnctgngccngaactggatcacggaggttggtnggnccagggggacatgggcgttgaggga

SEQ ID NO: 133955 - DNA, 604 bp, Arabidopsis thaliana
  unsure (1)..(604): unsure at all n locations
gacactatagaagagctatgacgtcgcatgcacgcgtacnngtagcttggatcctctagagcggccgcccttttttctttttttttgtttttaatctataaattgttttatgattccaaatattaaagtcataacacaacgacgtaagcaaccaatgtataattttgtgcagtaattactaaaacaaagaacagtgccatacggtaaagccaaaaaagaccgtagaattcaacatcacaacacgaaaccacaacacaataaatggattccatcatctgattgatttaccattccctgtttttatgtacacatccttcctgcttttgattatctttcttcaatcgctttcaaagtcgtcttcatctccaaatgagaacacagatgcatcagccgccataaccttgaactcactctctgagcttgaagaagcattgaccccagccccagagggtttttctgttgcttcacccttgctcacagttactccttgccccggctggtgaggatcctttggtttccggaaatggcccttccccggcgctttaggccnnaaaggggnttcaacnggggcccttttggctnggggggttnaaaaaanccgtna

SEQ ID NO: 133956 - DNA, 516 bp, Arabidopsis thaliana
agttccaaagtcaattattaatttctaaaacgtcaattatagtaatcaagaaataaaagtttctaaaatgataatacagagttgttaatttagaaagaaaaacttgaaaaagacgggattttgtacattaataatacactgtcacattaagaccagtagattgactcataagacgtcgttcgcttcacaactctcagatcgaaatatctaaaaactttatagataaatctcaaccgtccaaagtgccatgccattaagttcctctatcactttagatatttgcttttttttcctctgtatcagaaactacgtcgttttcaacaatcgtaagtgacttctgatacgtattgcataaactcagcatcgttctcaatcccagtcataggtctccggcgccaggaactacttccagatccacgcttccgtttccttctctaccggggaaacgccgagatcttcccgtcggatttattcggggccccccgtttctcacagctaacggtttttccccatccg

SEQ ID NO: 133957 - DNA, 797 bp, Arabidopsis thaliana
  unsure (1)..(797): unsure at all n locations
nnnnnnnnnnnnnnnnnnnnnnnnnnnnnnnnnnnnnnnnnnnnnnnnnnnnnnnnnnnnnnnnnnnctttattttttttttttttttttgcaagggaaacaaatttgactatttcaaatatcattaacatatttcataattggtatactttgttcatcacagaagaaatccattggatcaacatttgttttaactctcaccaatctatcgaaattgttcttgaaatacttcactccccaaacctttgcttcctcgtactttgtcttcatattcaaccccagatacattccccaatcaatggcccctaaaattaacataagcccccccggggggattttggaacataaggggtcataaattcgtatacactctcgacccatctcaaatacttttcaggattaggcttgttcttatcttcttcttcactccaataagctaaatattgaatctcataaagattaccttctctatgtgggaatggtatttcgtaatccgcaatttcactcattttgccaccaaatggagtgagtatgatctttgcaagctgagcctccggcgcctcgaaatcgttccagatatactgaatcgcggttttaggtatcggttttttcatgaaaaccttctttttccccttgaaaagaaactttgacggttccgtttccccgttttcccaaggaaattttcccaattgggaatttcttcccttttttaataaaaccccaagaagaaaccaaggaactttcaaattcccaaaacttccatttttcttcctctacaaaatattttcccaaaatct

SEQ ID NO: 133958 - DNA, 514 bp, Arabidopsis thaliana
ggtctgatttaggcgcactatagaatagcttgacgtcgcatgcacgcgtacgtaagcttggatcctctagagcggccgcgctttttttttttttttcccaaatcaatggtctctaaaattaacatacagctctctcgtggagattttgaaacataaggagtcataaattcgtatacactctcgacccatctcaaatacttttcagtattaggcttggtcttatcttcttcttcactccaataagctaaatattggatctcataaagattaccttctctatgtgggaaatggtttttcgttatccgcaatttcactcattttgccaccaaatggagtgagtatgatctttgcaagccgagcctcgggcgcctcgaatcgtctccaaagatactgaatcgcggttttaggtatcggttcttcgatgaaatcatcttttcccttgaaagatcttgacgttcgtttccgtttcgcaagaatttccattgattctccttttataaaccagagaacagac

SEQ ID NO: 133959 - DNA, 584 bp, Arabidopsis thaliana
  unsure (1)..(584): unsure at all n locations
nnnnnnnnnnnnnnnnnnnnnnnnagctatgacgtcgcatgcacgcgtacgtaagcttggatcctctagagcggccgggcttgttttttttttttttttaatattacattgaaaattatcattatcatttcgttcttattcatagtacaatcgatgaagaactaattcacgtgaatcaatggtctaaatacttcactggaacaagtacaagctcacttttttgctcacagtaagtccaggagcttcttccatatcgatatcttcgactaccatgccttctggtaacttccaatcaaaatgatacaacatattagctaggccaaactccaccattgttgttcccatgtacagtccaggacaaattctcctaccactcccaaacgacaacaactcaaagttctgtccttttgcatcaatgttactatcattaaacctttcggggagaaacatttctggatctttccatgtatcaggatcacgcccgatagcccaaacattcacatgaagccgtgttttggccgggatcgggttgccttggtctcaattccaggattccttttctggaaagaaaaggggtggaggat

SEQ ID NO: 133960 - DNA, 531 bp, Arabidopsis thaliana
  unsure (1)..(531): unsure at all n locations
nnnnnnnnnnnnnnnnnnnnnnnnnnnnnnnnnnnnnnnnnnnnnnnnnnnnnnnnnnnnnnnnnnnnnnnnnnnnnnggcttgttttttttttttttagtacgaaatttctcttaacgaagctattaaatatccattgggagattctgatctattttagtatttctttttttgatggatagaatctgcagcggatgcacaaacttgatacctgtcgaaatagcgttaaagattgctgctaagatacgtgcaagggagagatttgctgtgtatatagtcataccgatgtggccggaagggccaccggagagtgaaacggttgaagagatactttattggacgagagagacgatgtcaatgatgtatcaaatcattggagaggcgatatgggaagttggagacaagtcgcatccgagggattatctaaaacttgcttctggcttgcaaacaagagaagagaagagagaatggggactcttgaagcagtttccgcccccccccccaaaaccgcttccctggaaatccccaaag

SEQ ID NO: 133961 - DNA, 817 bp, Arabidopsis thaliana
  unsure (1)..(817): unsure at all n locations
acnnnnnnnnnnnnnnnnnnnnnnnnnnnnnnnnnnnnnnnnnnnnnnnnnnnnnnnnnnnnnnnncttttttttttttttttttaataataattttttttgtttctttcataaattatgaataatttaaaagcaaaggaaggtgatgggcttcttttatcattgcttttgttcccattgtgtggtatgaaaaaaaggagctgattttatttgtttggtgactaagaataaaaggagtattttttgttttctaattgataattgttattgtggtgtcctttccttttaaagaccaaacaagccggaggatattctcacgtcacacaagtgcacatgaccttccttcattgttgtatcatcaaactcctttgggctgttctgtgactcataatgtcaccatatttactccattgcctgctaatttacataattatctgtgctttcataattacagaagaaggtatcaaagatttaaataataaagctccatatgtggtttttctaaggtatcactagaattgaggatgccttgggtatgaacaaatgacatatcgacaatctgggttccttgaaaggatcaatacttgttgggatgattaggttgacgtgaagaatgaggatactcaaccaaattccattcaccgatagagtttttatcctttttaacatcaggaaactccaccatgtagcttggatctcgattcggaacattataatagctactgttccacgttgttggctgagtatgagaactgttaagcaaggtgctggaacttgaggagttcaaattccacacggatttgttcggctcgtgtct

SEQ ID NO: 133962 - DNA, 517 bp, Arabidopsis thaliana
  unsure (1)..(517): unsure at all n locations
nnnntnnnnnnnnnnnnnnnnnnnnnnnnnnnnnnnnnnnnnnnnnnnnnnnnnnnnnnnnnnnnnnnnnnnnnnnnnncttttgggtttgttttgattgaatagttttttcttaatcagctacagaagccttacataaataactctgaatcgttcataagactatctctaatattctaaagctggatgcacatgctggtgaacaaccagcatacctgacggatgagcagctgaagcattgattttgcctttcctccgatcaactagactaataccagcggccgactggtgtaacggggaagacccaccggttgtagtattagagtggtttcctagatcagatgtctggggcaaggattctcctgatttatatttggcaagctccagatatcttctctgaagttcagcctttaagaggttattctcttccacctgctgcttgattggggcttctgctgcttcaacagctttgataacttgaaacaagctatcgtttttaacgtcgttttcatgggaa

SEQ ID NO: 133963 - DNA, 536 bp, Arabidopsis thaliana
  unsure (1)..(536): unsure at all n locations
ccngacaagacaaactgcaatgggtggcaagaaactgccaagctcaacaaacattcatgcctctatccgtagacagatgtagaagagaggaactgttgtgtcctctttctaaacatagaagatagctaaaatccacatcgaaaaatcacacaagacaacaaatagtaacaacagagaagataaaagttcaataagaggacgataagataagttttcctacactacttaaaccaacacagagcatcctcttcaagtctttaagccatttttaaaccacaaacactcatgaactcatcatcatcattttctcttcttcgatggcggctggcgaacatcatcatcatcttcctcatcatcgtcttcttcctcatcttcattgtcctcatcctcgtcatcattatcaccctcctcatcatcgtcatcttcatcatcgcttcctcctccaccattggtcacaggatcatcctctggatcagcttcttcttctccttcatccccttcaccccctgagaaatcttcatcattagcatcatcct

SEQ ID NO: 133964 - DNA, 673 bp, Arabidopsis thaliana
  unsure (1)..(673): unsure at all n locations
cgatttattgaggcgacctatagaatagcttgacgtcgcatgcacgcgtacgtaagcttggatcctctagagcggccgccctttgttttttttttttttttttttttttttttttaaaaacaaaagattagtttattaataaattcataatgaatatcaataaactacttacaacaaaaaagtattcctaactaagataaagatctttgacaaaaaaaaaaactaagataaagatatactataatctaaacaattatattctgttttaactaaaggtaacagaggtttttaattgtttgatgaattggacatcttcaattcttccaacccaatgcctttagctcgctctgcttcaattccacatgcttccctagcccaagatctgaaggaagtctgaatccacctatacggacacgcttcaatgaatgaacctcaagcccagcatttttcactaattccctgacttcatgatttcttccttcgggaaccactatacgcagccttgctcttgggaaatcatgcggcttgggcatcaacccaactggatctgggcaacaggggcctccttccaccattgggccttcccggaagccataagggcggtggggaatcccggaaccgggggaaaatcctcgggaacagtgaggggggaaggtctgggggancccccttg

SEQ ID NO: 133965 - DNA, 558 bp, Arabidopsis thaliana
  unsure (1)..(558): unsure at all n locations
nnnnngatttaggcgacactatagattactatgacgtcgcatgcacgcgtacgtaagcttggatcctctatagcggccgggcttgggtttttttttttttttttttttttttttttttttttttttttcaaactaaaccggcccaatgtcattttaagggttcaaatttgatagcaactacggaaccacaaaccatttacacttaaccaaacaactaattggtctttaggcgggagcaagatcctaagaaaaacaaagaaaaggtttcttaacctctgcaataatctgactgacacatttcggtacctctttagggtatcgacccaaatcaagaaactggaagggagttttacaatgaactgctacaaaatgggcagagatggcttccaaattgggaggatgacatcaacaatccctccttaacctcccacagaaactactcctgctgggtgcaaggaaatggaaaatactgaacaaggagcacagtgaatttgaaaaagcaaagctccatttaagtcgaaacgtcttagaagtggttctgctcctacagtcaaaatt

SEQ ID NO: 133966 - DNA, 788 bp, Arabidopsis thaliana
  unsure (1)..(788): unsure at all n locations
nnnnnnnnnnnnnnnnnnnnnnnnnnnnnnnnnnnnnnnnnnnnnnnnnnnnnnnnnnnnnnnnncttggggtttttttttttttttttctttcctttacaaaatatttcactagatctgaaacctctcctgtgtcaactctaaattctaatatccgctttgttaagggcttgtacaaaaaataacagaggtccacaagaaatgatccttctgcaaaaagaaaacaaagagtgggtttaaaaggggcaagagagcaaaaaaaggaaagatcccaaatcccaaaatccggatgaagcttcaaaaaatcttccatgaaagatgatatcagatgattgaagttgattctgaaaaacgcgggtactttcttctcgagcatcgatgttcccttgaagattggtagttgcacttctctcggggacctctgtaatcgatgttcagtcatctttgtgaatccaaaatttatttgtccagatagactcagtttcttcagctgctgggagaagcaagttctcaccattcagagaggaaagaagattctcaacgcacaccacaacagcccttgaaagtagccccttccctgatactctcggcttgtagctacaataggaagttctgcaactttctgaccaaatatcctaagcagcgcggcagaaacaattagggaattcaccatcaggacccacgcgtccgcccacgcgtccgcggacgcgtggnnnnnnnnnnnnnnnnnnnnnnnnnnnnnnnnnnnnnnnnnnnnnnnnnnnnnnnnnnnnnnnnnnnnnnngaag

SEQ ID NO: 133967 - DNA, 507 bp, Arabidopsis thaliana
  unsure (1)..(507): unsure at all n locations
attgtnnnnnnnnnnnnnnnnnnnnnnnnnnnnnnnnnnnnnnnnnnnnnnnnnnnnnnnnnnnnnnnnnnnnnnnnnnnctttttttttttttttaagtttaaagtcactttgtaatataagtatcatcatgtaactcaattgtcataggatttgatccaatcagtacatacaaatatctaattacaactatgagctcttgcttgtcccaactatatataacattctcagtattcatatacttgagctgcttttagtgaagcaagttcatcgcaatccactggcatccacccgattgattgtttctcgttatcgtagattatcatctgatcttgcatcgatatatcgccgatgaggtttaggttctggagacctatttctgtgccattcaagattcccaaacatacattccccttcatagaaatgattagataagcttctgggggtatctcaaacagagtttttgatctccagcctgttttgaagctaagagctagaggcttgaaa

SEQ ID NO: 133968 - DNA, 525 bp, Arabidopsis thaliana
  unsure (1)..(525): unsure at all n locations
nnnnnnnnnnnnnnnnnnnnnnnnnnnnnnnnnnnnnnnnnnnnnnnnnnnnnnnnnnnnnnnnnnnnnnnnnnnnnnnnnnnnnnnnnnnnnnnnnnnnnnnnnnnnnnnnnnnnnnnnnnnnnnnngctttaactttgcatgctacaaatctttaaatccaagagagggggttaaaaacaataatgaagagtatgaaatcaggctcccgaaattgatactttgactaggtaaaaaaaaaaaggttagagggagttgatataaatgtaatgggaatgaaacaataataatcctttatatacagagaaacaatatgtcaaataaagactccctaatacaatttgctgaagcctgaagtgacccctgagtctcccaatcgggggaacaacaccttttttttaatcaaaacctggaggggcgatgtgattttgcggaatgaaacccacacaaagggtgcgcaacaaaaggcctatgcaaaaactgacaaggctctgaccactccattggggacccaagggaaggcca

SEQ ID NO: 133969 - DNA, 527 bp, Arabidopsis thaliana
  unsure (1)..(527): unsure at all n locations
nnnnnnnnnnnnnnnnnnnnnnnnnnnnnnnnnnnnnnnnnnnnnnnnnnnnnnnnnnnnnnnnnnnnnnnnnnnnnnnnnnnnnnnnnnnnnnnnnnnnnnnnnnnnnnnnnnnnnnnnnnggaaaaattagtttataattccctacaagtattctgaaccacaaaaacacacgaaataaaaggcagagctacaaagaacaaacactaagacatatatgggtttctcctactatacataaaacacacaagtcataatcatcatcctcaaaacaagcaacgtcaagagatgaatcataatttggggagaaagacaatgcaatttctaacttcaaaaaaaaaagaaaataaaacaatacaaatcctttgaattaccaacaccattaggccttgagaggctttgtagacttggcagattttctcttgaggacaatgacccaagtaacaacttccaagagtaacgtgatgcctcctaaggtcccaatcacagcgatataagccgtcttgtaagtatgctttggattcaaa

SEQ ID NO: 133970 - DNA, 537 bp, Arabidopsis thaliana
  unsure (1)..(537): unsure at all n locations
ggtgcactatagnaagagttatgacgtcgcacgcacgcgtacgtaagcttggatcctctagagcggccgccctttgcttttttttctctttaattggaatccttgtatgtatacaatatcatccaaattttagaggaaacatgttaccttcacatatttttggacactgaaacaattgcatgtataaaactataaatgaaaaacttagcagcagcgacatttcaacatatcgatgcaggtgtagggtcttgatctatcctcgagttcaaacgctgtgggaagtgagtctagattatagtttccgcaacagacgttgtataggttcctccgaattcctctgctaaacggatgcactcgtcccggaatattcctcatgtatggaatacgtcttcgtctcacaagttcataagggctttgatttgtcaaaattaggggagctgggaaaaatcaatagaaagccccacaaaaatcaaagagatcgccaatatgacaagcagcagtatgataattgcattcttccaccaaggttttgctaca

SEQ ID NO: 133971 - DNA, 547 bp, Arabidopsis thaliana
  unsure (1)..(547): unsure at all n locations
nnnnnnnnnnnnnnnnnnnnnnnnnnnnnnnnnnnnnnnnnnnnnnnnnnnnnnnnnnnnnnnnnnnnnnnnnnctttttttttttttttattaaaaatggtaatgtggaatatataatactcgagtgttattatcttaagcaagtttagtagtaccgaaatcatatattaaagaaaaaaaggcttaaaagaaaaagaattgtgcactattcaactcatattattcgtcaaatgaaactctgtaccggagcggatagttctagttcatatgcagcttggtaaaactctgcagcttgctgtgacaagccttgcttctttgcaacgtgccctagcttcatccatgcatcatgatttctcgggtctaaccttaaggcattcatcagaaaacttttagcggttggaagtgattcatctccagatttcatcatgacctctgctatagaaacaatgctaggtacgtgatctggttcgatcgagagcgaaaggaagaaggatattaaagcctcttcatgaagtgatttagcttctagacacaaacctgtttcat

SEQ ID NO: 133972 - DNA, 510 bp, Arabidopsis thaliana
  unsure (1)..(510): unsure at all n locations
gtgnnnnnnnnnnnnnnnnnnnnnnnnnnnnnnnnnnnnnnnnnnnnnnnnnnnnnnnnnnnnnnnnnncttttttttttttttttatcggtaaagctcaaaaacttcaataaatcaaaactaaaccgtaccgaaccgttgcgaacaaatattacacatactgtattagtatcattaatcactcttgctctttgcctaaataacaatttaactgaaatgtaaaccagcccggcttgtgatttataagaaaagaatggaaatcacaaaccggtatggtcagtaaacttgcttacaacctcttgttccatttccacaagttggtggcaaaaagcttcaacgtctttcacctcttcttcaaactcaaacctaaactctctccactgatactcatctccagcttcttgttcactcggtaccttccccaacaagtggaaacctttcctatccactgataccatataagcatcccttgggtttatttcaagaaaatataaacagaaaagaatcaag

SEQ ID NO: 133973 - DNA, 586 bp, Arabidopsis thaliana
  unsure (1)..(586): unsure at all n locations
nnnnnnnnnnnnnnnnnnnnnnnnnnnnnnnnnnnnnnnnnnnnnnnnnnnnnnnnnnnnnnnnnnnnnnnggttattcctcattttaatttattttcaacatatacgaatacgattcaattaagaatatcaataacacacttcaaaacacacacaagaataagccaagtcctccaacaggattaaaataataaaaaattacattcgcatggatgtatcttcaaccacaagtaaacgaccaaaccatgccactattctcttagctgcgagtcacttgcttcggttccgcaccacgtagagtaccgatccaagcaggtggctgcatcccagtctgctcataaaccgtatcaagaaccggaggcaacatcttgtaaagtccagctatatccttcatagcattcccactaccaccaccctgttctccaccatggttccaaacactaatcttgggctgcaagtctctaaccgccatcgcattagtcttagcgatctcttgataaataccattggtaatcatcaagaagctctaggcaagatagacattntgaaaggnctaangggnntaganagcctgngctaggaaggg

SEQ ID NO: 133974 - DNA, 696 bp, Arabidopsis thaliana
  unsure (1)..(696): unsure at all n locations
ttaggtaccactatagnaagactatgacgtcgcatgcacgcgtacgtaagcttggatcctctagagcggccgccctttttttttgtgtgttttttttctgaatttacagatatatttcgatttcacaaatgaatttcaaacaataagcaatacaaacatacacaagtggtgcactaaaccctttggaaactctgcaaatttaattaagaatctatactcacttgaatcaatcacactctaagcatctataacactaccagacaccggttcttgtaaaccggaatcttctgaagaaacagtaaccagactcgagccgttatgttcttcttcattgtcgttatcatcttcttcgtgttctgatacagagctacaatccatctccttctccggtatatcgagctgtacactctctggtaactctgtattttggttcccaatcgatggcattcccaagttctctcttttaacgacgtttaacacaaatccgttactcgttctctcaggctgtagaagatcaccttcagtaactgttatgcttgaagtgcttgttccaagattgtggctattgccggttgatccgatatccgaatgagccgctatggttcggggtgngaaacggcncaggggangctggaatnggggnaaaaccntgcatgatgcgacaggctgaaancatgctttagnnngggcctaagt

SEQ ID NO: 133975 - DNA, 525 bp, Arabidopsis thaliana
  unsure (1)..(525): unsure at all n locations
nnnnnnnnnnnnnnnnnnnnnnnnnnngacgtcgaacgcacgcgtacgtaagcttggatcctctagagcggccgccctttttgttttttttttttttttttttttttttttttctatccacaacaattatatttctcaagcaatccaagaaatgagatatgaacatagtaaggttaagtttctgaacattacatatctgaccgagttcaggaaagatgctcatccttcgcggtatcgagaaccgggaactcctgaagatgctcctcaagactgcagtcactggtgcttacccggagtaccggacacatggaacgagattctctatgcgcagcttttggcaatgaattaccgaacaaagtgaatagaggtacaaggctatattgcttccttctactcataatgctatttcctctacgccttcttcgctctcggtttcatttgtttgcaggtccttgattttctcaagctgtctcaataggttcaacctttcggacccgtatgtggaaggaatcaggcctggtacat

SEQ ID NO: 133976 - DNA, 709 bp, Arabidopsis thaliana
  unsure (1)..(709): unsure at all n locations
nnnnnnnnnnnnnnnnnnnnnnnnnnnnnnnnnnnnnnnnnnnnnnnnnnnnnnnnnnnnnnnnnnnnnnnnnnnncttggggtttgggtttttttttttttttttttttttgttgtttnttttgggggcggagaacttttcatttcaaacaaaacttatgaggttacactcttttacattacagccacaactttgaaacagacaaagagaatttcccgttttcatccccaataacgaacaaaaaatcaaatgctcttcttctcaaactacaacaattgataaaaaaaacagctcaaactcgcaggctaataataacctgagcgaatttcatctctctctcctccctaacaggatggattctctctaccaatacaataacaaaaaactaccaaaaactgggattttgaagaagctccaaaattcagagaacgagggcgactttctcatgagatatcagaggagatggattcgctatcaagggctcgtaatggtctgcttcaccaccacaccaaccagtgcctttnatgaatnggaaggctggggcttcaagnacttcacttcttggtttgtgaggaggangnccacacagttcttttctctaccatccatctgatccatgggttgaccncatagggttctcgtttaccnagtggctggnncnggttgtntgtatccaacgngtgaggcctntggttatttagnnacctc

SEQ ID NO: 133977 - DNA, 500 bp, Arabidopsis thaliana
ctatgacgtcgcatgcacgcgtacgtaagcttggatccctctagagccggccgcccctttttttttttttttcaccccgcttctttcttgcctctgaaattccatgtcaagattcccttttttgcatctcaagatcttccatgtcggcttccaaatgattctttctgcatcttgaccccatccatttccctcttcaaattatcccttgaggtcatctcttctctcttcagcctatgcttttcagatatttgcaaatttctcagttcctcgttttcttcagcaccttcattttgctctctagttatgttagccctcttcttatccaaagcttcccactctttctcaaatctttccttatcttgtttcagttcttcacgttccttcaagagcagctcctcctcttgcttaactttatctatctgctgcttcagttcagactgcagcctcagaaactcgactctctcttcttttgtaatcctaagactttcatgttcttcacg

SEQ ID NO: 133978 - DNA, 503 bp, Arabidopsis thaliana
gtgacactataaaaaactatgacgtcgcatgcacgcgtacgtaagcttggatcctctagagcggccgcccttttttttttttttttgattttaaaaaagcacttataagatacgacgtggacgagcccaaatagacaaaaacccattttaatgctaattcacacagaccaaagaaacaaaatcggaggaagaaactacagacaatgctcgtaataatacacaattaaggatctctagcaaccctattgaaagtttgaaacaaactaatcacagcttcttcaagtgttcttggctttagtagcagcagcatgagatttgaaccatggaatccacaccgaagtggtcttctgatatgctctataagctccagctctggattgttgtttcaccatccgacgctcgacaaggatcgttacattgaccagacacagagtattgcccaaggcaccaatcaaagcccacccttgaccaaggttccaagcaaaattttaccaatgcccacc

SEQ ID NO: 133979 - DNA, 836 bp, Arabidopsis thaliana
  unsure (1)..(836): unsure at all n locations
ttgnnnnnnnnnnnnnnnnnnnnnnnnnnnnnnnnnnnnnnnnnnnnnnnnnnnnnnnnnnnnnnnnnnnnnnnnnnnncttttttttttttttttttcatcattatatatatgataacactttattaaatttcaatacataacataattttgtaacgatcatatctaaaataaattgtagtctctctactcccctaaaagaaccttgtcaacgaccatctgaaaatttagttccgacgaaccataaataggcttcgtcgcttcctcagccaagcgctgccactcttcggccttttgcctcattttctttcctttgtctccgtccatgagttctctaaccaactcctcaacctcctccctcctcacatctccaccgatctccatccccacttcccattcatcacaacaatatttacaatttgtttgctgttccgcaaagaacggccaacacaccattggaactccaccggagagactctccaaagtcgaattccatccactatgcgttaagaaccctccaactgccggatgagaaagaactttttcttgaggacaccaactcggttagcatccttcggttagccgtctctattagaaagtccggcggaagcattggcacatcaccggctactaaatccggcctaatcacccacaaaaaatcttttttggtcgctgctaaaccccaagcaaactccacgagttgtttcgcactcatcactgttatgctaccgaaattaacataaacgacactgtttggagacttagtatcaagccaatccaaacactccatctcctctctccacatattcgttcctatctgtccgatgtcactttcc

SEQ ID NO: 133980 - DNA, 523 bp, Arabidopsis thaliana
  unsure (1)..(523): unsure at all n locations
tgnnnnnnnnnnnnnnnnnnnnnnnnnnnnnnnnnnnnnnnnnnnnnnnnnnnnnnnnnnnnnnnnnnnnnnnnnnnnctttttttttttttttttgaagcctagaaccacggcccaatatgttttgatggccacacaaaaaaatcttgatacatatattcgtgtcccagtctgggataaacagtactgctaaagttgcatgtttcattttattcttaggaatacataagaaagttgtataaagtgaagatattaattttagatattccttgctagtccatttgataggaggatgagttggatagaaaatgatggtaccaaagagcagaactcttgaggtgtcgtttaagtccatcttgaaaatcaacgtagaccaatccgtatctatatttgtaaccaaattcccactcaaaatcatccattaatgaccatatataatatcctctcacatctgctccttgactgactgcttctagaagagcagtgagatggagttggtgatatttgatctttgcctcgtcat

SEQ ID NO: 133981 - DNA, 866 bp, Arabidopsis thaliana
  unsure (1)..(866): unsure at all n locations
nnnnnnnnnnnnnnnnnnnnnnnnnnnnnnnnnnnnnnnnnnnnnnnnnnnnnnnnnnnnnnnnnnnnnnnnncttttttttttttttttaaaaaaactgtggtttccaagtttcttacttaacaacactttaatatgttggctttgttcacaatctatcagagactatcagagtatacaaaagggaggctgctttaatttcatgagagtcgcttgaaaaatgggcgactttgactttgaatcttgactttttcatcgatgtccttgtccttgtggtggcggctgctgctgctgttgccgttgcggaccgtagccaccaggcccacgcagcctgtggtccgtaaggggggggattatagcccaacaacccctgtttggtgctgggtccatggtatagttgggttggtaagggttcccaggatcccccagcctcaggatttccatatcccaccaccataagcaacttccaccagggttcccaaacagggcccattagccataaggcactcggtttctggagttagcaatctctgctcgaagcttcctccaggtcccgagccattgcaactaatttatgctccataattttgccatgctcgtagttttccgcgtaccctttcttctcataatcaatagccgctcttgcgcgttgcagctcttgctttgtgttctcaatttctgcagttaacgttggtatctgctgcaaatctgctgtaagtctagctaaatcttgagtcatcaggtgaacctgactcgttagttcctgtctacctgaagtaaactctttgatatccgcacggatcttttgaatctcagctcgcatagcatcgacttcacgcaattccatttcggatcgcatagattta

SEQ ID NO: 133982 - DNA, 500 bp, Arabidopsis thaliana
accattgtcaaagatttgctattgccattcagattttctttagtctttcccacatttcttcttcatgcttcaaacaatacatttgagcacgaagaaaatataactaccattcaacttggatacaggcagcaacagttgtaccgacatgccccgtattctcatttttcagctaaagaagaagaccaaaaggttcaaaagacccctccctgggtttcccacatttttccttgacattgattactaggaaaagcagaggttctaagagtctcctgtgtctcatcggtaagcttccttcttggcacactaagaacaaaggcagcctgatcccaagttgcagcaactgatgtaattctgtagccattttcccatcggcgatgtataccttcactggggtatagaaaatctagttctataacctgatcagaaaaagaagccccacgagacattacaattccccatttctatccagcagttgccattgatgtaacataaaacccttc

SEQ ID NO: 133983 - DNA, 675 bp, Arabidopsis thaliana
  unsure (1)..(675): unsure at all n locations
tgcactatagatgagctatgacgtcgcatgcacgcgtacgtgagcttggatcctctagagcggccgacctttttttttttttttaatcaaagaagagagtggattaatagtctaatttgagattctcttacaataaagatagattacatcaaagagtttaggttttaagagatttaagcttttgccctcttttttttcttcttcttcatcagcaacgaaccagacctgacagagacggaagaagagggaaatagacaaattaggtgatgatctgttctaccaccacaagttcctatacacaaaatcaatttttgttgatctctctatctcacactcccatatatcctcagagaaaaagagagagagacaagacaaagagctcttcagattttccaaagacgaaaaaaacgaatcctcattcatgatattagccaatggttcagggttttgagacgcggctcagtaaccctaaccccgatcctaaacctcaagatcctgacccttcaggctgtgttgcaattccgagatcctggaggagtttctgcagctacttgctntgatgttnttttacactgtgttctatggctctgtcattgggtgtcgaatcattagactcgaacgggttacggtcctctgttagatgatccgggagtagaaaaaccggtctcatgtcga

SEQ ID NO: 133984 - DNA, 462 bp, Arabidopsis thaliana
acactatagacgagctatgacgtcgcatgcacgcgtacgtaagcttggatcctctagagcggtcgacctttttttttttttttattaattaccgtttttattattagataatcacattattccatatcctttccaatcacgaggtccatacatgtttataatccataacatattaaatacaaacatacatcaaaaggaacctttggttacaagatccccaaaatatctgaaaacccaatcgatgaaaattattcatcaccatcgaccgaagcagtacattttgttgtgttctatgatatataatatatattgataaataaaatcaatagtagtaaaaaggacaaaagggtggtgggagcaccgtgtcgggtatgtttctggttaagtttggcttaatgttgaaagtgttaaagactttgcccattccagcgaacacatccacagactcaccactcattcttt

SEQ ID NO: 133985 - DNA, 502 bp, Arabidopsis thaliana
  unsure (1)..(502): unsure at all n locations
ggtgnnnnnnnnnnnnnnnnnnnnnnnnnnnnnnnnnnnnnnnnnnnnnnnnnnnnnnnnnnnnnnnnaccttttttttttttttttctcttaactactctctgcttatttctctaactttatctcacagagtgatatccgaagcttcttttgcttggtgtcaaattgaagtgtgggaaacaaaagttggcaaactggtgaagcaatggctttacacttgaaatgaaaatacaaaaaaaaaaaaaccagaaatatttttggtagcaagttaaaaagatttgtgtagccttgccttctgatttattgaaccaatcatctccttgggaagcaagattctatggaagtgttactttgagttcttttctgtctgctccaaacgactcaactccgcagtctttcacgtacatgtttgtgaatagctcagatgcatctggtatcgggcttctccttgagctgagctacggacgcatctactgttttcctatctctttctncatgaccc

SEQ ID NO: 133986 - DNA, 545 bp, Arabidopsis thaliana
ctatagaagagctttgacgtcgcatgcacgcgtacgtaagcttggatcctctagagcggcccccctttttttttttttttcgtgtgcatgaaacttggttatatgaaactgaattttcacaacagacgtttaaatgagtgaaaaaacatattctaaattattgggtcacgagtctccttaacaaattccaaaagttttacaaaagcaagaaccatcaactctgagagtatactgagattcaaatcaggttggttgcacggttaagtgaaagttttactcgacttcagccaagtaatcatcgatttctgctggtgttagcaccctgaaaactttgtcagtaccgattttgccaatctcgatgtttttgcttgagatttctccctcgaaaccttccttcaatgtcaatattgccgtgtgaatggcatcatcaagttccatatcttctgtgtacctcttctcaagaaacgtctttgcattcgaaacattctttcccattgcagaagctttccatgagaaataagagccagatggatccacttgataca

SEQ ID NO: 133987 - DNA, 562 bp, Arabidopsis thaliana
  unsure (1)..(562): unsure at all n locations
nnnnnnnnnnnnnnnnnnnnnnnnnnnnnnattcnnnnnnnnnnnnnnnnnnnnnnnnnnnnnnnnnnnnnnnnnnnnnnnnnnnnnnnnnnnnnnnnnnnnnnnnnnnncttttttttggcaaggaaaataataacttcagcttttattactggtcaatgaagacaataattgtgaaaaaaatggcagcaacttaaagctgacaaaaacattaataaaattaccaagaagaattaagctcatctccttttttgattccttgactaaattataaattagaatgataaaatgataagagtggttagagactctgattgagacacaaagtgatatcctggaacaccttgagcctcttcttgtccactttggtttctgttcctaaaacagcagccatgatcgcatcttcaaagtctttattgtctggtaatccacactccgttgctttcttctccattgacaatctccttctcgtgcttgtgtttgtctctccctcatgatcaccaccaataccactcaacatccccatcccttggctcgacgatctcgttctcttcagcttctc

SEQ ID NO: 133988 - DNA, 554 bp, Arabidopsis thaliana
  unsure (1)..(554): unsure at all n locations
cgattaccnnnnnnnnnnnnnnnnnnnnnnnnnnnnnnnnnnnnnnnnnnnnnnnnnnnnnnnnnnnnnnnnnnnnnnnnnctttttttttttttttaaaaactgaaaaagttatggttctttttgtcaaattgtttttatttatatataacaaaaaaaaaaaagggaggaaaaaaatcatgaccggttgatttggttggattatggaatcatcttaaccatcgcctataatcgctagtagaagcaggtgatatctctccaccaccaccaagagactcagtacaacaagaagagtaatttgattgttgttccaatgcacccaattgtgagccacctatactcttgaaacttggactccttaaactctgaccatccatttgctgcggcagcggtggaactggaaacgaaagccgttttctagctgaactgatacgttctttctcgggtgttgaaggccgttgccttggtgcactctgagaccggattctagccttagcagattccgtaatcgccatgtagtttggcaatgcagcatttgtagcagtagtagtagt

SEQ ID NO: 133989 - DNA, 795 bp, Arabidopsis thaliana
  unsure (1)..(795): unsure at all n locations
nnnnnnnnnnnnnnnnnnnnnnnnnnnnnnnnnnnnnnnnnnnnnnnnnnnnnnnnnnnnnnnnnnnnnnnnnnnnnnnnnnnnnnnnnnnnnnnnnnnnnnnnnnnnnnnnnnnnnnnnnnnnnnnnnnnnnnnnnnaacggatcaacgagatcaaacttttgataaaacaacattaatcgctagaaggaatttgatttttctaggccttatcaaaaaaaacaaaagggcgcaaaaaaaaacaaaaatttttatcccatcctatgttgacgtcacaaaacaaagaaattgttataggcttagggttcggacaagtgggggcctaagcctatcttccgatcttaatccttctggaaccaaaacaacaacatcttgaaccataacctgactcaagcgcgacgcgttcgcgtgttgtacacgacaatccatttccattaacgcactcatcaatgccgacgggggatgggtcacattctctgtctgaaccctaattatggcttcttctccgacgatcttcacttgcacttccaagtcagagcctctggtttgattttgnaagggttctgggttaacttgggtactcaacggaagacggagacgtattgctgctgctggttgnctaattaactggtctccggcancttcaatttcctggatcncagnttcgagatcancgatttnggattaaagcttcccagnacgaangcgngggnaaaaggacgcttggccatcggaactttggacgaggccgaaacgnaacggggtaagtcccccgnggtncgtcncggggaaagg

SEQ ID NO: 133990 - DNA, 564 bp, Arabidopsis thaliana
  unsure (1)..(564): unsure at all n locations
ccgaattacnnnnnnnnnnnnnnnnnnnnnnnnnnnnnnnnnnnnnnnnnnnnnnnnnnnnnnnnnnnnnnnnnnnnnnnnnnnctttttttttttttttgccaagaacaatccggaactgacgttcacaaattctctttgaagtatcaactctgaaaccatatttcaaaatctgattacaatacaaaatggacaaaggtgtttaaagttttagcagtcaaaaaatgtgttttaaataagctatttttcctctgatatcttaaaacataggtgaggagcttatgccacttgtttacttgtttttcttcttcccagctgatttcttctgaccactcctcttgaattttttgaacttggtggtggcaagtgcttctgcagcgctcttgccttccattttctttgccatcttgaccacacttgacatccctctcactgcaactgcccgttgctctggtctacggctcatcatcttgcgatcgagtggccaataggcatatggttcaagtttatctttcttcttaagatcgccacttgcctttttgcttgcatactctctgcctgtgt

SEQ ID NO: 133991 - DNA, 547 bp, Arabidopsis thaliana
  unsure (1)..(547): unsure at all n locations
cgaatgcnnnnnnnnnnnnnnnnnnnnnnnnnnnnnnnnnnnnnnnnnnnnnnnnnnnnnnnnnnnnnnnnnnnnnnnnnnncttttttttttttttttttttacaaataaagttcgtttgttggctaattagacattagtttagtcaaatcacaatcacatgtatacttccatacctagaaacttagaagactgacacaaaggacaagagctaagcttcctctcacactccttacacaaacacatatgattacatggcaacaacaacatacacatttctctcactccacaaaacctgcacatcatcatcgtcttcgtgttattgttgctgttgtctctcccattgaagcaagaagctgtgtcatctacttcactgtctccacatccttcaatgctatctcttggccgaccttgagctcggtcaagattgtagttgagtgcagcaatcatattctcgttgtactttgcacgttgctgccatgcctcagcttccattgtcagctgttccattcgcacctcgagttccttgttctttcggtttatcctc

SEQ ID NO: 133992 - DNA, 549 bp, Arabidopsis thaliana
taggtgccctatagaagactatgacgtcgcatgcacgcgtacgtaagcttggatcctctagagcggcctccctttttttttttttttaatcccatcaccatttttatatacaaaacctgtgattttatctcgttggagtcttcaccaaccataagacaactaaagacactcaaaatatattttaaagaaaaaaacttgcgataataacttaactttttatctgggaaggtctctgaacaggaacaacggagtattcacattcttcctctcctcagttcccggaaatgagagtgataacgacagagaagctgccacttcggcgtcatcttcttcttcttcatctgctttctgtttttctttattcatactattattactttgttcaccagagttgctacttctgcttaagaaaggtaatagtcccattgttgcttctgttgtttcctcagctcctaatgccagctccagattcgggactgtaccgcttattaaacgtctattgttgttattctcgtcattgcctagtgggctgagattatccaccatttc

SEQ ID NO: 133993 - DNA, 625 bp, Arabidopsis thaliana
  unsure (1)..(625): unsure at all n locations
ttccnnnnnnnnnnnnnnnnnnnnnnnnnnnnnnnnnnnnnnnnnnnnnnnnnnnnnnnnnnnnnnnnnnnnnnctttttttttttttttgacacaaccctgtttttttttttttaatatgaataataataatattattcaaacagtttgctactctctccctcaacttcttgaaatccctttcttgagatctaaagagagagttttgtatgctttaaaattaagaaggttaaagaaaaaaagagaagaaaagaaaaaaagttgattaacatattgattaaaacatgagaaccagagtctctctgagagatcatcatcatcatcatcatcaattgatcagcatcactgtcttcctttctttgcacagcaaggcgggcatttatactgcttgatgctctctgctttagccggagttatcttgacgcattttccatggtaccaacgttcacaaacatcacagcaaatccagaactcctcatttgtgtaatgacctccacagcttccacagagagtgtctccatgctcgtcttcttcttcctcctcctcatagctctcttccattagtttcggtgttgagctctttgtctgcccgtctattgatctcttagtgccatttctggatttg

SEQ ID NO: 133994 - DNA, 541 bp, Arabidopsis thaliana
  unsure (1)..(541): unsure at all n locations
nnnnnnnnnnnnnnnnnnnnnnnnnnnnnnnnnnnnnnnnnnnnnnnnnnnnnnnnnnnnnnnnnnnnnnnnnctttttttttttttttaaggttgaaaagcttacttatttaatcatcaatttaaagattctgacaaacacaatagaaaaatctgtgagataagcaagtctatttaaaataatgagaagaaaggaacattgtcaaatagagttgattacttctcccagttggctggtcacttctcaacgacatttttgtcatacaaatactcaacgaattcatcaatcaggtaaggccatgctccttctgcatcgtaattcgacagcactgggtcgaccatccttgaaaattccagtagctgtgcccatgtgtccttagatatggccttgttatgacgatcctgcaagaaatcacaccagtgagttaccaaaggccactctctttctgcaaagagcaactgccacatcccaatcgctgtgtctaaggcaagagatttctgccccttctctttcgcccacccaaaagcaaagttgtatatc

SEQ ID NO: 133995 - DNA, 535 bp, Arabidopsis thaliana
  unsure (1)..(535): unsure at all n locations
nnnnnnnnnnnnnnnnnnnnnnnnnnnnnnnnnnnnnnnnnnnnnnnnnnnnnnnnnnnnnnnnnnnnnnnnnnnnnnnnnnnnnnnnnnnnnnnnnnnnnnncctcaagaacccttcattatattatatatatatatatatagatacattatatattgtttctataatatacagagatctaaaacagttagctccattatcacccatctgcttcttcattttcctttctaacgaaaaatccgtcaaaaaacaatgttatgtcatctcatgttgcagcattggggcttcccgagtctctgcagcttatcccacatgcaaatcatctggcgaggcgactgataatgagcggtgaagtagtcttctatgcaaccaaactgacagaacttgaggctgtgaaccactgccactggtctagtctcgttgaacttctccacccacattcccatgctcacatcttccatcttgaataatcttaatcgcttttgttcaaaatcatccgacatgaccttagctacatcatatgacaagatgtaa

SEQ ID NO: 133996 - DNA, 552 bp, Arabidopsis thaliana
  unsure (1)..(552): unsure at all n locations
gattacnnnnnnnnnnnnnnnnnnnnnnnnnnnnnnnnnnnnnnnnnnnnnnnnnnnnnnnnnnnnnnnnnnnnnnnnnnctttttttttttttttcttgaatcaaatattatttcgtttcacgagaattcagtacaagtgaataaatgtctgttagtattgaatgaatgcaacatgatatggctagactagagaaatgagctatgaccgcctccgagtggtattcttggaagaaacactgcagatgcctcaaggcatgaacaataactgaagccaatagctggtatgcagagtagtaatccacagtgattgaccaagacaggaaggctttttcttgcagcggctgggatcaactttaaggacctgagagctttttgtgaggatgaaatagaatgatttgaggttgagcattttgaaagctcagctagatataaccagtcgggttcaaccatgtgccgaacctccattgatgtagcagtactcactggacaatttctgcagtctgcttcattacattggtggtcacttangttccatctgatgagaaaacgg

SEQ ID NO: 133997 - DNA, 543 bp, Arabidopsis thaliana
  unsure (1)..(543): unsure at all n locations
nnnnnnnnnnnnnnnnnnnnnnnnnnnnnnnnnnnnnnnnnnnnnnnnnnnnnnnnnnnnnnnnnnnnnnnnnnnnnnnnnnnnnnnnnnnnnnnnnnnnnnnnnnnnnnnaaggggataagaaattttgaactgatcagtttaatctttcacataagcggcaaaaacaaacaaatagccaattgtaagctatacactaagtcacctttactagtagtaaattgattttcggtgggtcaggccaaacaatcataagactctctcaggcaccattattgaataagaaacttactcgatggcgtgcttatcagattgacgagacgtgtaatgtgcagaaagcaaaacgagagaaagaaaagcactcgccacaaaaattgcatcaaaccatcgatgatagaaatcaaactgaatatctccacccaacacatctgttatgattcccctgtactcatttctcaagctttttctgataagaagaattgaagacaaaaagtacattcccatgatttcagataggaaaagtacaacattgcttgaagaccc

SEQ ID NO: 133998 - DNA, 522 bp, Arabidopsis thaliana
  unsure (1)..(522): unsure at all n locations
nnnnnnnnnnnnnnnnnnnnnnnnnnnnnnnnnnnnnnnnnnnnnnnnnnnnnnnnnnnnnnnnnnnnnnnnnnnnnnnnnnnnnnnnnnnnnnnnnnnnnnnnnnnnnnnaaacggaagttaatgatgtaacttttattgaagaggggacgactctctcgggtccgtactgaaccatggagtttccaagttttaagagggttttagtatttttttttataggggcaatgagtctgattacaaaggaccctcatttccttcaatagtctatcattcttcctctcagtatagcctccgccttacgcacttctctcaccggtccaatcacaaatatcttatcaggtggaccctttgcccctccaattagaatttccgcgttgcaagcttccttaatggcgaggatcgatgctcctttccttccaatcacacgtcccatctttcctggtggaacatcaagcactgacaggatctcttcttcaagacattgatcttctgacttcaggttatctggaattggaggaa

SEQ ID NO: 133999 - DNA, 547 bp, Arabidopsis thaliana
  unsure (1)..(547): unsure at all n locations
nnnnnnnnnnnnnnnnnnnnnnnnnnnnnnnnnnnnnnnnnnnnnnnnnnnnnnnnnnnnnnnnnnnnnnnnnnnnnnnnnnnnnnnnnnnnnnnnnnnnngcacaaaagcagtaatatattataggcttgagcttgttacttcacatatttgttctgttccacgcaaaagccgtttttagattgctccccccatcctaagctagacaaaatttggcagccgagtatttttcaactttacataaagatttctctattcatagacaaaaaattggaagcatatagaaggttggttacatccaagctccccagccagggaacatatgggacaaacgatctgtgtcaattgcgtcttgtattagttgctgtgcctggccatgtatgcttctcatctcaccaccctcgtagccatcaagtttttgcttgacacgcatcaaggcacgtgttgcatccttgtttccctcgaactcctcttgtaacccttccaagttcatgccatcataatcttcagtttccttctgtctttgcaaagcctttaagggggacaa

SEQ ID NO: 134000 - DNA, 799 bp, Arabidopsis thaliana
  unsure (1)..(799): unsure at all n locations
acgacgtcgcatgcacgcgtacgtaagcttggatcctctagagcggccgccctttntttttttatttttgtttgcattatcggatcaatctttttgcacaaaaattcaagttatttatacaacttattttgcaaccaaactcgcttactgatttagcaaatagaaacaacatgcaagatattgcatccaaatgaaagaaaaaaagacgaacacacccgatgactcatggtcgacaacacgatttagaagtgatgtcatgtgatgctaagatgcgatttagatgtttgtaatgatgtgactttattttgacacaagcaaagttgtgaacattaagaaaacatagtgattgagaagcaacgagatgttggctcatcaatcttgtagtcgttcatagcataattacaagcattcttcaccacaacttagtaaaccatatttcataaaaccatcatctatcattttccatttcttcacatcttcgacattgagtagtccatcgcttccacgagaaaatctgcatcgtccttggtgaagcagagaggtggtgtgattctaaagacatttccaaagtagcctccttttccaatcaacacacccaattctttcatttgatccataatgtgcagagtctcggcggttgcaggagtcttaagcttgcgatcactcaccagctccactccaagcatcagtcctcttccccggacatccccgataatctcgtgtttttctttcagctgtgtgagtttttctttcagataggatccaaccattgcagcattttcctgaagcttctctttct

SEQ ID NO: 134001 - DNA, 537 bp, Arabidopsis thaliana
  unsure (1)..(537): unsure at all n locations
nnnnnnnnnnnnnnnnnnnnnnnnnnnnnnnnnnnnnnnnnnnnnnnnnnnnnnnnnnnnnnncttttttttttttttttttgggaagaatgatattgtgtgattggctattatcatcgtaaggctttttgtgtgtgtgaaattccaatcataattgaaacagagcttttgagttttataacacaagagaaaaacaaacgacatataatccttgaagctgtttggccccatcacatgatacagcaatttggcgaggactccagcatctctggggatatttggccaagacttgcgaaatcaaaccccggatcaatctctttaactatatcactcgggggttgtccacattcctgcatcttttgcatgatctccattatcttagatgaattgttaggttcattctcgtacactgcattgagttcttctattagtttggactgttgtgaatatcgtttgtagtcttccttgcttagactggcttcattctcttttaagccatttcggatatcttgcgccaagttccttcattggttcgtg

SEQ ID NO: 134002 - DNA, 552 bp, Arabidopsis thaliana
  unsure (1)..(552): unsure at all n locations
nnnnnnnnnnnnnnnnnnnnnnnnnnnnnnnnnnnnnnnnnnnnnnnnnnnnnnnnnnnnnnnnnnnnnnnnnncttttttttttttttttttttgatatccagtaataacatttctctgttacttttactgttttacatggactagcaaacattagtaaactaataataacctcttgaaaattgggttaaaaaaaaagtaaagaggtcagaaaagaagaaaaatatttaatgttttaactttttaacccgaaaatagaaaaattagaatttttttgtttagtgattttctttgaacagtaaagctaatcccgtgacgacctttgcttctttcttcactgactctgccacgtcatcatcatctctaccaacagacgtaatcggagacttcaatggcggcaacaagaccttctcctcgaaaatcagctcaatctccgaagaatctagctccggttcagctacgactttcgcggcagaagtaaccgtcggctttttttttcgcggagtttcgagtgtaggaagatagccacttagcgcgcatgtaatcagcttt

SEQ ID NO: 134003 - DNA, 592 bp, Arabidopsis thaliana
  unsure (1)..(592): unsure at all n locations
nnnnnnnnnnnnnnnnnnnnnnnnnnnnnnnnnnnnnnnnnnnnnnnnnnnnnnnnnnnnnnnnnnnnnnnnnnnnnnnnnnnnnnnnnnnnnnnnnnnnncccataagggttggctattatttaaaccaaagattgtaaaggttacaagagtggaaactcaactttcagactgcagacaaaaacaaaataaagataaaagcccaactaaaagaaagcccagttgaaataagaaacccttttaggaagtaattgatgtagtccaacgcaaaaccacatgtaagttatcaagcgaggttgaagcacgtgggcagaagaaacatttgttatcacggccaccgccgatttggttagtcatcgcagggaactccaaaactaccaggaaccaccaagacttcaagcttgtccgatggagcaacaccaaattcagagaatcccatcaatcttcttcatcttcgaattcgcaaaggaaaatctcccctgggtagtcatatcatgatcttcaaacgacattagcgtagaaccttaagccatcggnccccnnggnngncccgggattccggccgggacctnaaggggaacagtttcccnaa

SEQ ID NO: 134004 - DNA, 560 bp, Arabidopsis thaliana
  unsure (1)..(560): unsure at all n locations
attgtannnnnnnnnnnnnnnnnnnnnnnnnnnnnnnnnnnnnnnnnnnnnnnnnnnnnnnnnnnnnnnnnnnnnnnnncttttttttttttttttatctattaaccataggttacttgtactgagatggacaagaatactctccgagtctaacatagaagctagaaccaataataaaacaaggttaaagcaacgaccgaaattgttgcaaacacaaacttgcaatagataagagacaattacaaaattaccgctattaacttgacgcaaataggtgaccgtcaatggtttcacaacttacttggcaaattagtgacccaccataagtgactaatacttgttatttagaacatacgataattcgacggaagatccaaatatcggagacaagaacttgatcgtagcttgccacaagcgagagattggtgagtcgaagacaattccacgaagattttgggagattgatgattggtcacgttccaataaaggcatagtgacgttgaaaggaaagccttaaccatagatattctcggattggtacacacggcttctaaaaagat

SEQ ID NO: 134005 - DNA, 588 bp, Arabidopsis thaliana
  unsure (1)..(588): unsure at all n locations
gatattnnnnnnnnnnnnnnnnnnnnnnnnnnnnnnnnnnnnnnnnnnnnnnnnnnnnnnnnnnnnnnnnnnnnnnnnnnnctttttttttttttttttgaatatgaaatgtaaatcactctaattcgaatattttagttcaaagatgaagacaaaaaaaagaatgggaacttgtgagccctctttagtctctagttacacttacactaaaaacaaagtacacagtaactaccggtaaccgtaagaaatccaatccaagccacaggtagacttccccggttactacaaaaccgctttttggcaaacgttctacaaaaggcggtcatgctgaagcaacagttgtagtagagtgagagctaacggtgccaatatgggaagatggtagctaaagatgatacgtgcgtttgcgtttcctcccaatggacttgcgggtcctaacgcatccggaggaaagtttccattagtagcgtttgcgtttaagcttcccgtatatgcacatgttctatagctaggatctctagtcgtagtgatagccgtaccatcaaagtcacaagttccacctgcacttttcatcttctggtaatagtc

SEQ ID NO: 134006 - DNA, 728 bp, Arabidopsis thaliana
  unsure (1)..(728): unsure at all n locations
nnnnnnnnnnnnnnnnnnnnnnnnnnnnnnnnnnnnnnnnnnnnnnnnnnnnnnnnnnnnnnnnnnnnnnnnctatgcgttttgtcttttttttcgatctgattgattgtgggaacaaaaaccttcccaacttgtcttttattaaccatcaaatgcgagtacaacttttaatccaatccactacacatttataagagatttggcataactaagtgattcgaaaacagattaaactagaaccgtcatttaggatgttgaggagcagggatgattccccattttctacgaacttgctccaagtcttcactaaagggacgctcatagtacacacacatgaggtcagtgcattgtcttccagcacgaacagcccaaggaaggtaatgcttcaagaacattgatctttgcttctcgttgaacctcacagtacctccaatcacagagagcatacacatcggaagatacatttgctcaaactcgataactttcaaagacgactcgccgataagattcgtaggaaggccaaacagagtgggccanaagccggganttcgngngnccgtgtcggcacgtaagccaattnatccggcnccaagattttaagggggggggttatcngggggaagttctaggcccccgattngcaatgggnccaaaggtttcnggggcccacagccnatgtngnaaacngggggccaaaaagccccttnggtttattncanaattaaggg

SEQ ID NO: 134007 - DNA, 543 bp, Arabidopsis thaliana
  unsure (1)..(543): unsure at all n locations
ggtgnnnnnnnnnnnnnnnnnnnnnnnnnnnnnnnnnnnnnnnnnnnnnnnnnnnnnnnnnnnnnnnnnnctttgtgttttttttttttattagagttggtcccaatcatatcaagctacatagatccatccgatagacattctgaacttaaagccgaactaagtcataacataaaactaaaacttaagacaacactgataaacagtcttttactcagtagacaccttcacattcatcatcactattcactagtgagtctcctcttagggttttgagacaaagagaatcagctcgtgttgtttgatgaatgaaaacttgcaagtgtctccaactgctagaggatattcttgagccaaacctttccatccagcagagaagcttgatttcgtccctgacaccacgtaaaccacattccatgacttcttcatatttgggtgatgtatcttgaaaatcgttctctgcttcggcatatgaatactttgaacagatttcgggaaccacatgtagatgaggtatgattttttgataaacatggagaattc

SEQ ID NO: 134008 - DNA, 518 bp, Arabidopsis thaliana
  unsure (1)..(518): unsure at all n locations
nnnnnnnnnnnnnnnnnnnnnnnnnnnnnnnnnnnnnnnnnnnnnnnnnnnnnnnnnnnnnnnnnnnnnnnnnnnnnnnnnnnnnnnnnnnnnnnnnnnnnnnnncctagagaggtgggggtttactattttgaagtacatcgaaacatatgataaaaagtgatcaggaaacattttttggcaatggggtttaataatgctactgaggcatatttgcgtataaaagagtaaaaaagagtttaacttcaggcaaatctcggatgagttgcaagaaccggttcttctccggctcagctgaaatctccggcatggttttctcaatctgtggtaatagctttgccaattgcatccctgtggccagaccggtctgcgtttccatctcctctactaacgcaacggcacaacacttgagtgagatctctgctacattcgaaaaatcattgcttgtgagtacttcccgtgtctcggttatgagtagatgaaacttggtaacagttgcatcagaagaggaaacatca

SEQ ID NO: 134009 - DNA, 566 bp, Arabidopsis thaliana
agctgaaacaatatgttattatttctcatacagtgttctttgacaaatatgaaggagatattagaaacaattgacaaactgagaggatacaaaaaatgtaaatcagaaatccgggaagtaatagaggcgcactttggccattgttacaacagagatgatacaataattaatttaatgaggtgataaaaataagaaagtaaagaaatttcagaaagaagcctgaaaaaactgagccttttagggttattagaatcgaaaaaagcttacccggagtttgcttttgtttccgtttgctttcttgaataataaataaacgaatcatcagtttcacagcttcacagaaatgtgaacctctctctcgcagctgaggctcagcgatctaggtgcagctgttcaagccacgcatcaagaatgtcgctctcacgagtgtccactgttgtgaggattcacactcgaaccaccttgagtcaatggccttgcaccattcatgttcacaacacggtttccgttcctaggtgatgaagagtcttttaacatctgctgagcccatgaaacatctgccggac

SEQ ID NO: 134010 - DNA, 783 bp, Arabidopsis thaliana
  unsure (1)..(783): unsure at all n locations
tnnnnnnnnnnnnnnnnnnnnnnnnnnnnnnnnnnnnnnnnnnnnnnnnnnnnnnnnnnnnnnnnnnnctttttttttttttttttgaacaaataaaaaagttatatattgttaagacgaaagaaaatagtgaataattctatttcaatccaagtaataaattaagcggtaaatatcaactatggtatttacagagaagaaataaagttagaaagtaaaagaaggaaaaatgaatacgagtcagaaagtaaaatcaaggagaaatagacatcatcaatgtgtcatcgttcaaaagagactcaatgtcaataaaatcgtcttcttcacagttgactgcttcttcttctttattggttatagatgcacttgatgaagcctcattttcacggaagccctcaacaaccgttaggagtctacggtattgatcccgtgcttctgggtattgaaccatcgacttaacacgagtcagagccttctgtagcctttcctctgtttgttttcttccctctttaagataatcatactcatcttcctgtgggatcctaggacatatagctgatacaggcggttccggttccacggttttggcgactgcattgcgtttaaaccctctcaaaccattacctttgcgtctccaacgcacaaatgattttctcgagtaatcccacagaccagatgactgtttcgtatttgttccggacctgatgtcctctcacatgagcctgaattttaaacgattctttgtcggataaaaagaaactcttttctcttttttcaacccac

SEQ ID NO: 134011 - DNA, 553 bp, Arabidopsis thaliana
  unsure (1)..(553): unsure at all n locations
taggtgacactatagaagatctatgacgtcgcatgcacgcgtacgtaagcttggattcttttgaacgggcggcctttttttttttttttggtaagaccaaaggaaattcgggataattctattttaattccaggtataaatttaggcgggaaatttcaacttttggtttttccggagaggaattaaggttggaaggtaaatgaaggaaaattgattccgagtcagaaggtaaattcaaggagaaatggacttcatcaatgggtcatcgttcaaaagagactcagtgtcagtaaaatcggcttcttcacaggtgactgcttcttcttctttattgtttatagatgcacttgatgaagcctcattttcacggaagccctcaacaaccgttaggagtctacggtattgatccccgtgcttcctgggtattgaaccatcgacttaacacgagtcagagcctcctgtagcctttcccctgtttgctttcctccccctttaagataatcaacctcccccgtggatccctaggaatatactganaagggggtccggtccc

SEQ ID NO: 134012 - DNA, 526 bp, Arabidopsis thaliana
  unsure (1)..(526): unsure at all n locations
nnnnnnnnnnnnnnnnnnnnnnnnnnnnnnnnnnnnnnnnnnnnnnnnnnnnnnnnnnnnnnnnnnnnnnnnnnctttttttttttttttaagttctaaccatacatatactattcacttgtataaaataatcaagtcagtgttttcccgacataactcgtgtgacctatttatgtatgcaatttcaacaaattatcaaagtaaggatacctattcaagcgtatattaactatatatacattaacaccatttcccaattcctggagtttagagcttgagaatcaaaggcagaggtagaggtcacgagcaagaaacaaagtagacgaagaggcacgaagaacccacaaagaatagatcgaagataaacccagtgagctatactagacgagccaaccagagaccatttggctgtagaaatttccctagttgaagaaaactattggatttgacttgccaagatctaaaattgcacaaagtcaatctttttcctgaaaatgacaatttgttgctcatgaagggatgtttg

SEQ ID NO: 134013 - DNA, 518 bp, Arabidopsis thaliana
  unsure (1)..(518): unsure at all n locations
nnnnnnnnnnnnnnnnnnnnnnnnnnnnnnnnnnnnnnnnnnnnnnnnnnnnnnnnnnnnnnnnnnnnnnaccttttttttttttttacaaatgaaatgatgtttttgcagaaaacttgaaacaagaaagacaatcctccaacaatatgatataacacccgcatgactcacactaaagattcaccacatttaagtgtgactcttatggcattcatcaaactttgacagaaccgacatactcaaatgcatattccaggggaatttgatttggaagcactggaccaaaccactcgaccttcccccaaatctctccactatcacttctttcaagtgcaatcatcgcacaccacatcatcgttttatgaaagccaagaccatcaccagaagccacaaacttatcccaaaacattaccattttcccaccataatccgccaacgtaacactggcatgacgaacaaacttatgcagttctctcataccattcaacaaacttctccaagttcttgccttagtgtca

SEQ ID NO: 134014 - DNA, 747 bp, Arabidopsis thaliana
  unsure (1)..(747): unsure at all n locations
nnnnnnnnnnnnnnnnnnnnnnnnnnnnnnnnnnnnnnnnnnnnnnnnntccttttttttttgtantttggatgtaatatggatactttagctaccgtacttgaaaatctccgcaataaacatgaaattcgaataaagttaacaaaatttttacgaatcctacaccagaaacttgactgcgtctgcaacaactttctcgataataaagagacctaagagttgacatatagctcaccatccaacattgaaaattctaggatttctagacccacgggttcttcttcgctgattttgaactcaatccagagcttgttttcgatttcagtttctttgctttaccacgaatcctgttcctgggaggtttcagcttgtatagccgaaccatccaatggtgactcgtgaaaacctcttcgaaatgtgtaagcttaaaatgcttcttcccaatctctgtccgcctcacccgatcataacctttaccatccgtctctacaaacctgtagtaagagagcttgtacataaggctgttcaacattgttggagtggcctcagaatcaatccggtattgcccatctctcagataatcagcttcctttatatgtggaaagacgccgtctccaatacgaaccatccacagaaacttgctgatgtcatcactagggtaaccaataagaccaccaaagacgacaagaacctatttcacattcaaggagttgaaaatttcccacgccgccttttctggagatgaca

SEQ ID NO: 134015 - DNA, 517 bp, Arabidopsis thaliana
ttaggtgacactatagaaagactatgacgtcgcatgcacgcgtaccgtagcttggatcctctagagcgggcgccctttttttttttttttggattaacatctcaacctcatcgttgagatggatgttgattattattattaggaataactaaaaccaaagaattctttataagttataacaatgaaattacttcatgggtttttggataaagatatctcctatgcatatatatctagtatacatttggaacaggtgatgaatatcaactgaccctgtttcttagatagaagagatcttcatgttatcgatcttttcttgagtttccatgtcgatcacattctgcaatgctccttcaccagtcaagaaactcggttgatttgtcgatgcaaggagtctagcccacatcctatcagttaacttcaccgtatttgtcacttccgtcacctgagaaattgggatgtaagcatgtctactgttaactggtcctacagtgaaacctgagtacccagccattgc

SEQ ID NO: 134016 - DNA, 528 bp, Arabidopsis thaliana
  unsure (1)..(528): unsure at all n locations
nnnnnnnnnnnnnnnnnnnnnnnnnnnnnnnnnnnnnnnnnnnnnnnnnnnnnnnnnnnnnnnnnnnnnnnnnncttttttttttttttttaaaagaagcattgttcattatttatacaacaagaacgcataggtcactattaacaaatcaaatgtacgcactatcgaggggatttaagttcgtcaatatgacatttgctacgtgggccttgcgtacgaatgaattgacggtaacgatcgtatgtggtggaggagtagagagcaggtgaatctacggtcactagctccttcaatggctcgataggaacattgccctttgggttggagaaaaatgccaatgacaacctctcattttcagggttcacgatcactctgtgttctacgcttttgtatattgaattgctcagcatctgaatttggtcacccatgttaacgatgaaagcatgaggagctggttcgactgtgatccaagcgtcgtcggatccacggacctgaagactggcgacttgttcgtccggcaagagaatg

SEQ ID NO: 134017 - DNA, 512 bp, Arabidopsis thaliana
  unsure (1)..(512): unsure at all n locations
nnnnnnnnnnnnnnnnnnnnnnnnnnnnnnnnnnnnnnnnnnnnnnnnnnnnnnnnnnnnnnnnnnnnnnnacctttttttttttttttttgatcatcaccaacatcatcaacatcatcatcaaagaggaaaatgggtacataaattaaacaataaaaaccttgtctctcaaatttctcaagtaattaattaagctaaattaaaaccctagtgatcaaagaaattcaagattcatggttggccttgttcatgatgaaacgaagactgcggtggtggaggaggaggagcctgatgatgatgaagtggtgaaggcgacttaccaagagtgtgtttgttggtatgtaaccaaaccttaagaacttggctcggaacaccagtctcctgacaaaatctctgaatcacttcatcgtcttgtctctgaattctccatccaatcctctcagctaaagctaacatcctttccttttgctcagccgtaaacttaggcctatgcctgttcctaatgcctcctc

SEQ ID NO: 134018 - DNA, 524 bp, Arabidopsis thaliana
  unsure (1)..(524): unsure at all n locations
ggatgttannnnnnnnnnnnnnnnnnnnnnnnnnnnnnnnnnnnnnnnnnnnnnnnnnnnnnnnnnnnnnnnnnnnnnnnnnncttttttttttttttttgattataatcgtctacactagcctttcctcttatcataatcaatgtcataagttaaaacaaataaatcgaaaacaaagactgttacaagattacatgatgaagcaaatgtatgaaagaatcagaaaccggcaaggtatcgatatcattcggtttttcgccttcttttaccaacgcatctttgtggtggtgaacgtttgtttcttgggtttgctttgaatttgacatctttcgtctttccctgcatcttcttgtactctcttgatctcaaaactgcttccaagatgttcatgtcttcccggatctcatgtctagaaagcgacgttaagctcgggagtatctctttttggaagttcttcattcttctccctcttctcagcttgagtccaatctctttgttattatctcttgcgatgttattaagtt

SEQ ID NO: 134019 - DNA, 516 bp, Arabidopsis thaliana
  unsure (1)..(516): unsure at all n locations
nnnnnnnnnncactatagaagattatgacgtggtatgcacgcgtacgtaagcttggatcctatagagcggtcgacctttttttttttttttaaacaaagggttcttcttgaagctgattcgataatccaaaagtaaaaaaagtatttgaagttaaggtctcattattgcttttgagacgttggcattgccagagatactgaagttggaatatctttccactgttgtgtaacagttttgatctgagtgaaaaagtccactcctgctttgccatagaagttaagatctcctgcgaatgaggccttgttcccggtgaaggaaaagaacggtaatggaaccgggattggaacattaataccgatctgtcctgcttctatgtccatctggaactttcttgctgctgccccggacgacgtgaaaatcgcagcaccgttcccatacttgtttttatttattatagatatggcctcatcaaaactgtttgcctgcatgcacacaagaacagggccaaatatttc

SEQ ID NO: 134020 - DNA, 552 bp, Arabidopsis thaliana
  unsure (1)..(552): unsure at all n locations
nnnnnnnnnnnnnnnnnnnnnnnnnnnnnnnnnnnnnnnnnnnnnnnnnnnnnnnnnnnnnnnnnnnnnnncgcctttttttttttttttgattcttgaagggtggttcttttataaatatatacaatatggtcaatacaacagtaaataaccagaatgggattggccttatggatggtcttattctcaactaaacttctcattttttgaattaaagaatatgggggttctattccacacagagaacacatcactttaaaaaccccatatcttgagactcgaataaacaacaattattttaagctttctataactcgagaccactcttggaacttggacttcttcaacattcttggaactttatatacctgggaagtaacatctgggcattaatggtcaccaagaggtgctgatgatgaacggttcaagagcctagccttctttgatgccctaaccgtcttcagaggcatcatcagcttttggctctctccttcaacctctgcaaacttgaggcttagctgagaataacggtcatgcatttccctaagctct

SEQ ID NO: 134021 - DNA, 523 bp, Arabidopsis thaliana
  unsure (1)..(523): unsure at all n locations
atgtnnnnnnnnnnnnnnnnnnnnnnnnnnnnnnnnnnnnnnnnnnnnnnnnnnnnnnnnnnnnnnnnnnnnnnnnnctttttttttttttttcccgaataaaaatctaaaaaaaatacattaaacaacagattcaactacacaaaaggaagaaagtcaatctgttttttccccggtttgcttggactaagttttacaatcaataaagagggtcccaatttggagagatcattcaattgggttgccctaattaaggaaattaattagtcctttttcatcttgagatttcacaagtgggacttagccctatttgctccatctcccagcttttctttgaggctaccttctcatgccttggtacataatcctatttttttcaaatccacagaagttaaaaaaaaaaaactatacagaaaatagtcaaacaagtaaagaaaaaagtgaaaaagcaacctcaagtttcttgacaagttctttagcagaaggagcagatacaatgatatgacgagcagttggtgaaatg

SEQ ID NO: 134022 - DNA, 699 bp, Arabidopsis thaliana
  unsure (1)..(699): unsure at all n locations
aanaaaggnttttnncnagggggccantttttcggggnttnggccccnttttttcccaanccntttgggttcntggaatggccccccccccntgngggtttcccccaacntcncnatttcaaaggccccaaaacntntcggggnattggaccattggccaatagaccgggttncaggttcttccacttcctggtcccctccctttttcttccttcttcaacttcatacctttctgactggtctgcctctgttgaactggtgtctgtttcacaagcagaagccgcgacatcacatatctcaaaagctcttcacggtgagagaatgtgaaatcaaggtgagcatactcaaactcattaaacgatacatcgacctcggcatctctcatcacattgtagtgtttcttcaccatagaggaacggatcaccttgtcgttccttcccgctactaaatccacaggcacatcgatgaacttgtaagactcccctagatcaagcggttcaggagagccataaacctccatgttagctgatctgcttccataatcatacatcctgaatttaccggtgtgtttgatctgagcaagatgttgcgccacacggaaggagacagctggcatgtcgttcatgttgtagtgaggcaatcctaagactccgacccaattcgagctgtctccaccaactacataactcattagagttt

SEQ ID NO: 134023 - DNA, 737 bp, Arabidopsis thaliana
  unsure (1)..(737): unsure at all n locations
nnnnnnnnnnnnnnnnnnnnnnnnnnnnnncatgacgtcgcatgcacgcgtacgtaagcttggatcctctagagcggccgccctttttttttttttttttttttgaaacaagaatgactttttagttaaaatttgataatattacaaagtatggttacatgcagttgatcgataattcagaaccaaaaccaaacttcttttaaaaataaggaaaataaaaagaatcaccaaatggttttctccgagaggagtttctgaagcaagattacgagattttgttcgtacaggtgacaataatacgagtgatatggacccaaaaaaacctctctttcttctataagaactacaaagatttcaacttgtctcatttacctgaagaagcttttactttctcagtagaggctaaaaccaaagaaagggctgatgacaattcccaatccaagaccaatagccacaagtgacgaaacccaggttagtttctctgggatccttggaactttctctttgaaagcctcactgcaagacccaataaacggtgggtaactttccatcgctataactgggccaaccagaaacattatcaagaacgcaggccctgttaaccgtgatggggagaaccttatgtcagggcaaaaacaaattatttaagaggcattcccgggtggcaaaccccgttgaaacccaccttccaagttttgcaaaaaaggtgaggtcaagagacccccgaaaacctatca

SEQ ID NO: 134024 - DNA, 518 bp, Arabidopsis thaliana
  unsure (1)..(518): unsure at all n locations
gcaanaaaagttccgagatttggccgaaanggngaaaaaatccgggtattggccccaaaaaaacctntcttnctctaaaagnactacaaanattncaacntgccnatttncctgaagaagnttttacttcccagtagnggctaaanccaaagaaaggnctgatgacaattcccaatccaagcccaatagccacaagtgacggaaccccaagttagtttctctgtgagccttggaactttctctttcaaagcctccctgcaagacccaataaacgctgtgtaacttcccatcgctataactgtcccaaccagaaacattatcaaaaacgcagaccctgctaaccgtgatgggagagctaatgcaggcaaaacaatcatcagagcatccggtggcaacccgtgaaccactccagttgcaaatgtagcaaacccgatcttcttctttttgggcagtggtaaggcttctttctctgttgataccatgctgatgtcggtttctaaagcgacacaaggttctgg

SEQ ID NO: 134025 - DNA, 505 bp, Arabidopsis thaliana
gtgacactttagaagatttatggacgtggctgcccgcgtccgtaagctgggatcctttagagcggccgccctttttttttttttttttatgagttgacaacaattctcactaaccaacggatactgggacaagtgggacacttactaacctatgaacataacttttttccctgagaactagctattttgctaagatatcagttcagaatgtaagacaatcagaacttggtatgccaatcattacaaacaattagtccaatcttctccttctccataataatgctaaattaggagaacttctaacagatgatcacgtaaaggtactacttatctatagactcatgggtacctcatgagtaccattagcctccgggtattgccggccttgacctccatatatatcatcggtgttggttgcataacttgcagccaatccaggacttggggttggagctgcctcagcagctgcatttgcttctctagctttagtctccagatcaaccaa

SEQ ID NO: 134026 - DNA, 495 bp, Arabidopsis thaliana
atgacgtcgcatgcacgcgtacgtaagcttggatcctctagagcggtcgcccttttttttttttttttgcactagaccgaccatttcttgcaattcaattaaattacatcatcctacgatacatcaatatacacccaactgagaaacgctatattacaatttactctattttctggtttatttccctaggtgaaaccaaattacaacatattgaaaggaaaaagtcagaaaattcagacacttctcctctctgcagaaaattcaccttaggttataatggtgctgcaggtgtggagccacaactatccccacccagtgaatcgggtataatcacctgcacaaccttaggagcaggttcgggttcactggttccacctgattgaaccgaaggaaccactgatgaagttgaggctcctctcttcatttttggcttggtattttcttccatatatttcacgacctgagagatgcttccacaatgtccatgaaacaacg

SEQ ID NO: 134027 - DNA, 705 bp, Arabidopsis thaliana
ctatgacgtcgcatgcacgcgtccgtaagctgggatcctttaaagcggccgccctttttttttttttttttgagagggattttggaacagtttttttgttttatcttcaaggtacaaacatatcacgagacgatcgtgtttagtaagagaacaaacaacaacacaggacatcagatttacacatgacgtagcacaagctgaagctgatccacttctggaccaataagatccataataatgttccctacacttggaagccactggtgtgaggaagatgatccggaaactgccattgttgtggatgatgacgaccatgatttatcacagaggtatggcactatatgcttcttcatgtctgtatgagatatctgaagatgatttccagagacgttaacgaacttcacttttccagcttcatctaaggttctcaaaccaatccagtcttcagtatatagcttggtctcttgcggcggaagaatggtcttgaaagacccatcaggataatatccaaaccatgaggtttctttaggtatcaatattgtgtcatgctcaaacataataagcacaagattctccaaactcgagaacctctccttataagtcgagtttttgactggaagttcgttgtttagctttgggagaaacctacagccttccatgtaacccgctatgtcagttgggattttgagaaaaccgctaggagca

SEQ ID NO: 134028 - DNA, 623 bp, Arabidopsis thaliana
  unsure (1)..(623): unsure at all n locations
nnnnnnnnnnnnnnnnnnnnnnnnnnnnnnnnnnnnnnnnnnnnnnnnnnnnnnnnnnnnnnnnnnnnnnnnnnctatgtgttcgttattagacttactttcgtcgttttggaacagctttcttgttttatcttcaagttacaaacatatcacgagacgatcgtgtttagtaagagaacaaacaacaacacaggacatcagatttacacatgacgtagcacaagctgaagctgatccacttctggaccaatgagatccataataatgttccctacacttggaagccactggcgtgaggaagatgatccggaaactgccattgttgtggatgatgacgacgatgatttatcacagaggtatggcactatatgctgcttcatgtctgtatgagatatctgaagatgatttccagagacgttaacgaacttcacttttccagcttcatctaagggtctcaaccaatccagtcttcagtatatagcttggnccctgcggcggaagaatggncttgaaagnccatcaggtaatatccaaccatgnggtccttanggaccanatgggcatcccaantataagccagtccccacncggaccccctaaagcggttttgccggagcgtgncc

SEQ ID NO: 134029 - DNA, 531 bp, Arabidopsis thaliana
aggtgaactatagaagatctatgacgtcgcatgcacgcgtacgtaagctcggaattcggctcgaggtgaaatgttggtttctactttatgaaagatcaaaaatgtcccgagaatcaaaatagcctgagccttgtgacacataccctttggcagctggtggttttgaagggggttgagaatcgattaccttctgagctatctggtggaaatgaagaaaaggggttgctttagctcgttcactaatttgtgatacaacaaaagaaggccatagagccagaggtgctgttgtacgatgagccagctgctggacttgatccaattgcatcaactgtagttgaagatcttatacgtgactgttcacatgacagactaagatgcaatgtggaaatcctgaataattgcgtcttattttgttgttacccatcaacatagcaccattccaaagagctgtagacagtttatggtttttgtatgaaggaaggatcgttttggcaaggaatgacacattgaattcacaccctcaactaatcc

SEQ ID NO: 134030 - DNA, 762 bp, Arabidopsis thaliana
agctatgacgtcgcatgcacgcgtacgtaagcttggatcctctagagcggccgccctttttttttttttttgacccataaactgtgaatacgtgctcactcagtttggtttgatattaccgcatacatatgtgtgactccgatcataaaagttctacgtataacagttgaaacaaaagaaatcaaatttttcgtgggaggcatggcaagctcgcactctctcactcataatcggttccaaaatagcggtctccaatctcggccataccaggaacaactcggaactcgtcgtttaaaccgagctctatctctgcagtcacaatctttatccttgggaactttttgcacaccacatttactccttcaggtgcagatatcaaattgagaaatatgatgatggattcaggcacgcctttacttatgagcagtcttatcgatggcaccgccgagattcctgtcccgaggattggatccagtaaaagcacatgcctttctgaaatgtctgagggcaggttctcgaagataaactgttgaccattgtcgccttctttatgaataagaatcttcccaatattgatgcctttgcagcatgctctaacagcgttcttcatactctcaccgcttctgagaactgagacaccacacagtttcttacagaagtcctcaccccgaatacacagatcctggtggaataaccacttgtttttttttaaagggaaagtgtcctaggtcatgttcaacggacaaacgggttaatcgaacg

SEQ ID NO: 134031 - DNA, 634 bp, Arabidopsis thaliana
cacatttacagcattctcccataaaaagaagacatagagaaagttataccaaaaatatggatacaatagaagaatgaatacgaggtacacatgacgacatgtctcttcttgtcctttattccatctcattcattcatcctaccatcttcttcttattcttttttgctttttttttgcagcattccgctgattatatcatgttttaccaagaaaaacgaaatcgaaaccgaaggagaaccaattcgggaacctcttttcttctttttatctttatgattccattttctccaacttttattccttagcaacgttgtcatgtgtcccattcgaataattgaaatgtcatagtagtttggcttagacggtgtagtgttggttaagattatcatatgtcaagacccttgagcttcactaccgactcaacgtggcctttgagagtgtgcacttctcttagcctagcaacttctgcacgtttcttagcctgttcagcgatctcagagagctcggtgtaggttgccgtgtcttcgaacattgactccggcggtttaagtccatggagcgtacgttgagctagagcccattgagcctccctttctcccctaccgtagtctttcttggtcgtgaatgcagtcct

SEQ ID NO: 134032 - DNA, 476 bp, Arabidopsis thaliana
  unsure (1)..(476): unsure at all n locations
nnnnnnnnnnnnnnnnnnnnnnnnnnnnnnnnnnnnnnnnnnnnnnnnnnnnnnnnnnnnnnnnnnnnnnnnnnnnnnnnnnnnnnnnnnnnnnnnnnnnnnnnnnctcaaactatgtagctttgatagtttcacgctatagcaatgtttaatcttatacttggacaacaaggtatcgcccaaaacttgtgatacaccaaaattactaaccctagtttaaaaattccctaaagccgtctaagcgagatcaactctcgttgctttttcttgcattcccaccgaaaataacagatcagagtaagggaaaagacttgcacaatctctgtgaagctacttcaatggtggacatgtcagagaaagagatctgcaaattgttacgcctcggatcttagatcattaaagaagaaaatattagatggcagaatggtagatcactcatcatccgatggcaaagtcgggctttttgagcagctctc

SEQ ID NO: 134033 - DNA, 484 bp, Arabidopsis thaliana
  unsure (1)..(484): unsure at all n locations
nnnnnnnnnnnnnnnnnnnnnnnnnnnnnnnnnnnnnnnnnnnnnnnnnnnnnnnnnnnnnnnnnnnnnnnnncttttttttttttttttcgaaattgatattaaagaattatggcgctgttgttgggtatcaaatgtgctgagtttctacatgtatgatggatcatcaatagaaagacagcaaaaagaaatagaggaacaaatgagaaaaggtgaagagttgaaatttctgctcaaacctattccctacctacgccctttgcttgaatcttcatatgctttcttcgcccaatgcacatactgaacagatgaaacttaatacgtatgacttgttagaggtctgagagacatttcccactgatgaagtcaatcactttggtaagtgactcatcaagtttggcagtgactgcagctaagttctccaaaaattcttcagaagttggtctattgccatccacaatatcagtcacaccttttattagaa

SEQ ID NO: 134034 - DNA, 507 bp, Arabidopsis thaliana
  unsure (1)..(507): unsure at all n locations
nnnnnnnnnnnnnnnnnnnnnctcgcatgccccccttccttagcctggattcctttgaagcggccgccctttttttttttttttattaaatattcgattactcaaattgtacttataacatcaacaagagctttacaaatataaaaacttcaattgtaatggaatttgaagctataaatgtctccatagacatgagtgacttgagtgacttggaacagatccaagttcaggcaatcaaaactcgcatactcggtaacattcctatgttacaagcctacatgatatggtttggctaacgacgcatcatctcatcgggcatactcggaaggtattagtattacgatatgatcaaacctcgagctcgactgaatatagaaccatgaagaaagagctacaagctctcaactctttcgctccatcattagatcaacacactagtcccactagagatttcttcatcttcttcgataaactcgagtgattcaccataatactcatgagcatctt

SEQ ID NO: 134035 - DNA, 670 bp, Arabidopsis thaliana
  unsure (1)..(670): unsure at all n locations
nnnnnnnnnnnnnnnnnnnnnnnnnnnnnnnnnnnnnnnnnnnnnnnnnnnnnnnnnnnnnnnnnnnnnnncttttttttttttttttcgaaagtcaaaacatattattatgggtgaaatctcagttcaaaacagatattctacaggtgaaatctctcataagttaaagctacataagagtcccaaaaccccctttttttttaatatgtatctgtattaaaagcacaaagcggaaggctctaatagatcagttttttaacaatggaaactaatctctctctgtgctgcctcatttctctgctgaatgtatcaagtttcaaagccaagaaaatatctatctgtgtatgtcttcactcttcaccaaccctactcttgtggcggtgttagaacccactgttcttcagactcgttaccattaactagcacagcaccatccgtagagtcagcgtccaccacaacagcctcttcttccacattctgctgtctcccatcacgantctcttcctgnacgatcctcctcctcctcttcctctccatcttccccctcttcccaaactcggtgngaanatccccctggtcaagngngcctcttccncaattggaaaattcaaaaggatcactaaagtggatgacntgntggangnaaaaaatcccgnnggggggggggcnc

SEQ ID NO: 134036 - DNA, 865 bp, Arabidopsis thaliana
  unsure (1)..(865): unsure at all n locations
nnnnnnnnnnnnnnnnnnnnnnnnnnnnnnnnnnnnnnnnnnnnnnnnnnnnnnatatccaatgacaacttaagcttctactaagatgacaagtacaaaaaagttacaaaaagctagggccatttttaacacattaatctataagatttgagggttataagcaaggcaataaactatacgagattacatgttgagtggttgaaaaatgttgagaaaatgagaagaagcttcattttttttctatatcatgctcagaggaggtagaactgagaatagagataatccctgattttgtaatagtcttcacacaacggtccttctatcaaaatttgctgtggacccgatgctcctcccttttgacccgtcggtccaacctttcgtagagtgacatattcaccacaacgtaaagctcctccacctgcaaattctacctgaacacccttgctcgacagaaactgcttgaagtctgcgattttcagatcacctactagaacaggtttgtgtggcgaagcagcacctggcatcggtagtagagacctcatgtccctctctgtcttccctacttcggaatccacccaagctacttctgaatctcccagcttcttgaagatcacattgctcatcagcttttcagaaagttggaccttgtaagcacataaatcagaagtcacatcgaccgtttcctctatttgaggagcatacacgtgtggacagatgttgttcaagcagtgttgcttcaaatgctctgtagcctcagctatcgcgtgcaccaaaacaagttttaaaggagaaacatgcgcaatcattgacttgattgagcggccatctgaccgaccttcatagtccattttaacaagtgaacaac

SEQ ID NO: 134037 - DNA, 508 bp, Arabidopsis thaliana
  unsure (1)..(508): unsure at all n locations
nnnnnnnnnnnnnnnnnnnnnnnnnnnnnnnnnnnnnnnnnnnnnnnnnnnnnnnnnnnnnnnnnnnnnnnnnnnnnnnnnnnnnnnnnnnnnnnnnnnnnnacaaaaagattatagatatatggcgaatggtcataatcaaaattttcaatttagcaaaattcaaaactcttccaagggcccattgaataaatgatagatagcagaactggtgagaactaaaacaatgccgtacattacgtgcacatcaagtcaagttcctcataagtctgctttgagtttggagctaatttctccatcgatttgaatatctggtccatgttagacttcagatttaaactccccattaatgcaacagatgggactggcttcatcttcctctgcatcttctgctcttccttctctaacatcataagcttcctttctatatcctttacgctgccattaacattccttctgtcttccaattccatcctctggttctccacctgatggtttacgtgcatca

SEQ ID NO: 134038 - DNA, 498 bp, Arabidopsis thaliana
  unsure (1)..(498): unsure at all n locations
nnnnnnnnnnnnnnnnnnnnnnnnnnnnnnnnnnnnnnnnnnnnnnnnnnnnnnnnnnnnnnnnnnnnnnnnctttttttttttttttctgcttcttcatctttcttcttcttgggccgagcaacgtacttatgggactcctcaagctccttctccagcttctctatgaactcactcgtatgttcaagcgattgctcataccgatatttctccaaagccttatctttagagagagtatcaacaggagacatcacttctggtctcacatagtttttcccacggtacaacacaatggtgttggtaggtttgacatcaatcacaatgcccttacttaaccgagcaagctcttctgcatactcatgaacctgcccgggtttggtgcagggcttgcaaataactttaacagtctcatgctttttccaatgaaggggccaattcaaaaccacaccttcaaacacttcttgtcttccgacaaggaccaaggtctttctcttctca

SEQ ID NO: 134039 - DNA, 637 bp, Arabidopsis thaliana
  unsure (1)..(637): unsure at all n locations
aggtagcactatagaaagactatgacgtcgcatgcacgcgtacgtaagcttggatcctctagagcggccgcccttgagtcctcgacggtatcgataagcttgatatcgaattcgttttaatatttctataactaacacactcgaagtttctctgctgtcacattacatggagttttgatattgcaggcctagtgaaatatggtggctttgctttgatcaattttcatgaagtatcttcaaacactggacaggatcaagctctaccatctgcgagctccatctgttcgtgtagcaatgtaatttctcagagaaggagactgggtaagaccatctggtgcaactgtggtgttctgagttccattcttctgcttcatccttctgcgtgctatgtaacctctgacccaaggagtaacatcctcgttggtcttaatcatgatgaagaagatgatgcggtagatgataatcatgctaagaatcacactgaggttaatccattttgatcgatgcaagtcgatcttgaaagacgttctcaaggccatattcaccccggattcttgaaagcactcccttggctgtcaaacgtcaagcctctaagttatttgggcctgccctttagggcccanaggtggaggtngtc

SEQ ID NO: 134040 - DNA, 663 bp, Arabidopsis thaliana
  unsure (1)..(663): unsure at all n locations
atnctgggtagggnttgaaaatggcatgatatcgcgttcagagngcaaaatgcgccattggtttgatcatatttgagagattttagaggctagtgatgtagggcattcatgacttgtcactttatattatgttcactgctcccccttgtgattgcttacagtgtttcgttggtctaccatgggcaagtgatcagatgagaacagcacacagcaaaagcagatgagtgctgaagcagaagctaatgaagtttaattacaagcctgttccaggaagaactagtagtcattctttgaggttcttcaggtgtaacacttgtcagaactcagaactcaattttcatttccaacatgtacaaacaaagcttgtaacaattcacaacttaatcctatctgctgtaatttcggcacaatgcaaactgtaatgcaacaagatggtacttgttaataccaaagtagaaaaataaatgtagtagtgattattttagacaaatccgtggttttaatatttctataactaacacactcgaagtttctctgctgtcacattacatggagttttgatattgcaggcctagtgaaatatggtggctttgctttgatcaattttcatgaagtatcttcaaacactggacaggatcaagctctaccatctgcgagctccat

SEQ ID NO: 134041 - DNA, 655 bp, Arabidopsis thaliana
  unsure (1)..(655): unsure at all n locations
nnnnnnnnnnnnnnnnnnnnnnnnnnnnnnnnnnnnnnnnnnnnnnnnnnnnnnnnnnnnnnnnnnnnnntgcccttttttttttttttttttagagggtgaagatttcatcttgaggtttagtagtacaaccaagttttgattaaccaaaaaaaaaaaaaatcaaataccaaagctcaccttctctccctgtgaaaataaataaacaagccaattccgaaaagaatatttactttttcacttttctatgttgaaaacaattaaacaaatccatctttctcctctgggagagccttcgcttccactggagagactgtactttgttgaaaaacccctgctaactccaacttttaacagtcgtttagagaaagcaaaaggctttcaacgaaatcaacaacacacatgttaatataacaagagtcttctggttcaggctgggcaatgtgtcaaatgaaattcacccggatgagctcgacttactaccttctttctctggatcttcaatctgcgtcggtagtagattcaaaaagcttccttggtgggttgttgccccaccagatgtttcgtcttcaaagagagatttaatagacggcctttttggcttattgctcttcttcttcaactcagctatccctggtatttggtcatcatttac

SEQ ID NO: 134042 - DNA, 501 bp, Arabidopsis thaliana
  unsure (1)..(501): unsure at all n locations
nnnnnnnnnnnnnnnnnnnnnnnnnnnnnnnnnnnnnnnnnnnnnnnnnnnnnnnnnnnnnnnnnnnnnnnnnctttttttttttttttttttgaaaatgcctatcttcaggtctggtctttattatatagaaacacacaatggactttctcttactaaacagtagcaaaagctaagatgacataaagaacaactccaaagaggaacacaaagtcaataatctatctcagaacattaaacatattctcttcctctactttctaccattcagctcttccataaacttgttcacatcattataagaggaccctccttcttccacagcggctttagccatctcgcccagcttcttagcccatagccgcctttcctctgccttctcaccaccaatcacttcccttactgccttctccacttgtgctctactaatcaactttccttttttcaccaactcggtagctccaacgttcactcctattctcaacacttttgtcaatagct

SEQ ID NO: 134043 - DNA, 518 bp, Arabidopsis thaliana
  unsure (1)..(518): unsure at all n locations
nnnnnnnnnnnnnnnnnnnnnnnnnnnnnnnnnnnnnnnnnnnnnnnnnnnnnnnnnnnnnnnnnnnnnnnnnctttgggtttttttttttttttttttggatatatgtgccactatgtaaatcatttagttaacttataattgaaacaagaaatgttatgtgtgccactatgtaacttttattagtgcatatataaaggaaatagcgtttaataaatcgactgctattctaaaactagcatgataattaattatgatcactaagcttcattctaacaaatcagtttatagaggacaagaaagcttataattactccaccttcttttgtctttttgtttgcgaaagagaaatatctgatggcaaaaaagcccaagaagacctcctctctacacctttaaagtttatgcaaatttagaaacaaacaaaacggaccactatagctaattatcttatatagataagatatgtagaaggaggggatatacatatgtataataacaatcttgatatataactt

SEQ ID NO: 134044 - DNA, 393 bp, Arabidopsis thaliana
tagaagagctttgacgtcgcatgcacgcgtacgtaagcttggatcctctagagcggccgctttttttgtttttttttttttttttttttaggcaaattcatattttttgggcaatattatatcagaattggtctattgcttatcttgttttctcaagaaacttcacatctcacattgcataatcaaggccattttaccaaaataccatgagtcaaagaccatgctcctaatctgtttggttaagtctctaaggccaaatcttcctctaatcattaagctctacaactgctacatcattcttaaggatctgtgaaatgtaatcttttactttctcgctaacttgaggatctagcgctctctctgcaagatcgtaaaacaaagtactaccctcag

SEQ ID NO: 134045 - DNA, 642 bp, Arabidopsis thaliana
  unsure (1)..(642): unsure at all n locations
nnnnnnnnnnnnnnnnnnnnnnnnnnnnnnnnnnnnnnnnnnnnnnnnnnnnnnnnnnnnnnnnnnnnnnnnnnnnnnnnnnnnnnnnnnaaccgccgaagaccagttgcttgctactaagtaattatatgtatacatactttgaatctggtgttaaaaaaaattcacatgaagaagtatggttctgtttgtattcactaaaaagtaaacaaactactctccttgatctcatatatggagaaagcaacagacaaagcacaagaagacacggtaaccaacttataagatgagggaagctctcactcaatctgcgtctccaagaccatcacttccatcgcctctctttgtaatttctgtgaactgagagtttggtttcttcttctgtgatgatgccacctctgcgtttctcctcagaacagctccaggtgatggatatggtcgttgttgaaacagaggacccgaagcagttgtatcagcggctcgcggttgtactcctttcagtccaacaacccagcctccccgtggagcatctgagtaagagctcgggnccatnggatccaatcatcatcttcggntgagacgctttttgccaatacttttcanggnggttgaacgggcccgatcggaccttngcaaaacccc

SEQ ID NO: 134046 - DNA, 701 bp, Arabidopsis thaliana
  unsure (1)..(701): unsure at all n locations
ttgtnnnnnnnnnnnnnnnnnnnnnnnnnnnnnnnnnnnnnnnnnnnnnnnnnnnnnnnnnnnnnnnnnnnnnnnnnnctttttttttttttttgtggttaagactttttatttggtgaaggagtaaaatgtgtgtttggccaaatgagtaaatctctatttgggaagataacaatgatttcagtatctcagccaatccaaatgagtggatgttttgaaacagtttgctattcgcgggagaatttcacagcttcaatcacagcagagaagtcgagatctcctagtcccaagcttctcgccttcttaaaagcctcgtttgcagccgcggctacaggcatggaaaccgcgttttcatcgccaagagcaagagctagcctcatgtctttctgctgatgtttcaatggaaatgctggtgggtaactactcttgttcattgaaggtcctttccccttgaacatcgggttagtcattgctcccagatccagaatatccaaaagagtgtcagagctaagtccactcttgtcagccaatacaagcccctcagagaatgcattcatcatgcttcccattatcatgttcactattagcttcattttagctccgtttccaacttgtcccagtaaaacgatctcttccccaagacatcaaaagctgggattgattcctcaaagagtgccttgtcaccagcagcaaggataatg

SEQ ID NO: 134047 - DNA, 667 bp, Arabidopsis thaliana
  unsure (1)..(667): unsure at all n locations
nnnnnnnnnnnnnnnnnnnnnnnnnnnnnnnnnnnncaagctaannnnnnnnnnnnnnnnnnnnnctttttttttttttttttttgtcaattatataccgacattttccaatagactcatcaaaaatacaacaagataatatcttttaaaaccatctagcgtacatcaagtatttttggcgcgcgatgatctttctttctatgatgcaatacaactgtaacaatgtttatcatccaaatctagttaaataattaagagtaaacagctacaaaaatggctcttctttttcttctccatatgcattttgtctatacctaaaaatattattcatttcatttttctcctcttcttcagttacatttgttgctgagagtcacagtattgtggatacttacaactgcaaggatgatttctcaccttccgtaatgtgaaagatacccttctagaacttcttctgatcactttatccttcaccttgtcaatcttgtgatgtggaatgtagtgattccaagcatatcgtgcttcaccggataataagagcatagaccgaggaggaagatataaggcctttttgatgcaagaggagtcacccgacttctcagcatcggtagttgaggctttccatgtggaaacagagtatcttctgaattccataatacaaggacca

SEQ ID NO: 134048 - DNA, 844 bp, Arabidopsis thaliana
  unsure (1)..(844): unsure at all n locations
ctttaaatacttgacgtcccttggcacccttccgtaacctgggttcctctagagcggccgccctttttttttttttttttttttttttgtcctttgcttattttcattacaattcattgactttttatttggctgtcactttggcatttgcttgttttgattacaaaccaataaaaatagttaaacatgaaacatatgaaattgatgcaaaagatggaaagataaaataagtcaattcacttagcccatccataagacacacctgatgcatttcccttcaagaagtagctggaatgcgtcgttgatctcctcgaatttcatctcatgtgtcacaaacttatccaattcaagttcattgctcaagtagcgtttaagaagaattggaatgtgtgttttagcctttaaacctccaaacaacgaacccatcagaatcttcccatggtgaagaacatcaaacgaatctaaacatatttgtgaacccggcttgtccacccctaaagttattgtctttccccatccctgtctacagcaagcataagcttcttgaaccaaagaactacttccaacacattcgaagcaatagtccgctcccccatcagtcatctcattgatcacctcgctaacacggtttttctcacatgtcatagagtttacaaactcggtaactccaaatttctggccaacttggaatttggtagggtttatatccacaccaatgattctagaggcaccacaaagtctcgcaccctctgcaacctagaaacattccggacgcgtggnnnnnnnnnnnnnnnnnnnnnnnnnnnnnnnnnnnnnnnnnnnnnnnnnnnnnnnnnnnnnnnnn

SEQ ID NO: 134049 - DNA, 692 bp, Arabidopsis thaliana
aagagctatgacgtcgcatgcccccgtacgtaagcttggatcctctagagcggcccgccctttttgtttttttttttttttttttttacatacaacaactaatgccccatttttatttaatcaaccgtaaaaagaatcaccgtattattattacttactgggtttttctttgagttacacacccaaaccttcttcaacaccttttgctagtctcaactagaatctggtcttttcctcatcatttgtctcagtatagaaagctcgcccgtctcagcagcttttccctccactttgctcacattgaatctttcactcttttaagctcagctttccatgggcttcccgtgtttgccggtttccacttttcttctccatttgcactccttagaatctgcaactccatctctttatccattaaactccctctcacttccatcaaatccgattctagcttcttcaaatcgcccgtagattcgtcttctttcaccttctccattaactctttgcgcaacccttcgatttcatctttggttctgttcaattcttccgttaactctgcttctctctgtgaatatcttgatttaaccgcctctgtttgttcgtatgcgcttcttatctgcaatgtgctctgtatatactcttcttgatacccttgctctgctgcttcaactgcagattcaattgtgtatctc

SEQ ID NO: 134050 - DNA, 539 bp, Arabidopsis thaliana
  unsure (1)..(539): unsure at all n locations
tannnnnnnnnnnnnnnnnnnnnnnnnnnnnnnnnnnnnnnnnnnnnnnnnnnnnnnnnnnnnnnnnnnnnnnnnnctttttttttttttttttcaaacaacatttcacaatacaaatttcatcaacaaatgtggcaacgtttcaacaaaaaaattaaacttagacaaatcgaaattttataaatttacatacaacaataatgccatttttattaaatcaagtaaaaagaatcagtattattattacttatggtttttcttgagtaacacaccaaacttcttcaacattttgctagtctcaatagaatctgttctttcctcatcattgttcagtatagaaagctgccgtctcagcagctttcctccattgctcacattgaatcttcactcttttaagctcagcttccatggcttccgtgtttgcggtttccactttcttctccattgcactccttagaatctgcaactccatctctttatccattaaactccctctcacttccatcaaatccgattctagcttcttcaaatcgcccgta

SEQ ID NO: 134051 - DNA, 594 bp, Arabidopsis thaliana
  unsure (1)..(594): unsure at all n locations
nnnnnnnnnnnnnnggccgccctttttttttttttttttttttttacagggtttccttttctctatcacattatcaaaatcccaaaatggttcctcaaaaactctgatttgccatatccaattattcttcatgacctttcccaataaaagagagtaataattacagagagatctaatgtttatcctatatgagaaaaagtacctgtgtgtgtttcacagtttcatcatacatcatcatgctcagagtgttttggtgcggtcatatgtagataggtttaatatcatttggtccaaaacttgctgagcatgttggacacttcttttgtcgagttcctgtgagcttttgcacacatgggttgcagaacaaatggtagcacttcgtaatcaccacctcttttgggcgatcgttgcaggccttacacttcagaatttctttaaattcactgagttcttgtcggagcttttgaatggccgatgatccttctatgagagaccgaagacgagaaactttctttttggctatttccatttcctcctctatccttctcctattgaacctttcaatctccagtttcagttctaatgccccataat

SEQ ID NO: 134052 - DNA, 478 bp, Arabidopsis thaliana
actatgacgtaccatgcacgcgtacgtaagcttggatcctctagagcggccgcgcttttttttttttattttcaaaattaacagatatataatcatttacttttattgtaaacgtggaaatacaaaaataaacaaagatgtaatcgtttactgaacaataggatcaagagaggataagagagcagataatcttttacaataagattgagtcaaatttcatctaatagaccaaaatacacctccatccccaattcctcttctactactttgatttcttttcctttctaaacaaaaagattttaacgtttcaattcgttgtgtcttcctagtttagtaagacttcgtactgtacattggttacgagcctaaacaacagcgggttagatattcttttagtgccgctttatgtacagtaatctaataacaaaagcaaatggttcttttaccttctgttgctacttctggtgctgtaatttag

SEQ ID NO: 134053 - DNA, 478 bp, Arabidopsis thaliana
tttaggacaactatagaattactatgacgtaccatgcacgcgtacgtaagcttggatcctctagagcggccgccctttttttttttttttctttgtaacatatagctttactcattttcagggggcatactatatggataagctgcatgatcataaggttacacatttatgataaaagtatactgacgtcacacacaaaagatagataaacctatatatactgatcatggtaagtccttatttatggagtttaattatagaaaaagagaataacttctctgaaaattcataattttcttatgatcaaaagggtaatgttgaactgaaattaggaggctgtgttccaacgctttctcttaaaatcctttccatctctgctgcactatgaatattccctcccctgaaatatatcccgttggctcaatatccaaagaattaaggtcgtaacatgcacttgccgctgagagtttcatggaca

SEQ ID NO: 134054 - DNA, 451 bp, Arabidopsis thaliana
  unsure (1)..(451): unsure at all n locations
tactatgacgtcgcatgcacgcgtacctaagcctgggtcctctagagcgggcgcccttncttttttttatttttttttttttaaccttgagactgtaaatatcattaaccgtggtatcacactgggagttaatttcctgggggagttcattccccaaacgccaaaagagacttcatgggggttggaagacttgttggtttagtccagagaaccccaatggacaaaaggactccaccacctcgtttttgtttaccttagtctggtccaaaattagacagtattgccaaagaccaaaccattcccttacccggacgaaagccaggggttatacttatactactctacgtttcgagatttggaacctggattagtgaaagaaaaagataaacctgggggcttcatcttgcaagcgttttttacaggaacaatggcaccggtttggctacaaagg

SEQ ID NO: 134055 - DNA, 774 bp, Arabidopsis thaliana
  unsure (1)..(774): unsure at all n locations
agcgtggaacaatttaatattgttcacatcaagaaatatctgaacaacgatacatggtgattacagtttgctccattttggctgtgttttttccgttttttttgtttgggtgacgttttcggtatgttttttattacattacaatgtcacagtccaagcttcttaggcctgaggaaagtggtgccctttttcaagccagggcctgaaatctgttgctgctgctttgcccttttttttctctctctctctttgcttctcagctctgactccacctgatctcttctcagtttctccatctcttcctccattcctgatttctcttccttctgcttttttttatgctccaacatcgatgtatccgagtccttgaccgagaagaacataggccctaactcagccagccaatgcggctcaaccgatgtcgcacactgcatgtactcctttgtggtcaagatcagttcatggtacaccacatagtccggtgtgtatcccagaccgtacagtgcactgctagggtgcaaatggcaaggcatcccggttctgcagttcacatactccccaacaccttttaatctagctgagttgtggaaatacgctgaacagatggnttttctcacaatatnccaatccggtccaaacgacctggggtcaattttcagtggcttggggaatccanaagtggggtnttaccccnaaaggttttcaaaactttcnttgagggaagggcatggacaagnccccaaagnangccttccangggnaagnaanngggag

SEQ ID NO: 134056 - DNA, 577 bp, Arabidopsis thaliana
tactatgacgtaccatgcacgcgtacgtaagcttggatcctctagagcggccgcccttttttgtcttttttttagtaatagcaaatttataacgatacaaaccacgtggaagtaattaaaataagtacttaaccacaaattacaattaaccggtaaaagaaaacaaacagtttcctaaagcaagaacataaattgttcacttggtcatatcatctgataacgcatcaaatgatgaaacgccaaacgcatattcatcagacgccagacgcaaattctctagcaaagttttaaacgaagaactttgtatagcatcatgagcaatcagccttggaaactcaatttgttgttttctcagtagactgactgctcgtgatgttatatcatttttctctaacgctggaattccacgtggcgtaatttcattggctcaatggaaaccggcggagccaagtgctggagcccaatagtccgcgccgttgtcgctgcctacttggagtgtgcatgagattgggacaagacataaacctcgaacttctcagatctttcttaggctcttcacttgcattttgattgtccg

SEQ ID NO: 134057 - DNA, 701 bp, Arabidopsis thaliana
  unsure (1)..(701): unsure at all n locations
nnnnnnnnnnnnnnnnnnnnnnnnnnnnnnnnnnnnnnnnnnnnnnnnnnnnnnnnnnnnnnnnnnctttttttttttttttttttacttaaatgttaaatttccatttgatctccgtagggaagaaacacaaataggatccgatcaaaaggacaatccaagagccaaaatggagaaagcagcgtctcttagttgtagcaaaggatacaagccataagtattacaaaatcaaggatattttctgtaactggaacagaacatttgatgtggttacatcatgtcttaaccggcctcacaagccccaaaccagatccactacccaaatgcttgtactccttagcctcaagatgatcgtcgtgctcagcgaaacccgtgcctcctttctttaacccaaccaagttcctatccttgccaggtttgtcacacacatgacagactttgtcgacgggcataaacttctcagcacacttcttgcagaaaacatgtccgcatgagcttagtgccacgagggacattgtgttggtgagagtgactttgcagctcgggcagatgtaggatttatgataagagcttgaagatgctgattttgtcttggtctcttcctctttgctgttgtcttctgtgaaacgaatcgcaaagaagttcttaagcttgagcttgtctttgccctctggacagactgtgtgagtttctggagcatt

SEQ ID NO: 134058 - DNA, 519 bp, Arabidopsis thaliana
  unsure (1)..(519): unsure at all n locations
nnnnnnnnnnnnnnnnnnnnnnnnngacgtcgcatgcacgcgtacgtaagcttggatcctctagagcggccgccctttttgtttttttttgcataatggtcatttgatgatctcatattcccgttgatatttaatatttgggtcaaagcataagaaacatctgaaattataaaggaattcccacatataaaaagtatccattcaagaacacgcatataaacgaaagaccaacacaagtttactattttctttctttactaacctccaaaaaacggtgtctttctctggcgatcctcaagaagtggtgattgcctatccgaaggcattaattctttcctcggagactccgcagttactccattgctctgaacacttgtgataataggttcagggccacctaactgctgtaatgtagacaatgaatggctctgaggatccctaaactgtatctggctctgcctgtttgatataaaatcgctcatctggttgttcgcatcaccatttatatttgccttaact

SEQ ID NO: 134059 - DNA, 521 bp, Arabidopsis thaliana
  unsure (1)..(521): unsure at all n locations
cgattgtnnnnnnnnnnnnnnnnnnnnnnnnnnnnnnnnnnnnnnnnnnnnnnnnnnnnnnnnnnnnnnnnnnnnnnnnnnnctttttttttttttttatcatcatatatacatacaactacaaatctacaatcatcctcctcttcatttcaaaatcaattccacatcaagatgttttggtacccttaaaatagacatatgtagaataagttaccaatctgtgtatatgttaactatattggaatccgacctctatgcccctaattaaacccatatgtatatatatacacacaataccacagcccgtaaacgcttaacgtgagaatggtggtggttgaggaacaaaagattgaatagggtcatgaagggtttggccccccgcgcacccctctcgggccgcttcacacatcatattacttgttgctaagttgcatccatcttctttgaacacaaaaccagaaccgttgcattgtttctgaaacgagaaactacanagttcaacttcaattttcccctgcatc

SEQ ID NO: 134060 - DNA, 538 bp, Arabidopsis thaliana
  unsure (1)..(538): unsure at all n locations
nnnnnnnnnnnnnnnnnnnnnnnnnnnnnnnnnnnnnnnnnnnnnnnnnnnnnnnnnnnnnnnnnnnnnnnnnnnnnnnnnnnnnnnnnnnnnnnnnnnatgggcacaattcctttacttatatataagtacatgtcttcatttaaaacctctacagataactgcgttcagtttattgttggaacagaaagtaggctgaacatacacacaacaattaacatatatctatacggtataaagtgaggaagacgaacacttaggcagcataagtttgcttgagatactcaacaatttctgcaccctcaaacatcgcgactccagtgtttggatcttccaggtaaggcacctgaaagtgaccagctttctcaagcaatacctgccgtttggggctaccacgagcacaactgcgctgaatgtgtggtaactccagttctacaagaacttcgcgtacaagcttacaaaacggagaaccctcatatgcccagaattcgagtggcttaggtggtagtttcgctggtgtgtacaagttaccctttcc

SEQ ID NO: 134061 - DNA, 529 bp, Arabidopsis thaliana
ctataaaagactatgacgtcgcatgcacgcgtacgtaagcttggatcctctagagcggccgctttttttgttttttttttttttttttttttcgaacacttgtttatgttattaatgtgcgtgcgaattaaaccccaaacaaatcatgtaatggtcaataactcaatatgatgtaactgatgactctccctttccaaaagtttgatttagattcatcatgaaatagtaatgacaggtcttttgcattcgacttatttagctttgcctttgccttttcctttgcctggacctttcttagcgtctagcttagcttgaatcctagcagctgcagcagcttttgcttcttctctctttttcttatcatcctctttcgcagctgcagcaatctctctctgcttcttcagatcttctagcctggctctctcttcagaaacacttccaacactagcacctttcctcggtctacaagcaaccaattccacctcgaaaatcaaagttgcatcaggtgggatgtcgggaggagacccgg

SEQ ID NO: 134062 - DNA, 515 bp, Arabidopsis thaliana
  unsure (1)..(515): unsure at all n locations
tgacgtcgcatgcacgcgtccgtaagctgggatcctctaaagcggccgctntttttttttttttttttttttttttttggggaggagaaaggcatctacatttctagttaattgggggtcagaggataaacctgataagccaggtcttttaaacatagaaacaccataaccattactgaagaattgtgcctacacattgttgtttgcttgacttcaaagcttctgcatccatgcgctcgaggatatgacgagcttcttcctctgtggcaggaactacatttcgaagtttaaacccattgtttctggcctttgcctctggccttacagtgaacttgaagtagaatgtatttgaaacctcactggagcgaatctctggacttgtaacatgagcaacaacttcgatattgatgagcggacaatcctgtttatccagttgagtgtaaagaacacaggatttgaaacgtaagaaatccccgacgtccaccggtcttaggaaatcgacgtgatcaacttct

SEQ ID NO: 134063 - DNA, 535 bp, Arabidopsis thaliana
  unsure (1)..(535): unsure at all n locations
nnnnnnnnnnnnnnnnnnnnnnnnnnnnnnnnnnnnnnnnnnnnnnnnnnnnnnnnnnnnnnnnnnnnnnnnnnnnnnnnnnnnnnnnnnnnnnnnnnnnnnctcaaccaacattgcatatgacattacatgattacaataaagtgatataaaaagcagtcccatattgcttggctgccaaaaaaaaaaaaagtgtctccaaacattttgctgcttaataaatcactgaattatatatgcatgtaataatgtattaacttacaaatttataaaatcaaatctagacattcttattgcttggctctgatccgaagaacaacaactcggaagccatctcacgtgttctgcacgtgacaaccaatggttcagccttaggcaaactaagtcctggaccttcagtcatatcaacctgacctcctgagccgctttcccactcaaagcactgaatcatcgaacccaataataacccaacaacccggttagccaaactcaacccaggacaagcccgtcttcctaacccaaacggcatcatttt

SEQ ID NO: 134064 - DNA, 536 bp, Arabidopsis thaliana
  unsure (1)..(536): unsure at all n locations
nnnnnnnnnnnnnnnnnnnnnnnnnnnnnnnnnnnnnnnnnnnnnnnnnnnnnnnnnnnnnnnnnnnnnnnnnnnnnnnnnnnnnnnnnnnnnnnnnnnnngggggaacaaatgctggttgaatgtaacaacacctttcatggtttatgtctttttatcttctctttagcatacgaaagcatatatatgaacaacaaacctatcaaagaatttagtcgagatccgattggtttgatgagatctgcatcaaccgagcttaacaggaactacagcaggaactttgggtgaagagggatcaagtgtgatgatctcctttcttccttctcctccattctcaactttctctttaaccgcctttgtcactgcgccaaacgcgtttgaaaaccacgaagctccacttgatacataagggtttgccattaaagccgttcttgcactgattgctgtctcttcagcagctgctaaagcagatttcgttatctccctcacctgatatcgctcatcgatatctctcaacttctcattaaccacagttg

SEQ ID NO: 134065 - DNA, 535 bp, Arabidopsis thaliana
  unsure (1)..(535): unsure at all n locations
nnnnnnnnnnnnnnnnnnnnnnnnnnnnnnacgcacgcgtacgtaagcttggatcctctagagcggtcccccttttggtttgttttttcaatatattaagttcttttcttaatgaagtggaaacatttaacaactgcagaatacagttagagtaacaagccaacatttggttccaaagatttgtgtttgaaataaagaataacttgagttttgtgtctggaaaatatgaataggatcaggtggaagaagagacaagagacatgaactcttgatctgattccaaagcttccataaactctggaagtagacatacttccaaatctatacttgctcctccttgtcttcctggataagctgataccttcccgtcatacttaccgccataaccgcttctaaccgccaccgctttccccatcccaaactcgcttccgtacttgttaaaccttggagaacttcccatgggaactatgttcaaattggaaaggccatttgcttgccaccggaaaggaaacttcaacatttgaactttttccga

SEQ ID NO: 134066 - DNA, 531 bp, Arabidopsis thaliana
tagaagattatgacgtcgaacgcacgcgtacgtaagcttggatcctctagagcgtccgccctttttttttttttttttttttttttttttttttgggagagagaatgttccaagtctcatattttatacatattgcattgggcttatagtcagagcttgtccctcacaaacattccattactgttttctctaccaatctaaacaatagccagatccgctcattcatattcataataattaccaaaagagattcaaacaaaaccactcatcagcattggatctaaacttcatcaatcgataaattcttggctgctcaattcaatcctcttctcaatcggactactcatcatcttgatactctttctcttggtgaacttgttagatccatggcttctctctgcaaaacattgcctcaaaaacttgcggttttctttatccaactttctggtttgctcgctcacaagttcaacttcttgctttgctttagcaagattcataatgagacattctttctcctttgcaattctctta

SEQ ID NO: 134067 - DNA, 636 bp, Arabidopsis thaliana
  unsure (1)..(636): unsure at all n locations
gaggtcgaatcgccgcgtacgtaagcttggatcctctagagcggtcgccctttgggttttttttttttttttttttnggaaaagaaaagaaacgcttccaaaatcggtgaacaacaacaagcttttacagttgtgtgctttgagaaaaaaaaccaaagttgcaagtggctactttctcacaaaaccaaaaacgcaaaactttggtttgtttatgagacgcccatatatacagaagaaggacctgagtttccttcatctccttacacaatttacaaaaaacagaaacaacctttggtgtaaaatgcaaaattgtgctcaggccttgtatgagacacttttcgtctgaactctaaaccctcggattccgccatttcttccgagcagaagaaccgtagaccttgcttgcacgggattttttagctgattctagaagagagtgactgaggaaaaatgctaagtgttcatggcgattagctcatccggcatgcattgccttatattaatgaccattgacttattatatggcgatgagatgtcacaacattggcggcgaggcaaacccatctgttcaacgttgcgttccagtttaggagacagaactctgatgcgttctagacgctcaacagcttctgctct

SEQ ID NO: 134068 - DNA, 442 bp, Arabidopsis thaliana
  unsure (1)..(442): unsure at all n locations
nnnnnnnnnnnnnnnnnnnnnnnnnnnnnnnnnnnnnnnnnnnnnnnnnnnnnnnnnnnnnnnnnnnnnnnnnnctttttttttttttttcacaagttgtatattagattataatttccaaaatcactcagaaacttatataggcatatcattttaagtgataagatcctctgaaacgtttagacaaaataattttgagccatcagtatgattctaacacacacacacggaacacactcacactatatagttaaacctactatactacagctctttcctcaaaaaatgttttatcaagagagactctgtgtctgattcagaaggattcagtccaaccccatgcattcgccgaatgttgctgaaacccgcctctgctttctccctctcccattcctccatcgacaatcctccacttcgttttcctcatgtcggcccttttctc

SEQ ID NO: 134069 - DNA, 524 bp, Arabidopsis thaliana
  unsure (1)..(524): unsure at all n locations
nnnnnnnnnnnnnnnnnnnnnnnnnnnnnnnnnnnnnnnnnnnnnnnnnnnnnnnnnnnnnnnnnnnnnnnnnnnnnnnnnnnnnnnnnnnnnnnnnnnnnaacagaaactagtagtgtactaataacaaagattttaactccatatctgtcaagtgcaacaaaagggcttacaatacaaaacaacaaagaaactgacaacttgggtcggagaacgcaaaaaggggaaacccaaaaggtgttcaaaaaactgtcaacgaaacgcaaaatagacaatttaaaaccgtggtttccagcagaagtcaatacccgaaccactttaccttttttcatcagcttgagatgaaattaaacgcaaaaggtgcgttcttgacttcctttggatttcaaaaaacacaaaatgagaaaccataaccgctcttaatccttccttttctcttattcttacttcttctgaaaaaaaactacgctcctcctccaacatcacaagaaacagcagctttaatcctctccaccgtacatttg

SEQ ID NO: 134070 - DNA, 540 bp, Arabidopsis thaliana
  unsure (1)..(540): unsure at all n locations
nnnnnnnnnnnnnnnnnnnnnnnnnnnnnnnnnnnnnnnnnnnnnnnnnnnnnnnnnnnnnnnnnnnnnnnnncttttttttttttttttcaccagcaaacctatcatgtgatctatcataatcgtactgtgaatattacaagaacttactgttttggataaagagacccaaaagagccttcgggtccatagtaaaagatacaagtatgggagtcaaaagatgctaacgagtcttgtggggtttagagactttcttttttcgcttcttgacagatttgggtgttttcgtcttcctagactctcgtttctcctctttcactttcttcttgggctctttccttgcagctttcttgtcttcaggacccaattctttttcactctcttcttcgctttcttctccacttccctcttcctcttcttcttcttcctcttcagcattcacctctatttgctgctcgtctactttaggaagagcatccttaagccccgttatcgtttggtacagcatgtctcctgtgtcctgcccgcttgttatcttcg

SEQ ID NO: 134071 - DNA, 545 bp, Arabidopsis thaliana
  unsure (1)..(545): unsure at all n locations
aggaagncaanttnttttgatcatttttccaaaaatttgnaaagnaggaaancttttaaatatgggaaaggttgattttttaatattttaaaacaacgagaacaagaaccggtccagggggaaaaggcaggaagagaattaaacaactagactaagaaacttccttgaatcacaagaaaagtaaaaaccctcaaaaatctctgagggaaagcaacaaacgataaaagataaaagctggttcttgttctcattcttctccttcttcagttggaaggagggaagaaaatggctgatgaagtcctcgtggatcggaaggacttctccacctccggagccaccttaaacgctgcctgcaaaacctcaggggacaaagacttccacaccgatgtattcccggccaaatgtgtgaagatcggatcaggagtggtgacaatggagaaccaagacatgccatcagcatcagcaatcttagaaaccacaaagaaccttggaacaatgaagagagaaccagctttgatatgggtctcaagaactcttttcccatt

SEQ ID NO: 134072 - DNA, 658 bp, Arabidopsis thaliana
  unsure (1)..(658): unsure at all n locations
nnnnnnnnnnnnnnnnnnnnnnnnnnnnnnnnnnnnnnnnnnnnnnnnnnnnnnnnnnnnnnnnctttttttttttttttagaagaaaccttaaaccctattaagttataagtagtcacacatttataactgtacaaaagcagagtggaacccgaatgattatcacaagcaaaatatggacgatacaaagatcggttttcttttctttatttttcagatattagggaaattaactcaaatctcatcaggtaatttaaaactctgtgtaccaaaaatctgaagagaagagttctgaagaaagacggcgactccacatttgctgctgttgaatccatcccagagcgtaaaatgagcagtccccgagactggcttcttcggtgctacatctttcacagtgcacatcttttccatctttcttacaacgtaatcattcgacaacattcttccttcgttctctcctcttgcacagtcgttcacaagcccggtttcgtatattgccaccattatgtccattccgtctccgtctactttcattctcaaagctccggtgagtgatacttgcagtgtctctgaggttggtctctggaaagtcgcccggaaggctggagaaggaaacctaggcgcttcggagatagatttgagcagcgtctcctcttcg

SEQ ID NO: 134073 - DNA, 544 bp, Arabidopsis thaliana
  unsure (1)..(544): unsure at all n locations
nnnnnnnnnnnnnnnnnnnnnnnnnnnnnnnnnnnnnnnnnnnnnnnnnnnnnnnnnnnnnnnnnnnnnnnnnnnnnnnnnnnnnnnnnnnnnnnnnnnnccttttttttttttttttgaataaattaatttttttaatttttgtgaatccaatacatgacaaagaattgtatacctcacctataatcaactaacatattaaaacaaaaatcctacaaggacagacaaagacacaagcgaagcttatctcatcctcatcttgtcgcccatatcgagtatgaaccaagccacagccaaacccatcacgactctccacaaattcaaaatcttaattgtagttgcccttgaagtatagataatatcaggtaaataaccttgcataccgacattgtaaaccggtttaccatccggataaaaaagtccataattcctctcagaaaccggacccggtttaagattctcattaaacagagcaaacacataaacatcaataggaacagattgcttcgccggagttcctttcctctgctgaatcaacttcaac

SEQ ID NO: 134074 - DNA, 538 bp, Arabidopsis thaliana
  unsure (1)..(538): unsure at all n locations
cgnnnnnnnnnnnnnnnnnnnnnnnnnnnnnnnnnnnnnnnnnnnnnnnnnnnnnnnnnnnnnnnnnnnnnnnnnnnnnnnnnnnnnnnnnnnnnnnccttttttttttttttttaaacaaaagaatctttcataaatcatgtcacattaaagcaaaagctatacacaagagaaatgtctctctatctttctgaggaatttttcagacaatctcctaagtctctactttaacgacccaaaatctaaaagacgcaaacaaaatcgatatctgacagaaacccaaccttccaataaagaaagaaataacgaataataatgtgttcccaaatgccaaaaatctatacaagaccaaaaaataaacttacattataatgattcttgtatcactctgcttgtgtaccggcttgagaggtttcttcaggttgatcagacttggagttatttgcaacaacattaggcggagaccattgatcagggaccatgaggaagtaagttgtcattgcttttctgaatcttctcttatattgctttggagaga

SEQ ID NO: 134075 - DNA, 513 bp, Arabidopsis thaliana
  unsure (1)..(513): unsure at all n locations
nnnnnnnnnnnnnnnnnnnnnnnnnnnnnnnnnnnnnnnnnnnnnnnnnnnnnnnnnnnnnnnnnnnnnnnnnnnnnnnnnnnnnnnnnnnnnnnnnnnnnnnnnnnnnnnnnnnnnnnccagcaaaaacccatcttcagaagaaaataaggataaagccttgtaatgtctagacctttagttttatgaaacgttaaagatctttaatcacatcaactggagaattgcctttggcaccaacaaagttcggcacatacttactctctgatgtgacaccttccactgggtaactcccatgataacctttaaactccaatcctcctccatcctaaatctctccgtccacaaaactcaaccactcgcgtttgatctccaaaaacctcttcccagcttcgttaacctcaccatctgcattcaccaaatgtgagtgttctctgctcataaacagctcccagaatccccaaagcatcactccttcaactgccggatgagcaaaggcttcccatagcatca

SEQ ID NO: 134076 - DNA, 703 bp, Arabidopsis thaliana
  unsure (1)..(703): unsure at all n locations
cgattgtnnnnnnnnacaactcgacgtcgatgcacgcgtacgtaagcttggatcctctagagcggccgccctttttttttttctttttttttaaaatttaaaaacatattttcaaatcaatgtaaaatagaaacgttgaagagagaaacaactgaagaatgggggcaaagcgccagaaacttgtaaaaacaagtaaaaggattggcaaaagtaagaaagcacaccactttaaaactaacattaagctttggatgatgatgattcttcttcgtcatcttcatcaatgtcccaacttaaatcttcatcttcctctgcagcactcagacgtttacgcagctcagctctgtttggactaccaccagaccgactcgtttccttaccatctatgctactcatatcctcgatctcgtcccatcccaaatcctcttcagatggttgttgagttgatgaagaagcagccacatctggtttagctgagtcttgggatggagcagcctcatcagattttggtttgacagaatcttggattggagcctcatcagatgttggtttgacagaatcttggattggagcctcatcagacgcaggaggagcagcatcaacaaatgatttttcttctggaacttcctcactatcagtctccttcttttcctcagaatctttatctgtcttcaaaccaacattgctcacttcagtcactgaa

SEQ ID NO: 134077 - DNA, 509 bp, Arabidopsis thaliana
  unsure (1)..(509): unsure at all n locations
nnnnnnnnnnnnnnnnnnnnnnnnnnnnnnnnnnnnnnnnnnnnnnnnnnnnnnnnnnnnnnnnnnnnnnnnncttttttttttttttttgaacaatttgcatcatgtgtatatactttggccgttgagatacgcttagagactagagttagtgtaagatcaaacgttaatagtgtccgtaatggtacgatggactcttagccgatgagctaataggatatctttcaaacactactaacgcctctttcatggtcggtctcttttgtggaatttgagatgcacaactatatcccaatttgaaaaggccaagtaaaaagtcctctttgccttccaattcggagcggatcgctacatcagccattattagcgcccggttcccgtcctctacggtcagcccatttcctacccccacctcgtctatcgacactatttttcccgtgagcagctcgaggaggatcactccaaacccaaacacatcccatttcgggtttggtttgagattgcggagc

SEQ ID NO: 134078 - DNA, 532 bp, Arabidopsis thaliana
  unsure (1)..(532): unsure at all n locations
nnnnnnnnnnnnnnnnnnnnnnnnnnnnnnnnnnnnnnnnnnnnnnnnnnnnnnnnnnnnnnnnnnnnnnnnnnnnnnnnnnnnnnnnnnnnnnnnnnnnnaaaaaaaccactgttctttatgttgctgcctaattcactgctagtgagtatagtctattctactctatagccaggttgactttggtggtacaaggagaagggaccacagagaaatccaaggtcggtttactggtatagagaatggggaaaaaaaaaagatcctaatcattccaaaacctggcataccaaacttaatatagcctggctttgacccacattagcagtttagtatgcttccaaaaaaagtttcatccagactggtgccggcctcttacctcgcccacgtcccgaagcgaccccgccctctacctctaccacgaccatggaagccccttccccgttcagaagactgcccgctgctaaacccttgagattgtggttccattggggactgcaaatcacttggtgactgcgggatttgtgactgtagt

SEQ ID NO: 134079 - DNA, 396 bp, Arabidopsis thaliana
  unsure (1)..(396): unsure at all n locations
nnnnnnnnnnnnnnnnnnnnnnnnnnnnnnnnnnnnnnnnnnnnnnnnnnnnnnnnnnnnnnnnnnnnnnnnnnnnnnnnnnnnnnnnnnnnnnnnnnnnnnnnnnnnnnnnnnnnnnnaagaaacgggattttaagttaaagcccaaaagattagacttttttacccattttttatagatgccccgggttaagcttctaaacaaggctatttgggaagggaattgggagaaaaaatttcctccatagcgacttggaccaccaacatttcattcacaagaaccctttggtgaatttctcagatcagaaagaggcatgaagtcagcgtttccccacccgattgtttggggactggaaccagtatcaaggggcctttccaaaacgagattggatgggg

SEQ ID NO: 134080 - DNA, 657 bp, Arabidopsis thaliana
  unsure (1)..(657): unsure at all n locations
ggaaggctggcccgcctgcaggtcccggtccggaattcccggttcgacccacgcgtccgcttttctctcttttttctcagtcttcaaagagtttctttgatacctgccattgattggggttactaagaaactctttgaagactgagaaaaacgagagaaactaggaagacttgtgatgtttggatcgatcctggctcacaaggatttctagctatatgcttaacacatgcaagtcgaacgttgttctcggggagctaggcagaaggaaaagaggctcctagctcaaggtagcttgtctcgcccaggaggcgggaagagttgagaacaaagtggcgaacgggtgcgtaaggcgtgggaatctgccgaacagttcgggccaaatcctgaagaaagctaaaaagcgctgtttgatgagcctgcgtagtattaggtagttggttaggtaaaggctgaccaagccaatgatgcttagctggtcttttcggatgatcagccacactgggactgagacacggcccggacctcccacggggggcagcagctggggaatctttgccaatggggcgaaaccgattcccagcaatatccgcgtggnttaagaaaggaattcccgttttnaaantcttttngtcgggtcgggttantaaaagnntttgg

SEQ ID NO: 134081 - DNA, 587 bp, Arabidopsis thaliana
  unsure (1)..(587): unsure at all n locations
gtgacactatagaagaagctatttgacgtcgcatggcacgccgtaccgtaaagcttgggatccctctagagcgcgcgccctttttttttttttttacttcgttatggtctctttaacacagggaagaagctaccttcgtacttgaaatcgaattcgagcggttttgcatcgctttcaaatcgagatagagctaaaaaggtaacacttccctaagaatatcatatatacaaagcactctaaacaattatttcatatagtatcatcaaatcaaaatgctagtaccaatatgaagatctgtctttatcatgaaagagtcacaaataggctctctcatcatactattttcaacatcgtcgaatgaaatcagtggacgacggttgaggttgtagctcgtttgtgttcgggtcaaagccacgcccacgacgcttgttgatcaactccatgagcgatcggtgtagcacctgtgttctcgtgtccaccagcgatctcattttctggtgtagccttactcgtctccgttggtgccgatttgggctccacaatggcagggggtaagggntnttgnaaatcngcacccgntanagntc

SEQ ID NO: 134082 - DNA, 813 bp, Arabidopsis thaliana
  unsure (1)..(813): unsure at all n locations
nnnnnnnnnnnnnnnnnnnnnnnnnnnnnnnnnnnnnnnnnnnnnnnnnnnnnnnnnnnnnnnnnnnnnnnnnnnnnnnnnnnnnnnnnnnnnnnnnnnnnnnnnnnnnnnnnnnnnnnnnnnnnnncccttaattcctatgattattggaatattaagttaccactgtaatggaaaatgcataaaatgtaatctaaattgtctttttaacacagggaagaagctaccttcgtacttgaaatcgaattcgagcggttttgcatcgttttcaaatcgagatagagctaaaaaggtaacacttccctaagaatatcatttttacaaagccctttaaacaattttttcatatagtatcatcaaatcaaaatgcttgtcccaatatgaagatctgtctttatcatgaaagagtcacaaataggctctctcatcatactattttcaacatcgccgaatgaaatcagtggacgacggttgaggttgtacctcgtttgtgttcgggtcaaagccacgcccacgacgcttgttgatcaactccatgagcgatcggtgtagcacctgtgttctcgtgtccaccagcgatctcattttctgttgtagccttactcgtctccgttgttgctgatttttgatcatcatcaatggcaggtgagtagtggtatgttgaagnattcaagcaacctgttagagnttctatttnccatcatccatatctggggtcacatcggttactagaatcgncaattgttctctctaacctntnnaggagntcnttagaggagnagagtgggaaaggcgggtnttcccnnttttttt

SEQ ID NO: 134083 - DNA, 587 bp, Arabidopsis thaliana
  unsure (1)..(587): unsure at all n locations
aatgtnnnnnnnnnnnnnnnnnnnnnnnnnnnnnnnnnnnnnnnnnnnnnnnnnnnnnnnnnnnnnnnnnnnnnnnnntgctttttttttttttttcaaaatcaaaaccacacttttcttcgctaaaaaaaatctacacaataatcaactaagagttacccgaacctaatcaaagaacacaaaaaaaaaaaaaaaaagactgtgtaagaaaaataaaagttacaaaaataataagttgtcttcatcttccaatcttttatttatcttttctttgtctcgttgccccatgttttgctcctccttatctgcgtcccattgtctcactcaaataatctcccaatattctatatataaaaaatatgggagaagaaagggtttcttggcttgtaatgttggcatcagcattccttaaatcatgctactccctagttgtacttacatactctaagctttttttagtttgttccatgagacactctctagtttccctttcttccttctccctctacaattgactctttcttggggggttttaataacccgaaggttttancccgggtgggttgtgganaccacgggnccgnagg

SEQ ID NO: 134084 - DNA, 539 bp, Arabidopsis thaliana
  unsure (1)..(539): unsure at all n locations
gattgtnnnnnnnnnncactatagaagagtatgacgtcgcatgcacgcgtacgtaagcttggatcctctagagcggtcgcccttttttttttttttttgatcgaaatgattaatattgaatccaaaactttgtatacgatttccatatatatatatatacacacttatttacacatacacttagcaaaaagcttcactgaaacagaggagctctgttgtcaacaaatttcatctccttccctattatccttctcctttggtcctgtaggaccttcctcaccgtaaagctcaataggaaacagactctcaaaagaattcctcagaatcagtggaagtagatcaatgatcttattgatctcagctgctggatcatatactatcagttggtccccattctctcataaactgcagccagtacgggtctgaaacccctccttacgcctaaatactctgctgctacgattctgtacctttgactaggatccaccatatacttgcttttcgcaacatcgtttcttactccaatcccgagcttcgac

SEQ ID NO: 134085 - DNA, 335 bp, Arabidopsis thaliana
aggtgacactatagaagagctttgacgtcgcatgcacgcgtacgtaagctcggatcctgtatagcgcccgcccatgctcttttctttcattagtagacgacaaaagattcactattctcgtcagatgaacgacgatgctcacagccgctttgacgtgacctatactctacaactaagcgcgttacgtgtgcgatccataacagttcacaactgacactcgggctactactctcctgtaagaagcctgcaatgaactcaaacccacgtcggagatcacgattgatttctcctacccgtgacagggatgtgtaaatactgccgggaacattcacgga

SEQ ID NO: 134086 - DNA, 505 bp, Arabidopsis thaliana
  unsure (1)..(505): unsure at all n locations
nnnnnnnnnnnnnnnnnnnnnnnnnnnnnnnnnnnnnnnnnnnnnnnnnnnnnnnnnnnnnnnnnnnnnnnnnnnnnnnnnnnnnnnnnnnnnnnnnnnnnnnnnnnnnnnnnnnnnnnnnnnnnnnnnnnnnaaaacaaaaaaccccgataatgatttcggctttttaggctcacaaatcattttttctcaaatccccccactggaacacactggaagccaacgatttttccctaccctaccttaactaaccaacacttcttacttgaaatgtggaagaaaaaaaaaaaactggctttgattatcacatcgcccgatcgggttttaaaatcaatcaaacccatttacctccccttattttttttagaaaccaagcccaaaaggattcatagagttttttatgggcatatattttctgttgcagcttcattatgaatcactgtttcaaacgcgtttatcccagtctgattgcaatcaccattttttggctcctctcccatttttc

SEQ ID NO: 134087 - DNA, 518 bp, Arabidopsis thaliana
  unsure (1)..(518): unsure at all n locations
gcagtaccgttggnattncggctcgaccacgcgtccgacattttcaagactcaacgacccgctcaggctcctcttctcctgcagcttcaggggcagcgtcatcttcttttgcttcgggaattgaggcggtgtcgtcaggtttgtgatcatcagaaggaggagaagcgccaccagaagaggcggatcgacggtggttagcagcggcttgatggacgtgattgtaactgcctttctcgagaaagagctgattgaagtggactttacagtagaggacgccattaagagaagcgtaagaagagtgagtcaaaggacaaccactgtgtgtgcacctgaagcaagtctttgtgtatcccatcaatttgaggcaaattcagattgataaagaaaggggggaattaaaaaccaaggtggttggaatctttgaagacattaccagatgatcattgngcttctcggtctctcctgcctgaaaattcttgcttgtattgccagattctttgaaaagctgttcgaagtgt

SEQ ID NO: 134088 - DNA, 445 bp, Arabidopsis thaliana
  unsure (1)..(445): unsure at all n locations
actnntnnnnnnnnnnnnnnnnnnnnnnnnnnnnnnnnnnnnnnnnnnnnnnnnnnnnnnnnnnnnnnnnnnnnnnnnnnnnnnnnnnnnnngcagccggcgaccaagaggtggcggtagcgccccagagtgcaacaattaccgctgaaaaagaagttgcaaaataaaaaaaagagatcaaacggaggggaaaaatacaatctctctcctccaatggtggccaaggccaaaaagtgcaagatcaaagatgaagaggagatggaaatggtagcggaaacggttgccggagattcagagatcagcaaatctaccacttcttctaattcttcgatttcgtcaaacaaattttgcttcgatgatctgacaataattgttgagcaaaagctcagcttatcaacaagtgttcccacaagatgagaaggaggctgctggtttgctcatggct

SEQ ID NO: 134089 - DNA, 643 bp, Arabidopsis thaliana
  unsure (1)..(643): unsure at all n locations
gccnnnnnnnnnnnnnnnnnnnnnnnnnnnnnnnnnnnnnnnnnnnnnnnnnnnnnnnnnnnnnnnnnnnnnnnnnnnnnnnnnnnnnnnnnnnnnnnccttnnttttttgttgtttgactgtttttttttttgggaaataaatgattttatatgcataaccaagtcttgttggactgaaaagaagcaggctcttaaatgcaaagagaatctgtaacaaacgtagtcctaactcctaaactcattcttatttatgagctttgttataaagttatcactttgcattgtgaagaaaagtggtaaccataataaagaatatgaatatgctttagaaatggcagaggatgatctcgatcacaaggatgcccgagacatattatagaaagaaatcgcgatctccatactaatcagggatatgattagccactccagagtagctgatttcctgttcttgtagtatttcttgaaggaaacgaacgttgtgctctacaaacttgagcttattaatcaaggtttgcaaaactctgtgtcagttcaaattcatctctcagaaactcccatatctgaccatatttcgcatccttccaagctatatctgacctctcaaaaagaccaagcttcagaatcacatcagccagaatcac

SEQ ID NO: 134090 - DNA, 555 bp, Arabidopsis thaliana
  unsure (1)..(555): unsure at all n locations
nnnnnnnnnnnnnnnnnnnnnnnnnnnnnnnnnnnnnnnnnnnnnnnnnnnnnnnnnnnnnnnnnnnnnnnnnnnnnnnnnnnnnnnnnnnnnnnnnnnnnnnnnnnnnnnnnnnnnngctttttcggctcttcttaaaacattttaagcctttattaaacttgcaccataatctacaaagatatttcatgtttttagaaatcaaacttcaaagtagcaccataatccctaactaaaaccaacaaaaaatctctaattgttacatcctttgttttcaagtgttagccactttaagttatgcaaaagaatcatcagcagcagcaagaatctgagattgaattgcaagccttcttgtcgtctgattcgtcatcgatacaagaaaagtttctcgtctagcgaaatcatctgttcagttcttaggggaatgaaagctatctcaggttttgaaaagggttgaagcaaccttgacatgatgtggcatgatcttgatatcgtaaggaacgtgaagccaggcttcaggtcggtataacagaaagttctcaggtttactggtat

SEQ ID NO: 134091 - DNA, 423 bp, Arabidopsis thaliana
tttagaagatatgaaaaaataaagtaactttaatataatgtaaacagtttggttttattattctcccccaaagggataaaattaaaatcactctttttccacccccgtgaatcaaatgaaccggccctttattcccatcatctaacacctaaaacgtccatctataaactcaagctggaaacctcaaacagcatcgtgtgattgtccttctcacccgccttaaccacaacagacgggaaattcgactggttaatcgcgttcgggaatccctgcgtctcaaggcacacacccgcatgtttcccgtaaaccgcattcccttttccaaccactccattcacatagttcccggtataaaactgcattcccggcacattggtccacaagttcagtacccttgagctagcagcatcactgagcttcgct

SEQ ID NO: 134092 - DNA, 514 bp, Arabidopsis thaliana
  unsure (1)..(514): unsure at all n locations
nnnnnnnnnnnnnnnnnnnnnnnnnnnnnnnnnnnnnnnnnnnnnnnnnnnnnnnnnnnnnnnnnnnnnnnnnnnctttttttttttttttagtcaaaaagtagactagcataaccaatacttacaagagacaaaagtagattcattctctctggcatagttagtgttaatcccagcataaaaaaaagcaaaacccaaagttacagaatttacaaatacaacacaatagtaagtggttaatgtagagatgccatttggatagactaagcaggagttttctgacaaactgcaaaacttccaggattgaccgtaatgctcttcgtacagttatctgttttgtagattcccaccaatctatctgctagctcaaacatgttgttcctcaaactgatgataatgaactgagcatctttagtccggtctttcacgtaatgtccaacgattgatacgtttttgaagtcgagagcagcgtcgatttcgtccatgacgtaaagtggagtaggcttgtagtgat

SEQ ID NO: 134093 - DNA, 515 bp, Arabidopsis thaliana
  unsure (1)..(515): unsure at all n locations
nnnnnnnnnnnnnnnnnnnnnnnnnnnnnnnnnnnnnnnnnnnnnnnnnnnnnnnnnnnnnnnnnnnnnnnctttttttttttttttataaaattcatctggtaataacttatttggtttaactatgaagaaagtatacagaagaaaaagtataaaggctttcgaaacaaagaaaacggaagttcaacttaacttgcacaagacgcaacaacagcatcgacgacaccaacatcgtgaaacaaggacattttactaatcgcgagagctttccccaaacaacgatgccctcgttgatttctctatctgaacctcaacaaaatccccaattccaggattcctcttcagatcatcaccatcaagaagacacgctttatcaaacagaggcttcgtgacaaacgaaactctgtgtcccttatcagtttttccaatgagttctgtctcaggcgctctcttgtttggtccttcgacgagaactaactgagttgatcctacctgagagtcataacacggacctg

SEQ ID NO: 134094 - DNA, 584 bp, Arabidopsis thaliana
  unsure (1)..(584): unsure at all n locations
nnnnnnnnnnnnnnnnnnnnnnnnnnnnnnnnnnnnnnnnnnnnnnnnnnnnnnnnnnnnnnnnnnnnnnnnnnnnnnnnnnnnnnnnnnngcatagatacaatatatcgacccggtgcatttttataagtaaaaagacaaaactccctctcgtgtggtttttcttgttcgggtaatgaagaaaaaaaaaaacataaccaaaaaaaaaagaatcttgaaaaaaaagttactattatttcaacggctctaactgaatttccatcctccctccatttctatcttcatcatctttatctctgaaacctcctcttgagtcttttagatcaatggaatcatcttcttccacattccccaaaacccaatttcctctgcttagattcctcgctcttcttcttcctctttcccggtactccaaatacgcaacagtaaccacacagaggaagacccataacccgagggccaagttaagcccgtccacgttctcagttccattcctttctcccagatgtttcattcccgtgaaaagcgccacaactccaactacaacagctgattgaccgacaatcgaatgagaatactcccag

SEQ ID NO: 134095 - DNA, 514 bp, Arabidopsis thaliana
  unsure (1)..(514): unsure at all n locations
nnnnnnnnnnnnnnnnnnnnnnnnnnnnnnnnnnnnnnnnnnnnnnnnnnnnnnnnnnnnnnnnnnnncttttttttttttttttttacattcacatgcatgaaataatatagaaatacagtaacattcaggtctttccaagtaagattttcagtgaagtggcagggggtttatgagagaataaacgcctatttcacaaatttacacaaatcggattcaaacaaaaacaaatgaaatagtgatgatcataaagggtgatatcagactagagcatatcaatacgggttcctgtgtggagtctggggagcagaacgaggaggattgagcaacggctgaagagccttcaccactatgctcatgttaggcctgaagtctgcctcatattgcacacacagtgcagctaccgcagccagcttagcaacagctttgggaggatattctccgtttagtcttgcgtcaacacactgcttcaccttgtcttcactcaatttaggggttgcccatgtcacgacac

SEQ ID NO: 134096 - DNA, 483 bp, Arabidopsis thaliana
  unsure (1)..(483): unsure at all n locations
ggcccccttccgtaggctggaatcctttaaagcggccgcccttttttttttttttttttttttttttttttttttttttaagggatgatgatgcttgattcataaattaaatcccaaggttttttattaaagggtctctagagaaaataacccccccattagaaaaacgaacgaatctcctacaagatgaatttcacttttaaaaatcccaaaaccttttctcaatcctcattcttgatgaacagagaatgacctgaattatattttcacgcaatccttttatgtctggtagagcgtagtaaaagattactgtcgcttgcattcgggtggcctctcatcttgtttaccttcaccaactatctgagatctccctcccttcttgttgccgattgatggcttctttttggtcttgctttcttcttcatcctcatcatcatcgncctcctcatcctcttcgncttcctcatcttcatcctcatcaat

SEQ ID NO: 134097 - DNA, 517 bp, Arabidopsis thaliana
  unsure (1)..(517): unsure at all n locations
nnnnnnnnnnnnnnnnnnnnnnnnnnnnnnnnacgcctacgtaagcttggatcctctagagcgttcgcccttttttttttttcttttggagccctcaagtctaattcacttacttaaatattggagccctcaaagtctaatgaaatctatgataaataacaacaattgaagtatatgcaatcaacacaagccttgcttattctatattgaaaagtgtaattccagtcttctatcgccctgggttcaggcgatgaactgtatcactatcacagaaaagaagcagcaaaaaaatctcagcaatggcgtctgttagatatctcactggtttatgtatgcctatcaaagaacttctctatgagtacagagaaaattgcaaatccagcgcaacctatacacgcagcttttggcccacctcgggcggacattgaaccaccggtaacacatccagctatagcggtgtttacagtgtcatgcttagctcttgccttttcgacaatgcattctggagcagagaaaa

SEQ ID NO: 134098 - DNA, 813 bp, Arabidopsis thaliana
  unsure (1)..(813): unsure at all n locations
tacactatangacaagctatgacgtcgcatgcacgcgtacgtaagcttggatcctctagagcggccgccctttttttttttttttttttttgaaaactatagtactttaatatttatacaataactttggaatcgaagcagacatcctcagtacaataatgagaaattgtcacatttgaaagcaagcgctcaataaacattacattaaacaacatcacctataacaacattataaaccggcctctatatgaatctatctcttcttacacatatctacaagtagctcttaagccatacattcacacttagtctgaaaatcatccacctttcctctccaagaaagacagcacggaatgggtttaagctacataacttacacagcattgcggttctcgggattattttcagaccctctttgatctaggtggagtccctggagcgaaaagggatccttggactggctgagccagaggatcaaacttttgggaggcgaggtaagaaagtgcagtgacgacgtcagcaatgagaggtctaagatttggctgctcttgtacgcacatcgctgctacagcgagtgcttggtataaccctcgcggagggtattgaccttgaagcattggatcagccctctgagagaaatttctcctgtcttttaaacaaaggcctttgcccatgcgaactagattctggttcttccataagatctttggaactggtctaattggctttttccgaccccaggtttatatatttctctcaaacaggaaaacaaacaccccgaaaaaccttgttaaaaaacggtccttgaatttt

SEQ ID NO: 134099 - DNA, 518 bp, Arabidopsis thaliana
  unsure (1)..(518): unsure at all n locations
nnnnnnnnnnnnnnnnnnnnnnnnnnnnnnnnnnnnnnnnnnnnnnnnnnnnnnnnnnnnnnnnnnnnncttnntttnnnnnnnnnnnnnnnnnnntggcaggcttgtgccaaactattgggttttagaaaataagtatcagtttccatcaaaatggcaaaaaccaaatcgcattacacatggaaatgcataaaactataaacttcaacaaaatgcaaatgaagaaaatgattgctctctcttagttctgaaagcaagcaatttggcgcctcaaggcgtatcaaagacgaagagtcttgccaaggaagggaacttgttgggttaaggcaagagaacctctatatatatggtcgatgaaagactacaaatttcgaccacattttaagcgagacgagtgttagggtctgcgaaactaccagccatacttcttgaagaagtccctggttctctttctaggctcgagtgaaaactattaactatggcatgcggagcacccatggaggaaaggtcccaatgga

SEQ ID NO: 134100 - DNA, 761 bp, Arabidopsis thaliana
  unsure (1)..(761): unsure at all n locations
nnnnnnnnnnnnnnnnnnnnnnnnnnnnnnnnnnnnnnnnnnnnnnnnnnnnnnnnnnnnnnnnnnnnnnnncttttttttttttttttccaagagaatcatttacttactagcttagagattaatgaactatatacaccatttatgtcttgtatgtatcccatcaccttaaaatgaatatatttatagcagcataccacaaacaaacaaatgaatgtatttaaaagttctcccaaaattcaatccggaattatgaaaaaagggtgactgagagaactgagaagctattgagactacacgtaggacgatttagctactacgatttgaagatggaagtggaaaagagagcttcaaggttgattatacctaggaaatgtcttggaccttagtttccgttggttcagagttagtctcttttgcctctgttgatgattgcttctcgtcattaacatgctccggagatttttcaggtgttgtgttcttgttcttgtcgcgccaccctagtccaaatggccgtgctagcaaactgatcctgcttggaggaggttctggtgacgaatcttggttaacttgccgtggtgaaggttgtgctttgagttggccagattgatactgcaagttgcctcgagatggctctgccatcaatgntctttttccattcagccagtcaagaacagcttcccggttttccctcaaacttagcagcaatcctgggtctganccggccanaaaatcgggancccnggacctnggctngccnt

SEQ ID NO: 134101 - DNA, 646 bp, Arabidopsis thaliana
  unsure (1)..(646): unsure at all n locations
tgacactatagaagagctatgacgtcgcatgcacgcgtacgtaggcttgggatcctttaaagcggccgcccttttttttttttttttccttatgtggccttttttttattcattctaggcaaaggtcttatattcaagtaagaagaaccattgttgtaaaaggttggggattctcagtgttcaagagcactccgtatagagactgttgtgtcttgggttgagttgatgtggcctctcgatatgaggtcatggttcaagaacaccactataaccgtgatgtcatcatgaaaatgtcgtctcactttcttgtcaatcttccttagatctgaatatctcatctcacgtttcctcgctgcctcgtgaagagccgcctttatcagtctctttgcgcttccagcacggggatggttatgaacaatctcaactgctttttcgttagtcaaatgctcccaaagaccatcagatgcaaaaatgagaaacgggtcattagggtgcagaggatgagagagtattnttggtgttcagcatcaagggctttcattgntctnaattntgactttgctgattgnncctgtnaatngggcgtcatgtcangccccttagccngtcccaatngnctanttccaancatccgaaaaggttgggc

SEQ ID NO: 134102 - DNA, 657 bp, Arabidopsis thaliana
  unsure (1)..(657): unsure at all n locations
cantgccaaatttnaatttttccccggaacctttaccgtttccccncatnttnccngaanccgtttcgggnccaagttgccgatattggcgcctttgtggattttcttggggtaagaaatctttaatgctgctatctctgcttcaacccgtttagggttccccacgatcccttttactttgtttggtagttcttctaatggaatggcgatcacgcggttcttagcattcgaagggacccgtggaatcccggctttctccttgtctttctctgatcttatatccaccatcaagtagttcttggtgcaaagaaggtcaagcgtttgagccggcgtaagatcacctttgtaaccacggaagttaaaagagatggcagagaaaacaggagggagaagaaggtaagcaagaaacgcagcaccagcagcaacaacaatgacactagggtcagctgaagaaatcgtatccatggtcgatgaagcaatcggtttagcatcttctatcgcttttgacgtctgttgtgctacatctgttactgtctttgcagcattaaaaacaggcttagaattaaaaccagagctctgcattgcttcttgagctttctttgaagcttcaganaaagcaggagaagcaagcttcatagcttcttcaccagcttgctt

SEQ ID NO: 134103 - DNA, 508 bp, Arabidopsis thaliana
agtgacacttagagacttgacgtcctgccgcgtacgtagctgggtcctttaagcgggcgccttttttttttttattcgaatctattttcaaaagatctctcaaggtggagaattaagggattacttaacaccactggtaaaactatttttatatcctctgttttcagtcggagctaggaaggaactgggttccggacctagtgccaaagcttctcgaagctgccgggataatccgcgatggagacaagacttgtgcaaacgagaagttgtaagaatcagtgcctaaacggctctgcaaccatcctctgccaccagagaatccatctgtcacaatatagcaattcttgtacccgagaacctttaacgttttcgccactttcttagccgaatccgtgtacgagtccaagatgatgatattggagcctttgttgattttcttgaggtaagaaatctttaatgctgctatctctgcttcaacctcgttagagttcctcacgattccttttac

SEQ ID NO: 134104 - DNA, 515 bp, Arabidopsis thaliana
  unsure (1)..(515): unsure at all n locations
nnnnnnnnnnnnnnnnnnnnnnnnnnnnnnnnnnnnnnnnnnnnnnnnnnnnnnnnnnnnnnnnnnnntcctttttttttttttttcaagtcaacaatgatgaaattttcagcaatttacttaaacgctacgagagtgagagaccctaccagagtcaactttgttgatttgttcggattgggtttttaaccaaaaacttgggatgacaaaagaagaacagtagggggcaaaaagcaaattgtcgaagcattgtcttctctcctgcttcctcttcttctgcttcttcataccacaactatctttctcttgtccacaagatcaaagacaatcccttctcgagttcaagaacttgctgattcacaacatcaaggacaactacacagcctttgaagaattagggacatggaggccaaactcagattgctgcaaatggctacgcgtgacatgtaacgctagttcgccttccaaagaagtgatagacctgaatctattcttgctcatcccccctggcttag

SEQ ID NO: 134105 - DNA, 545 bp, Arabidopsis thaliana
  unsure (1)..(545): unsure at all n locations
nnnnnnnnnnnnnnnnnnnnnnnnnnnnnnnnnnnnnnnnnnnnnnnnnnnnnnnnnnnnnnnnnnnnnncttnnnnnnnnnnnnnnnnnnnnnnnnnnnnnnnnnnnnnnnnnnnnnnnnnnttttaaaagcaaaggggtagttttgccattggaattttagggattcaaagatgtttttttgacctttttcacctactctcccttccaaaacttttcaatttttttttggttgaagagaaatttacccacttgggaccggggttaaagagagaccctaagggcctcttaactcctgaatataatggcctagttgctgagccccaacgaacaaagcatcagcagccagaacaactccaaacagacgagcagtttataccaaacggtccccccaaccttttttcgcagcttgagctctttgctggtctgcccaaccgagggaactctgaaaaacctccaataccagcaagcttcaagggttggacaccttctgtcactagatcctcgtcttgagcagatttctaaacccaccttggtancccaga

SEQ ID NO: 134106 - DNA, 511 bp, Arabidopsis thaliana
tgacctatagaagagctatgacgtcgcatggcacgcgtacgtagcttggatcctctagagcggccgcccttttttttttttttttttgtactggaatttattaatcaagccgaacatgtttacaaaaccggataaaccggaaacttagccagagactttaacaggaaacagagcccgactttaacgggagacaaagccggcgaacaacaagatgtccccggaaacaaaagctcaaacgagagaaacaaacgagggagacataaccctaaagtacagggaaccaacttacaaccaaaaaaattagctcactaagagaagtctacaaccaatgcactaaacatgaccacatgttccaaagagaagcctactaaaccctccctattagaaactgtgaacgccagatagcatcaggaagaccagataagacacaacaccaaagcctaaccaatcgcaacaccgacaaggaaggcaaaaggcttcacccgataccaaggaatcatgaaccactagc

SEQ ID NO: 134107 - DNA, 509 bp, Arabidopsis thaliana
tgacactatagaaagactatgacgtcgcatgcacgcgtacgtaagctttggatcctctagagcggccgccttttttttttttttttttttgggtacttaaatgttataagcaaacacaccttacaataatctcaattttcttaacaaaaaaacaattaaaagacctaatcctgggtttgaccattagctctcaacgggattcttcatcaccaccgtaaactccaattttccggcgaaatcaatctcacttcctgggggatgagcacaccactcgaactcctgaaccatccgcgcaagcatcaaatggacgtgtatggttgccattgcaagtcctggacagatcctacggcccacaccaaacggaatcatttttactccactaatcccggttatgtcagcatcttccttacccaacataaaccggtccggatcaaactttttcgggttattccaaattctcggatcctcactaatacccggaagataaacctcgacgttaacgccggcgg

SEQ ID NO: 134108 - DNA, 661 bp, Arabidopsis thaliana
  unsure (1)..(661): unsure at all n locations
tnnnnnnnnnnnnnnnnnnnnnnnnnnnnnnnnnnnnnnnnnnnnnnnnnnnnnnnnnnnnnnnnnnnnncttttttttttttttttttgcgacgaatcttgtttcctttattgaaccaataaccaacgaacttgaacaccgataaaagtatatttcaaagcagggccaaactaatcaactgaaaaacaaataaaacacccaatttaaacacacttggagacaacaaatgagatgaagagttcgacttgattgggtatacaggagctacagcgactgcacatttcccggttggttcatggaagttacgttgaagcctaaggtacccgccttctcccccactctggtccccaaagaattacgaataagccagtagtctccttcatctgatgatgttccataccccacaattagcacattgtgatctccccacaaattactacatgctcctttatacacaccagatttgtagtcgctcatgtttgcagctgatatcataacactaataggttgataagcaacagctttcttcaaagacatctcatcgtttacaggaacaacctcatgaccattaatggtaacaacccgagtggttttcatctcaatgggccttgcatgcggcatgtatcccggacgcagtgggcnncccaggnanttcaggcc

SEQ ID NO: 134109 - DNA, 531 bp, Arabidopsis thaliana
  unsure (1)..(531): unsure at all n locations
nnnnnnnnnnnnnnnnnnnnnnnnnnnnnnnnnnngntaaaattaagctttncattgtataagtgtccacgatcaaacacaactcaataatataactttcaataaatacttggccaagccatgaacactgatagtctcacacaacaatacattgggatatgaccttaatggcttaaacggagcaactataaggaaagcttgaagaggccagagctattggtcatgtagaaattgtttaagattcgagagctttggtttgatctaagacaatttatctatgcaacaaaagtcttaccttttgatccaatctccacatcacctttcttctccaaaacgctagttctacaatcttcataaaacactacacaagccacccatttgatcatattcccaacacagatcaaacccacatagaaactcgtgtacaacactctgtttccattggaactctccgtgcatttgaaacaaaaacatggcatcctcatcgcaatagcgaagaccaagaacaccagcatcacttggagaccacgc

SEQ ID NO: 134110 - DNA, 687 bp, Arabidopsis thaliana
  unsure (1)..(687): unsure at all n locations
attcgttnnnnnnnnnnnnnnncatgacgtcgcatgcacgcgtacgtaagcttggatcctctagagcggccgccctttttttttttttttttttttgaaacttcaatagatataactaataatcactgaacagtgacaaactctcttttagaatcaaaggaactaattctcaattatcttaatcactaacctcttacaagctaaggtctttaagcatcactatcactgctttcatcatcctcgtcgttgacatggcggttactgaattcattggggatgaaaactccaggctggctcgatcttctcctagtcctcgacggaaggatattatccaaatcaacctcagccaaaggatcatcggagaaatcgctttcgtcgtcttcatcaaaaccttcgtcatcttcatcatcatcactgtcgtcttcatcatcactttcttccacttcgatcatttttccctttcccttatcctctcgcgaaatccctttacctttcctatcaacaacttcttcttcttcttcttcttcttcttcctcgtcgccttcctcttcatcttcttcatcctcttgctcctcttcagctccaacatcgccgattaccccattctcaacctcttcagctgctttctccgataaaaccgaagattctgctccaaatcgttcctcgggggaaaaattcagattcttc

SEQ ID NO: 134111 - DNA, 505 bp, Arabidopsis thaliana
  unsure (1)..(505): unsure at all n locations
ggtacactatgagagcttgacgccatgcacgcgtacgtaagcttgatctctaagcggcgcctttttttttgattgagacatatagatatatataaagcccactttggtccaagcgtttgaaacatcaatagatataactaataatcactgaacagtgacaaactctcttttagaatcaaaggaactaattctcagttatcttaatcactaacctcttacaagctaaggtctttaagcatcactatcactgctttcatcatcctcgtcgttgacatggcggttactgaattcattggggatgaaaactccaggctggctcgatcttctcctagtcctcgacggaaggatattatccaaatcaacctcagccaaaggatcatncggagaaatcgcttttcgtcgtcttcatcaaaaccttcgtcatcttcatcaatcatcactgncgtcttcatcatcactttcttccacttcgatcatttttccctttcccttatcctctcgcgaa

SEQ ID NO: 134112 - DNA, 589 bp, Arabidopsis thaliana
  unsure (1)..(589): unsure at all n locations
nnnnnnnnnnnnnnnnnnnnnnnnnnnnnnnnnnnnnnnnnnnnnnnnnnnnnnnnnnnnnnnnnnnnnnnnnnnctttttttttttttttaacggcgtaatttgggcttcattatgcattatattcttaatgggtctacttatgaggcccatttgcatatcaatgtcttggtattgttgttttgtttctctctttttcgtcccgtgacatgttaaggagccttaaaaagccaacaaaaacttgtacctggctaatagacaaaagaaatactcttgttttactaaaataggccatgaaagtgattccctcaaatcccatgtgcacaacctgatgactctgtacgggccttctttgtacccacatcattaccggcttcttttgcaggccgttttcctctttcaacaatttctacaggttcgtgcattctttcttgaggacctttctctccaaatttactcaaacttgtcaaaccttccgtaaccatcttgatttcttctccacttacattgcccaagctcttgtcagaatcaggcatgatgtgctcgttcaaggagttatgaaacttgctagcaccaaagtcaggatatt

SEQ ID NO: 134113 - DNA, 520 bp, Arabidopsis thaliana
  unsure (1)..(520): unsure at all n locations
nnnnnnnnnnnnnnnnnnnnnnnnnnnnnnnnnnnnnnnnnnnnnnnnnnnnnnnnnnnnnnnnnnnnnctttttttttttttttgtaaatcgtgttataatactcggaaatttcaaatattctggtacatctttcgttgcttaacctcaaataatcaaaacaagtgtaagtcaacaaaagctacaaaaaaacaacaactcagatctctcagtaaacagatccttgagtgtgattcaaaagcccagaaacaacaccaaggattgaagaaaaaagtgggatttatttttctgtacactaaagagcaaagaggaggtctcctactctactctcatctctccagacaacgttccctcttcatcttccccatcaaactcttgttctacacctttcacctcggatacataatggcatccagcatgttttccgattccccggatttccaaagtaacaggatggggctcgggacaacccactacaaagctccttgcatcctcagcttcactataccgctttccggat

SEQ ID NO: 134114 - DNA, 538 bp, Arabidopsis thaliana
  unsure (1)..(538): unsure at all n locations
nnnnnnnnnnnnnnnnnnnnnnnnnnnnnnnnnnnnnnnnnnnnnnnnnnnnnnnnnnnnnnnnnnnnnnctttttttttttttttcttatccacgtccctttctattggcgtctcaatttttgctttttatgccgagctatctccctcctttaaatctcagaaagctcagggttgaaatttttccaagctttcgagcttttcctcagcaatcttctttctcacgttgaggcattttcttttcagatactttgcttggctctacctttctcttacctgcctcacgttcaaacttttccagctctctcatgacttctttacgattgctcttttcagaatcaacatcctcattcgccttctggatatcattttcaatgttatataattgccataggaagcgttctctcttcagagctttcagttcttcctgcagccttagatgcttctaagcttcttcctttggtgctttcttcagcttcttctcatttccaattgttttcttcttctggtatataagagctgctttttcttcagcgctg

SEQ ID NO: 134115 - DNA, 610 bp, Arabidopsis thaliana
  unsure (1)..(610): unsure at all n locations
nnnnnnnnnnnnnnnnnnnnnnnnnnnnnnnnnnnnnnnnnnnnnnnnnnnnnnnnnnnnnnnntccttttttttttttttttttaaataaaccttggattatattaatgggccggcatctcaaaaacacagggggtgtttcttacaaaagttgcaagctaatgttgagatcggcagaggaaagggttatacacactggctaaaacttaaaccccagaagcaaacattgaacactattgatattgatttcatacaaatataatgagttttcgggggagttaaacaaacaaaactactaggggtgaaattaatctatagaaaaaatgaacagaggagcagcttgatatttgtaacgatggagcatcagaagaatcttacaagaaggtctctcaagttgtgccttctgggtcggacaggctcgaagtttaccgtgaactgagccaagctgggttagtaggcttggaagacgcttcagctgaaccgtctatttggtatggtgcctttgatgtgatcctatccttcctctgctcaaggaaccgatgaagtgaagctcttcttgcaatcgggagttcgcaggctaaagaggccgggttaggctgaattggctctt

SEQ ID NO: 134116 - DNA, 506 bp, Arabidopsis thaliana
ctatagaaagactatgacgtcgcatgcacgcgtacgtaagcttggatcctctagagcggccgccctttttttttttttttgggggtcaacatcgaatcgacttcagactagcagctttgattgtacaacccaaattgtagcaaataatgatgttcttatgactaaagttgaggaaatggtagagacaaaacaaaagaaagaaggtttttttgagaacaagacctctctcgggaatcgaatttcacgtttgtttgttgtcaggtttcttttagggccttaagttttctgtaacctttatcggtgccaaagatccagtccatgtaaacaaacgttgatgaggagttgccagactttgtgtagagtaatcgatgatggtagtcatggaagtcagcaccggcgtatagaggaagaaaattcgaggggctccatgggaaatgataaccacaatgtgcctcaactgtctcaataactctgagcatcatccataaccaaagggtgatcaggtg

SEQ ID NO: 134117 - DNA, 497 bp, Arabidopsis thaliana
cgtaagctggggatcctctagagcgtttgcccttttttttaatccttagaagccataattaagatttcttctctggactaatgataattcaagatacaagcaatacatcaataggccttctattaacaactctacaattaaacctaatctcaccaggtctcccagattgcaaatcacccaacttcaccatgccttctgcaaaagccctaaagaactcatcttgatcctcactaaacatcttcacatactctctcgtcactagattcgtgtacaaagtctgatcagagttaagaaaccctctccctgaaaccaagtctttgaaatactgattatcaaaaacctgaggtgttgcatctagatctccagtcacattctcatctcgcacccaaaggacaaagcttatcaagcttcttacgggaactacggttcaagagctgggtccggtttaccagaaccggattggttataaagtctgaacatgattgaaaaacaccgac

SEQ ID NO: 134118 - DNA, 606 bp, Arabidopsis thaliana
  unsure (1)..(606): unsure at all n locations
ccctccgtaagcttggatcctctaaagcggctgcccttgggtttttattcctttttttttttaatagttaatcttattacaataaagaaattttatatcaacacttatatagggagaacaaaaagacactgtactgtatctgtgtttttaaacatgtaatttaagaacaatttatgaccataccaaaatcagaaatcaactatatggttggatattgagtcttggcatgtctaagatagaaacatttgatccttttaaaagcttcttcaatcgaagttgcatctgctgcaaacgttatcctcagccagttcttcagccccaccgcggtcccaggaagaaggatgactgattcttccctagctaacttgaaacagaagtcgatatcgtcacttacatcttcaagtaatgagagattcagcttaaccatcattgccatggatccttctgggcgatgcgaggatcatgcaggaatcccctggtccagcacaacaattccggnngtctcacgggcagggttctgagaagncnccggcgtccaanagggncgcncngaaatgggggcccagatcaggtctacccagcnggcaagccaggnaggganccgcc

SEQ ID NO: 134119 - DNA, 387 bp, Arabidopsis thaliana
agttcaaaaaaggtttttctatagccattgaatccgcaatcgttggttctggggtataaaaggaaacaacagccccagctttcaacgtgtttgaatccttgaggtgaggctgaaaaaggcagaaactcaagcaaccttaggaactacgacagattccgaattgggcactgtcacagaccgcaacagctccaacgagcaaacaagaccaaggaaatgagagagtaaggtgttcgccgatgcctgaactaggaagacatcaagagcaagaccgggactgtttccctgagagactccttggtagaaagggtttgctgaagtttgtaaagcctttgcaactaaaatccaactgttgctttgcctcccgagtagtgctgatcccattcccaa

SEQ ID NO: 134120 - DNA, 513 bp, Arabidopsis thaliana
ggcgacctatagaagatctatgacgtcgcatgcacgcgtacgtaagcttggatcctctagagcggccggcctttttttttttttttttttttagtaagaacatttccattccttaaaagaaacatgaaagagttaacaactaaaatcagaaagattcttattccgagatgagtcgcatgatgaaaggaagaggaccctttagttcttgggagttattcaagcttgtcagaacgatggatgtggcgaattaacctcaaagaagcccagaaacttatgggtccaagaaccaagaagagggcgttacattacaaagcagtggatcctaagtaaaagcttaactggagaaattcagtcatttcttacctgagatagaaccattcttcatacccatacatgaacaccggtgggaattcttcggacaatattcgatcttcaccaccattcatgatctttaacggatagctgaatggagggtaagataattccgaccctcgaacctaagaagattagcac

SEQ ID NO: 134121 - DNA, 489 bp, Arabidopsis thaliana
  unsure (1)..(489): unsure at all n locations
nnnnnnnnnnnnnnnnnnnnnnnnnnnnnnnnnnnnnnnnnnnnnnnnnnnnnnnnnnnnnnnnnnnnnnnnnnnnnnnnnnnnnnnnnnnnnnnnnnncaacaaatcttgtggatcaaagaatcaaaaagcagagatagaagttgaacaaagcaggttaaatcaaagcaaaacaatcgcttattatccaacaaatcccaaaaccccaacttggcgagttaaagaagaagcagagccaccactggctggagccacagggggagctcctaacaaagctggagatggtgcaggagaaggagaagaaccagtaaaaaaaccaccggtgtggccaccacgagagggcatgacaaccatttgaagcttctcaccttcaaccgcagttgcttttagagcccgttgtgaagaagtaggaccaaatccttctagcttaatttagtatctccattgctgtattagctgctgggtttggggggttgcagttatgtatgc

SEQ ID NO: 134122 - DNA, 519 bp, Arabidopsis thaliana
  unsure (1)..(519): unsure at all n locations
tannnnnnnnnnnnnnnnnnnnnnnnnnnnnnnnnnnnnnnnnnnnnnnnnnnnnnnnnnnnnnnnnnnnnnnnnnctttttttttttttttgtcaatggaaatagttttcttgatatatataatggacagacatagcgggggatgatgtcaggaatcgggaatatgatcatcaaaagaagtttggttctgattgagaaggctcaaccaaatggagcgaagtatcatatgaatctcatcggactttctaggcttagggctccacaagaaatgtctctgaaccatcttcacgtttctctgcatcttcaaatatctcctcatacgaatctccaatagtatctccttcagccggggaatctccttctccggtaccaccactgagaacgctgaccaatctagcacatcgctgaacggtaacatgaagttatcagcgatcactacagggacgcattcataggatatagcttgaacgatacgtggactgttcacttggtaacccattggacaaagacagtacttg

SEQ ID NO: 134123 - DNA, 574 bp, Arabidopsis thaliana
  unsure (1)..(574): unsure at all n locations
tannnnnnnnnnnnnnnnnnnnnnnnnnnnnnnnnnnnnnnnnnnnnnnnnnnnnnnnnnnnnnnnnnnnnnnnnncttttttttttttttttttttatccaaacgttgcttatactgtgtaagctatttttggtaaagtacaactagcttagccccttattcatagatgtaagtcgcacagtttttcagtcttttggaccaaatcatggttgctgatactggaacagaacaaaaatagagtaaaggctcgagattcaagccaaatatttcaaaacacctagcacagtggcacctaattgaaccgaacaaatccaaaccggctttgtagagcaggttacgcaaaaagcagaaagactcaagcttctgcaagaactggtgtgtgtatttagtggctggcagctaccaaagccatgtgctctataaggtcaagaactcggttgctgtaaccccattcgttgtcgtaccaagagacaagtttcacaaaggacttgctcaatccaataccagnattggcgtcaaagatactggaccttgaatcaccgacgaaatcattggagacgacatcntcatctg

SEQ ID NO: 134124 - DNA, 509 bp, Arabidopsis thaliana
tattagggcgaattttaaagaactatgacgtggatggcccccttccgtaggctggaatcctttaaagcggccgccctttttttttttttttggcaaaccttaattttttttatcatccaattaattaaacttggcttccattccaccatttggcccaccagtcatggttcccgccttggggagtaatataccatcaacagtcacaactttaaatctctctccgctccagctaagaacctgggcttcttcaagttcgtcgcagacaagagtatttccaacagcatagagaaccgccttctccaattcaggatcgaactggataacatcgaacaccagctttgctgtgccacccaaatttctcaatctttcaaacacttgcttgacacgtactgactgaagaggaataaatgtcataggaggaagcctttgctctttcaagtacttgatgcaatcctttcccgtgttttcatcttctacaactactgcatccataaatcttcccatggcaa

SEQ ID NO: 134125 - DNA, 482 bp, Arabidopsis thaliana
ctggcccccttccttagcctggaatcttttaaagcgtccgcccttttttttttttttggttttttttttcaaccatttaattatttgggagggttggtaattcttagagatccaccaaatcctattcctaataaattctcaagaattacaagaagggagaatcatcaccgggatgccaaaatctgttttaaaaccactttctgtcaccctccacagcataaccatcatggttcctatgccatccatagtgagcatgcgtcctgttctttatcgagaatatagcatgcccgaagcttgcttctctaaaggcagagtacttaggctgaggctcagtcattttggtagccaagccctcaatattgcctccatcaccaatggtgatatagactggagctgattgatctttgactgaagtgcaaatgccgttaacaacattgaaagctatgtttgatacacgtcccgatctttcgtaggcgtggaca

SEQ ID NO: 134126 - DNA, 509 bp, Arabidopsis thaliana
ttaggtgacactatagaagaagcttgacgttgcatggacgccttcgttagcctggattcttttgagcgggcggcctttttttttttttttttctggttaaggaggacctatggtttccattttctgcattttcgggaggttacctggatattaccggatctttttcatccttttccaaaaaaaaagccgaaacctaaaaaggtccaaggataagaaacccaaaaaggagggacctttcaaggttaaaattaaaaggggccacagaaggagaggtaagagaagaggctttaggtataggtaggtatattataagacccactttataaacttaaccaccaaagagaagcccaggcaggactcaaataaatatccttcctttttttatgtctgcaaattccaatttctaaagcagaaacctcattttggtcgttttctcagaaagcttaagagtatatctctcatcaaagaagagagatagagagcttaagaatccttcctttaagctctga

SEQ ID NO: 134127 - DNA, 496 bp, Arabidopsis thaliana
ctatgacgtcgcatgcacgcgtacgtaagctgggatcctctaaagcggccgccctttttttttttttttgacaaatccatagtatatttcgatggaaattggggaccatattctctactctacaaccaaaatatctaaaaaaagaaaactaaatcaaaagttcttatattctaaacactctcaaggtgattttgctttataattgttagagtgcaaggaacaaagccaaggagtagtatatagttacaacaaaacgacggtgtattggtcactcaggcagtctcagacggttgaaaaggaccaagaaactctgctcagggccaatatatagaaatccaagatctgcgcccttcacatatggtcccattccctttccattgagttttaagagcttgccctcgacccatcttggctttttaaacccaaagtcagcgatttttccttgccctctgtaactcgcaagcactcccaattcctctggaaacaatccatgatt

SEQ ID NO: 134128 - DNA, 510 bp, Arabidopsis thaliana
  unsure (1)..(510): unsure at all n locations
nnnnnnnnnatccaagaaatatgggattgctaatcatactactgttcattatgattttatgtgtcatgttgtgcctttcatctttcctttttttttagttggcaaaaaaaaaaaagacttggaagtattgaaaaccaaatctgatctcaacctagacaagtcgattaaagctaaaccgaaaaccgaatcccgaccggttaattgaaaaccgatccaaccctttagggactctagcttcactcaaaagatctacgctgctgtcaaaccacctgagtacttgctggctcttctggcaggtgggaattgcttctcctccatttcaaatactcgttaatagctgttgtgccggtcatggtgagtccaaatccgatcatagtggctaagacaatgcacattaccggctgcttcacatcaaatcttacaactctgtagaaaagctgagcgaaaaggaccacaaaaccgaactgaacggtggcgtagatccatacatagttcttcttcaccattgtt

SEQ ID NO: 134129 - DNA, 501 bp, Arabidopsis thaliana
  unsure (1)..(501): unsure at all n locations
nnnnnnnnnnnnnnnnnnnnnnnnnnnnnnnnnnnnnnnnnnnnnnnnnnnnnnnnnnnnnnnnnnnnctttttttttttttttgtgaaaacgttatcattatttaactattaactcaaaacgttggcggtggttgaccatattacaaaatggaacatggcttatgggcagttcctaacaaatataaaacctaagggccaaaacgatacatgtgtgaaatatgatcacgactcatgagtagactctaacctctttagaagctgggtaacgacaccccagttgaaaccccggtactgaagccaccggatgactctagttttacgagtttctgtaggcaagtctcgaccttgaagccaccgctttgatgcctggacataaagctggtccactgcttccttggacagcccgtggtttagttctgcttcttcatctccttcattgcattggcgtttctcaaaaaccagctttatggccgtctctgagtctttgttgcttatgcct

SEQ ID NO: 134130 - DNA, 524 bp, Arabidopsis thaliana
  unsure (1)..(524): unsure at all n locations
nnnnnnnnnnnnnnnnnnnnnnnnnnnnnnnnnnnnnnnnnnnnnnnnnnnnnnnnnnnnnnnnnnnnnnnnnnctttttttttttttttataagaaattaaacatactcaggggggtaatatcactccgctcatcacaatgatatctttaaaataactgtccaaaaaaggtagactagcgaagaaatacacaaaattcagcacaaaaaataacaggagaacaacgctcactgtaacagtctctctcccctctttacacaacttgctctacctctctctctctttctctatgctttaaacataattgatgatggtcttttcgaggggttgtttcatttcatcttgctgcgaatctacgtctcctccttcccttcaccggcatggaaccaaaactagtcagttcatcttcgtcatcgcttgtttcatctgaccgccatctcaatccaccactgttatttctgctctccgtggccaagacattgttgttgttgtcctttaagctcgaagacatgtccattggatca

SEQ ID NO: 134131 - DNA, 503 bp, Arabidopsis thaliana
  unsure (1)..(503): unsure at all n locations
nnnnnnnnnnnnnnnnnnnnnnnnnnnnnnnnnnnnnnnnnnnnnnnnnnnnnnnnnnnnnnnnnnnnnnnnnnnnnnnnnnnnnnnnnnnnnnnnnnnnnnnnnnnnnnnnnnnnnnnnnnnnnnnnnnnnnnngtgcgaaaggaaagattctgatagaaattgaaataattccaagcccacgaaatttacaaaaggctttacaaaatcagaaatccgttttggggtttttttgaatgggactaagcgctaggctttaacaaagaggcctaaatatacataaagttttcagaaggaacatcttcctcatgggaaactaactttttcaacatagcaataagctgatcaaagtcattttgggatctgatgagactcaatcgcacaaaccttttttttgatccaaacacattgccattgggtcctgttattttcgccgttttgaaaatctaatagcagttggggtcttttggtctctcacacttcacccatgcataagaaggagt

SEQ ID NO: 134132 - DNA, 706 bp, Arabidopsis thaliana
gatgtcacgcgtgcgtaagcttggatcctgtagagcggacgccctttgctttttttttttgactttaatttttaacatgggggggtacgtatacaacttgtagattgtcctcttctttttttttgaaagattagtttttaagactaaaaatcgccaaagaaaagaaaaaagagaaaagtttttgttgttattgaggatttacaagattagattgcaggagcttgctcaagcactgaaacaatctcaatcctgcttctcaccaatctatggaacacttgcctcacttgtctgtgcaaatcctccaatcccacttccattcggcggcaaatctgctccatttgatccaccttgtccgcggcttccacctcctctttttcatctgccggaaacctaaacctgttccgcgaattccattaaagataacccaatcttctccatcctctgcatgtgctccctcaatccacccccaccccaacgcttgtgcttccgttttatctcttcacccatcctctcctgagtactcgtagcggcgctagcccaattccggtgttttggaagcggcaatggttccacaagaacagttggtttggttgacaaggaaccgtcgtcactagtgacccacatgagccagaaccataaaatctgcttatttatggaaaacccgggaatttggccgggtgccgaaaaggctttttagttttccaac

SEQ ID NO: 134133 - DNA, 540 bp, Arabidopsis thaliana
  unsure (1)..(540): unsure at all n locations
cggccgccctttttttttttttttttaccaaaaacagtttctttttgtgtgtacgtatacgatttgtagattatacacatcaatatttttgaaagattagtttttaagactaaaaatcgccaaagaaaagaaaaaagagaaaagtttttgttgttattgaggatttacaagattagattgcaggagcttgctcaagcagtgaaacaatctcaatcctgcttctcaccaatctatggaacacttgcctcacttgtctctgcaaatcctccaatcccacttccattcgccggcaaatctcctccatctcatccaccttctccgcaacttccacctcctcttcttcatctgccggaaacctaaacctctccgcgaattccattaaagataacccaatcttctccatcctctgcatctcctccatcaatccaccaccaccacaacgcttctccttccggtttatctcttcaccaatcctctcctgataatcaaggggggagncaatttggggttngangggagggnanagaatggtgttgaang

SEQ ID NO: 134134 - DNA, 528 bp, Arabidopsis thaliana
  unsure (1)..(528): unsure at all n locations
ctatagnaagagctatgacgtcgcatgcacgcgtacgtaagcttggatcctctagagcggccgcttttttttttttttttttttttttttttagagagcgtttgaacaatattagtaataaataaatatctgatacatgtaggtagcagcagaagtagccaaaaaggctaactaaaacaaaaatgctatggaattgagcccacatgaaaattttacatcttaattttcacttgctctgtcgctgtttcttggctaaagcagcaccggtggcaagtcggagagcttggccggagttcttgatgactgaagacgatctggggacttgcgctctcctcatcttcaagaaatctaacccggttttcaagcattctggtggtggaatctccttgtaaataaccgtttcgatccctgagcttttttgctttttctttcttgggagttcgtctatgatctcttcttcttcaaaatctgactcagctttttgtttttctcgctccgcaagaaagtctatgatgtctttggaaagga

SEQ ID NO: 134135 - DNA, 488 bp, Arabidopsis thaliana
tgcacgcgtacgtaagcttggatcctctagagccgtcgctgggtttttttatcctttttttttttttttaataaaagttgatgtttattcgtatattatgagtttatagagcaattctgagactcggacctatcaattgggataagatcacaagacacataaaatacaacaatagatcgactggtctaaatggggatctttaagacagacacacatgcacaattttgcattgtttgagcctctgcgtgccatcactacaaaacatcctccattaacgggtatgagggtagttgagcttcttcatcttcatccttcttcttgcatatgtaaataaaatgggaatcaggatcctccagaacataatcatgtggcagcattccctcacttgttataaagttagcttccatacaagactttgctgccacacatcaatgaatcaagggttccttttatcataatagtgtcaaaggaaatcgcttcaaaggaac

SEQ ID NO: 134136 - DNA, 522 bp, Arabidopsis thaliana
  unsure (1)..(522): unsure at all n locations
nnnnnnnnnnnnnnnnnnnnnnnnnnnnnnnnnnnnnnnnnnnnnnnnnnnnnnnnnnnnnnnnnnnnnnnnnnnnnnnnnnnnnnnnnnnnnnnnnnnnnnnnnnnnnnnnnnnnnnnnnnnnagagcaaaacaatatttgaataagaatatgattcttacataccttaaggctttgggtttcattccaagaagatcaatttttcagaatcatttttttaacacttggttagaatctcagcaccatctttggttataagaatggtatgctcgaattgcgccgagaggcttgcatcttctgttaccacggtccagttatcatcccacattatcgggtttctgcttcctattagaagcatcggttcaatggtgaaggtttgattcaagaccatacgtccagcttcattgttccggaaatgcagaacaactggatcagcgtggaagacgctgccaaccccgtggcctacaaattgtcgaacaactccatatttatgtttatctgcaagatcatgaatgactttg

SEQ ID NO: 134137 - DNA, 527 bp, Arabidopsis thaliana
  unsure (1)..(527): unsure at all n locations
nnnnnnnnnnnnnnnnnnnnnnnnnnnnnnnnnnnnnnnnnnnnnnnnnnnnnnnnnnnnnnnnnnnnnnnnnnnnnnnnnnnnnnnnnnnnnnnnnnnnnagaattctaaaattcttccatttccacaacaataatcatcttcctccacttgcttcttcttttttcaagagccattctaaatatcacaagccagagtagaaaaatgtatatgtataaagagattcataatttcaatgtcaaaattttcgcgtttctaatcatctactggtgctattagcagtcttgttcttgctcatatcagcaagctcttcaataagttttttctcctctttgctcaatctcttaggtatctccacttgtactctcaccaactgagctcctctcatattactcttggtcaataccggaactcctttttttcgccaccacaagcgtcgtgctaggttgtgtcccagctggaactttcaaatctactgtcccatccactgttggtactttcagtgtcgtctctaaaatcgcatcgat

SEQ ID NO: 134138 - DNA, 673 bp, Arabidopsis thaliana
tacttcaagataaaccagaacatcagggcttgacgctgcatttcgtggaagacagactcgcaacactgaaaaatgtcataaaagagcctgaattagacaaatggagtttatacctaggaacctggggatacaacactgagaaagagagagctgaagcagcaggcattcccaggattcaggttattgagctctccacgtttagcaataagcttaaatgagtgcatatactcattggaaaagaaacaaagctttcctctttattgtattctacggcattcaacggaaactaaaaaccaaacatgtttaggtaagattcagtaaaagagttgaactttcagtactacccattatagaagcttttctgtgacctataattcatccttagtaagatcattcttgttaccatcaccatcttcgggatctttcctttgctcagcttgaaatttggcaaagacatcttcaaatggaggatctccaggtcttctaaactcttgcttccctatcttgacctcggaagcttcttcttggctcagcacgaattcccttagctcagtcacaagcttcccattttgcatattgaacatcactgtgcttcgatctacagccatgaatcttactcctatccctcctgttcttaaaacttttgtccatttcatagcaatatcaatcacca

SEQ ID NO: 134139 - DNA, 601 bp, Arabidopsis thaliana
  unsure (1)..(601): unsure at all n locations
nnnnnnnnnnnnnnnnnnnnnnnnnnnnnnnnnnnnnnnnnnnnnnnnnnnnnnnnnnnnnnnnnnnnnnnnnnnnnnnnnnnnnnnnnnnnnnnnnnnnnnnnnnnnnataccaaactcactgctcgtatgttgtttagtataatattacaggattctcaactttttacaaatacacatttatgtaccgctctttgtgttcttagtcttgagaaacacttgagtaacttgttgaagatctgatatatccaaaaaagttctaaagtctaaacaatgcggaatgaactagctatcctcttcagatccttgtagtgtctcttccattgaagaccgtttccggtgacactgaacaagtaaaggcggtttccggcagctgttgcagttatcagtacatgaggcggctctagctcgaattggtaatagagtctaccatcgtgttctgcaacattggaacttaacaccttcccttctacgttttctccaataacttctggtccaaacgcgttaatcaccttcgctggttgtccaatattttcaatcttaacatcgtccccgaggttatctgcaaatctaagaacaggagctacaataacagacaaac

SEQ ID NO: 134140 - DNA, 529 bp, Arabidopsis thaliana
  unsure (1)..(529): unsure at all n locations
cgaattctattaggagcnnnnnnnnnnnnnnnnnnnnnnnnnnnnnnnnnnnnnnnnnnnnnnnnnnnnnnnnnnnnnnnnnnntttttttttttttttttttttttttttttccatccattatactcttttcaaaccttcatagtcattttctcaggcttcttttaaattgaattagaaccacaattaaagtaaaacggattgggttggatttcatacatatatctaacaaaatctgaagagtttacacaggcttttttagcgtctatgtgacctcaaatgtctcttaaaatcttggggaccagccaaatctaatgaggaagtgttcttcaactcatctgaaagctgcaatgcactctgaaaatctcctgacttcttcagacaatcgattaaagctcggtagacataaaccgatggtcgaatctgtctctgcttcatctcatcgaaaagcctcaacgattccttaacgttcccagatcgacccaaactgtctattaccgctgtataacttagcaaatctggttcaata

SEQ ID NO: 134141 - DNA, 540 bp, Arabidopsis thaliana
  unsure (1)..(540): unsure at all n locations
nnnnnnnnnnnnnnnnnnnnnnnnnnnnnnnnnnnnnnnnnnnnnnnnnnnnnnnnnnnnnnnnnnnnnnnnnnnnnnnnnnnnnnnnnnnnnnnnnnnnncgacattatttttagtattttattaaacgtaatacattttatttttttggacgggattacaagaaaagtatacaacaataggtggagattttgtatcttacaacaataagattaacattttctttattacatgtccaaacaagaaaacaagataaaagaagggcttaagatggtctttgtcaagcaagttcttcggaccactcgtgtaatgtaggagtcttgactccaatattcttcatgtcaagaatattcgcagtatggatctctggtgttgcagcagctgtggcatctgtaataacagtcacattgggataatccagcgccactgcatcaaacaccgtttgccggatacagttcggcgtttgcacaccagcaatcactaacttggtaacccctgaagtttgcaagaaggaatgaagattggtactaaagaaagcac

SEQ ID NO: 134142 - DNA, 734 bp, Arabidopsis thaliana
  unsure (1)..(734): unsure at all n locations
taggacnnnnnnnnnnnnnnnnnnnnnnnnnnnnnnnnnnnnnnnnnnnnnnnnnnnnnnnnnnnnnnnnnntntttttgtttttttttttttttttttttttgcgactccaattttaccagatacatccacacaccaaacaagtctcatctttctttacacagatggttttagacttttagttttcaactttaaacaaacaaacaacacgttttgcttattagcaacactaatctgttgctgtttctgtattcatagcctttgtattttttttttccgtgtatctcaatgttccgccgcacccgaatggtaagctctacgcctcaactgagattcccctgatggctgttgcagatatatcctcgttggatcattagggtccacgtacgcatgtctcatcatttcgtccacaggtgtctgagcggcttgaagaggatcaacatgaggagctgccgctgctgcttctgctgcttgttgcatttgtctgttggattggctcactgatgatatgagattcaagaaagagaggaacaaatgtcccacaancaacttccttaaaatagggaccttgaaactggggggttgnatatagagcccaatgcccaatttctgggancacangggncacnttggccaagnaatattggtgaagggaaaaatnggggggtaaattcccggnatgggtnnaaacaggggggtgcnaaaggacaaaggtgnaaangggtggtgaanaa

SEQ ID NO: 134143 - DNA, 381 bp, Arabidopsis thaliana
  unsure (1)..(381): unsure at all n locations
ttacgattcctannnnnnnnnnnnnnnnnnnnnnnnnnnnnnnnnnnnnnnnnnnnnnnnnnnnnnnnnnnnnnnnnnnnnnnnnnttttttttttttttttttttttttttttaggcccaagagatacacttcggaaagcgggtatccaaacaaattcaatccctagttactgaacagatatatccgtcaattatccccttcacataatgatacaatccttcttccctttcttctccgccttctgtcgtcttctcgccagccgtacccttctgtcgtcggacgcgtggnnnnnnnnnnnnnnnnnnnnnnnnnnnnnnnnnnnnnnnnnnnnnnnnnnnnnnnnnnnnnnnnnnnnnnnnnnnnnnnnnnnnnnnnnnnn

SEQ ID NO: 134144 - DNA, 521 bp, Arabidopsis thaliana
ctatagaagactatgaggtcgcatgcacgcgtacgtaagcttggatcctctagagcggccgccctttttttttttttttacatagagctatgcccattatcatcatgtacataaacatacacatatccatatacatgcaaatgctgatcaacagacctacttatcacatgcagcgaactgatcagcaggtgcacttatctcaccctgatcaacatcaccactagtaccaccactagtgctggtttgtccaagcaaactacttattgaacgtgcctttaccatgccaagctttactctcttcttcttcacttccaccaccaccgcctttttctcgccgccacgaccaccaccactcttgttcatgctccttacccttcctttaccgagatgatgctcacaaagagaataaccaacaagcgtttgctgacacatctccatcctctaccgtaacacggctgcaccgtgatccttcctctaacccaccaccgctctttttcgctttcttttccctttattaatac

SEQ ID NO: 134145 - DNA, 541 bp, Arabidopsis thaliana
  unsure (1)..(541): unsure at all n locations
nnnnnnnnnnnnnnnnnnnnnnnnnnnnnnnnnnnnnnnnnnnnnnnnnnnnnnnnnnnnnnnnnnnnnnnnncttttttttttttttttaaaaatttaacagagacctcgacttaatagctttgttctctcagtgattcagactacttttatcttttatgcaacaacattgtattgacatctctctgaatttagtagtagtcttaacagaaaatagattccaagtttgtttactggatgagaatataatcagcatcaaagacatctccagcagtaggagaaaggttgtttctacggagttgggcatgagtctccgcttcgtgtggaaatatcttaaccacgtcttgtagctccagctttctaacttctacttgttcttctgtaatgggttttttgagccccaagtataccaaaccaaccacaatcagaatagccccaaggagaaccatcagaaaagtgaatagaccaaacgcataaggcgtgttctgcgcccccgggatcccatccacattgatcccaaacagccctacgatgatggtaa

SEQ ID NO: 134146 - DNA, 560 bp, Arabidopsis thaliana
  unsure (1)..(560): unsure at all n locations
taggagcnnnnnnnnnnnnnnnnnnnnnnnnnnnnnnnnnnnnnnnnnnnnnnnnnnnnnnnnnnnnnnnnnnnnctttttttttttttttttttgaatgtaaaaactactagggaaccgaaggtagaggaatattacaatagaattttctttcaaaaaaaatccccaccagaacgatgtaaaatttctatacactgtgaacaatttagagtgacaacgtaagtaatgcacaaaaaagataacatcataagtacagaaaatcacacccctgtttttgtgactgtcctaactcctaaccagaagtagcaagcaacacagctttcaatcctagagagttcttacacttatgtgaactcaatctcctcgtaagaatatctgattcctcgcttccgtcaagagcaaaaaaacattcaggacttggctcagagcttcagtgtaagggtcaaaatgactcagggactatagtcttgcagaacttatgaggttggaagatggatgaagagctccaaggctcaaaatgtttccggtgtttgaaaaattggaagacaaatggaagatgc

SEQ ID NO: 134147 - DNA, 576 bp, Arabidopsis thaliana
  unsure (1)..(576): unsure at all n locations
nnnnnnnnnnnnnnnnnnnnnnnnnnnnnnnnnnnnnnnnnnnnnnnnnnnnnnnnnnnnnnnnnnnnnnnnnnnnnnnnnnnnnnnnnnnnnnnnnnnnnnnnnnnnnnnnnnnnnggatgtcaacaacataaaaagactttattacaaaatgcgttagcaaaaagccaagtgagtggagaagttttatttggtgtaaggaagagaagcaagaaaggcgagagtaaaaggagaagtggatttgccaaacattgtgcaaaatggaggaagtctttcgagaaccctttggacttgtggagtgcgacggttcaagtcagttctgagtttcaagagaggtctttgcttcttcttatcatcagatacttcttcctccttgtaaagtttgagaacaaagctagttggtgcctttttcccacctgcgaattgaatttagatgccatccttctttcaattgctgcttttcttcggcctcgttcctatccatcaactcttgcttctttcctccccaacctactttgcattgtaaaggcttcctatttcatccnatgncaantcngagnntnccancgcgntgng

SEQ ID NO: 134148 - DNA, 520 bp, Arabidopsis thaliana
  unsure (1)..(520): unsure at all n locations
cactatagnaagactatgacgtcgcatgcacgcgtacgtaagcttggatcctctagagcggccgcccttttttttttttttttttttgactagaaaattgtcataagactgaaatgaagaaatggcttgatatacaaaggaacgagctgtttctaaagtgatgcaaagttttatctgcaagtgcatattcacaaagagtaatggagaaagttggaaatttcagtttctttggccttaatactgtcctcccagtcatccattgaaaaggtgaccaaagtgaggattatgagcatatgggttcatgatatatatgccttaactaactccgtgtagttgcagacaagccctgtccttggacatgttattttacctccattcttttccgccatttccttgagagccttggtgctgtagacgtagccattgggcagcacctgtggtgggttctctgtgtccattagctccttagaaatatagcaaacaagctttgaatggtgctgcttggagaacggtaaaggca

SEQ ID NO: 134149 - DNA, 492 bp, Arabidopsis thaliana
gcacgcgtacgtaagcttggatcctctagagcggtcgcccttttggttttttttttttctcaaaaatgtttatatgagtaatacgcttatgtacataccgttacatatatgcacatgacaggctattaagcaaatacaagaacaccatgaaagttgaaaaacaaaaatcaagaacaccaaaaaaatctgaatcaaacttttgtgggggaggttccagagagttttaactcgtaacgcttttactaaacttgttgcatctccttcttcttagcatccacaagcagagcaagttgtgcacatttacttttaatttcttccagttctttttctaagctctttaccgtctgttctacttcattctctttctttacatattcctcgcacctcatgaagagttgtaagttctcttcgcgtatctcagccgctaacttgccaacgaggttgtttccagtatcgccagctgcaagtggttgtgggttgagctgcacgggt

SEQ ID NO: 134150 - DNA, 498 bp, Arabidopsis thaliana
  unsure (1)..(498): unsure at all n locations
gcacgcgtacgtaagcttggatcctctagagcggttgccctgggggtttaaggcnnnnnnnnnnattacaatcttttcacatatcacaatcaatcattccatacatggccaatacataaccaatacaattctgtaatagtaacttacatatgataatctattttagctactaagctttactatctggatctcttactccttctacgggattcggttactaggtaaccagcctctccatctccatgtatcatgaagacactaatcatcaacatgtaatgcacacatctaacttatgctacaaaacatcaaacagatacaagaaatgcttacttggaaccatcattggtaattcagatagcggagagcaagagtatcattaggctttgagtctgactatcagatacccatatacttgacctgaacctggcatatatagcagcttgaaactatagaaattggagtgatatcaagagcaactgtaatttcctttccagtttg

SEQ ID NO: 134151 - DNA, 790 bp, Arabidopsis thaliana
  unsure (1)..(790): unsure at all n locations
nnnnnnnnnnnnnnnnnnnnnnnnnnnnnnnnnnnnnnnnnnnnnnnnnnnnnnnnnnnnnnnnnnnnnnnnnnnnnnnnnnnnnnnnnnnnnnaagattcagcttaatatgttaataaaaactataggttatacaaatacaagacaaaaacgcaaacgcagcgttatgcctcttcatcaaagcatctggttccgcttcgcctccccagacgccacatacattttgattttctagtgtagtagtagtagattcgtaattaatatattacaattatagtgtcgaacctccagacttcttcaactacgtgccgttttttatataacgaaccgacacacatcactgtcgttttgaacaccacgtcatcatctccaatcgaggcggacttcacggggcccggcgacgagttcactggggtttccggaacgaaacgatgtgacttccggccataaacgccgtgactcgctccgagactcggatatcttccatctttagcccttgaagacgacgcacgtactccggcacgtggtaagagatcccaaaccacacacaacccttctggcttcacaactctcacaatctctccgggcactctcattctcggcgcttcgccgcagcttccaccgacttctgaccatgctctttccccaccgtgtgaacgaacaccgacgagaccaccacgtcgaagtaattatcgccaaacggcaacgtcttcacattttcttcacggcatgtcacatactcttgcacaccttcgagtttaaccgtgcggaaagtggaaagagtggtgct

SEQ ID NO: 134152 - DNA, 629 bp, Arabidopsis thaliana
gacgtcccttgcacccttccgtaacctggaatcctttaaagcggccgcccttttttttttttttttgttgtttataaaaccagattctaccattggtaattttgtagtaattcgttacaaattacaccgagttaaggtaaattactcaaaggctagtctctgagggccaacaagtgaagcatatgatcccttttgcgctaccaattcggaatgtgttccaagctctatgatcttcccatcagagcacacagcgatctgattcgcgctctgaactgtgctcaagtctgtgagcgatgactaatgttgtcctgtctttcatcagacggttcaacgcactctggactaaccgctcgctcactgcatccagcgcacttgtggcctcatcgagaatcaagatgggggcattcttcagcagagatcgggctatggcaactctctgtcgttgtcctccgctaagcaagcctcctctttcaccaaccagtgtatcgtatccctgaggaagtgagattataaaaatcatgagcgtgtgcagctttggctgccttaatgatgtcgtccttggacacatgctcattggggagaccatatgccatatttctcgccacggagagagaaaagagaaccggttc

SEQ ID NO: 134153 - DNA, 639 bp, Arabidopsis thaliana
  unsure (1)..(639): unsure at all n locations
nnnnnnnnnnnnnnnnnnnnnnnnnnnnnnnnnnnnnnnnnnnnnnnnnnnnnnnnnnnnnctttttttttttttttagagacaagcaaaactattaacattgatcataaaatcattacaacatgtccataaattaattatggattacaaaaattaaaacattacaaaagatctataatgtgatgaattaatgtgtagctataattaaacaaaactacattttttactatagttactacttgagataatgatctcaaaaagaagcttcatacgcttaaagtctaatttgatactgtcctttatctaaattactgtttagtatatggacatgagagatatatgagcagaggctgaaggcttaaaccttcttccctctgttctctcacacagccgcaagtattggctccattcactcagttgtctcttttctttatatttgctgtctaatctgttctttagtctcagatcatgattttgcattttctaacgaagatgtcggaggaatttacgtatctataccaaagagatcgtacctcagggttactgatctctagccacggttttgctggaccggtgaaatgtaaaaccgaagcagatttcagaatctcttgaggggattttacggatcgagaacctagt

SEQ ID NO: 134154 - DNA, 804 bp, Arabidopsis thaliana
  unsure (1)..(804): unsure at all n locations
cggatatctcnnnnnnnnnnnnnnnnnnnnnnnnnnnnnnnnnnnnnnnnnnnnnnnnnnnnnnnnnnnnnnnnnnnnnnnnnnnctttttgttttttttttttttttttttttaacaactcttcaatttatgaactaacattgactcatctttaacactcactactcaggtcacgaagcaaagatacaacaacctctgtgtaaccagttgcatgaaaaaactctagcccattcaaaataataaatgctgtattgatcatcacttggttggtggtgctggttaataaagtgaggcattttaagtagcaagagacattatttttaatatctaaaccgtaaattcgtatgaagtaggttttataggctaaagaaagatgatatacatgaatctacatctttttacttgcgaaaaatccgttaacacacatcgtgatcggactgaactttgtttctcgggggcttcccaatcttcaaacaatcaatgggaggaagagtaggagtgttgagctcaccaaatgtctgccagcaataagcatcatacattcgatacttttcttgaaccggtttaagctctatcgacgataactgcacatctacacacgggaagttatcgctacaagcgaaatgcaccggtttcacggtataagttccttttatcctctcgtaagtcactccttccactgctactgctgatgtttggttcttgcatttgctatggtcacagtagaattggtttatcgttattggaatttgtacttggttgagctgaatgtttgagaagattatccctttcactgatcctac

SEQ ID NO: 134155 - DNA, 520 bp, Arabidopsis thaliana
  unsure (1)..(520): unsure at all n locations
nnnnnnnnnnnnnnnnnnnnnnnnnnnnnnnnnnnnnnggcaactagcaagattgatgatatggcaatgcgctttttttttttgtgtgatttcaagcataagaattacataagaggaagcttgcaaatagaaagaatcaaacagaacaaggtagtgaaacatcagcattaacaaatctttaagcttttctttctcaaaacagacgtacaagaggctcgtggcgggagcatgtaatctgcaagcttgttgatcttcttctgcagactcaaatgacttgtgaaggtccttgcaataatttaccagctcgctgttgttttcgagctttcagagagtaaaagaatttgatgatgatgaggctacaacaggtctaagatgagcggtgtcatttaaccgctttacctgccacccggttttccacgaatgctgtaatacggtcacagaggaatcctccacacagatcttatgtgtcattaccgggctgcatccaaggataccggtaagaagacactttataggtaaa

SEQ ID NO: 134156 - DNA, 491 bp, Arabidopsis thaliana
  unsure (1)..(491): unsure at all n locations
nnnnnnnnnnnnnnnnnnnnnnnnnnnnnnnnnnnnnnnnnnnnnnnnnnnnnnnnnnnnnnnnnnnnnnnnnncttttttttttttttttatttaaataatctttttataatttataaaggcacaataaagtatcaaaaaaaaaatctcaaagatgctaagattcgacttatataaacagtggtactgtacaacaggaaattcattgcacctgaaaaaataattaaaaacaggtgaaagagataataataccaaaaaaatgaaaaggaaagaaaagcgaaatataaaataagagcaaaagagtctgaagttgatcaacaaaagaaagattagctttcacttacttccactgaagaaataacttttggaacattcaacaagacaacaaaatatgacttccccatcatccaccttcagaccaaattaagttcttcaatcttgtttccctgtttcacacacatatatatatatatatatatatatatatatat

SEQ ID NO: 134157 - DNA, 529 bp, Arabidopsis thaliana
  unsure (1)..(529): unsure at all n locations
tgcggattttnnnnnnnnnnnnnnnnnnnnnnnnnnnnnnnnnnnnnnnnnnnnnnnnnnnnnnnnnnnnnnnnnnnnnnnnnnnnctttttttttttttttttgttgagaaaaggtttcaactttacataaattacaattataaatcatagtttttgatttaagaatcaaatcacatttacatagaaataatcattcattcccccaagttattaaaaatgataaaatttacaaaagcaaaaggaaagacaattattgggggataatcagagagatcagttaagtcatcatttcttcaaccaaataccatccttcatcatattcttccacatggatccatcatcatcatcatccccacatcacaaaaactcatccttccatcatcatctgtatcctcatcatcatcatttgacccttcttcttctgtttcaccaccatcatcactactctgtatattcacaacttcttctacaacactccctctgttttcttcttcttcattttcttcatcataatcataatcatgatc

SEQ ID NO: 134158 - DNA, 528 bp, Arabidopsis thaliana
  unsure (1)..(528): unsure at all n locations
gattccannnnnnnnnnnnnnnnnnnnnnnnnnnnnnnnnnnnnnnnnnnnnnnnnnnnnnnnnnnnnnnnnnnnnnnnnncttttttttttttttttttttttttttctgttacacgggtcgtctttgcttgaaataaaatgagagtataacagcaatgagactcaagctctagtctgattggtgaccaaaatttttgtatgcagtagaaaaagtaaggactcaagatgtgttatatataaaacaactgttttcactcggttctctccggaccagactttcctttttttgaccgttttcttgacctcttttgtgtatcgctcccgccttctttcttttccttttgtgcattagagttagaatcggctttggatttggattgaggattctccttctttttcttcatgcatgaaagtgggtttggacccttggctctatttcgcttgaactgaggtctatccttcacaccaagtccattttttgtagaaactactcgaggcattccccattcttcatttgcaattgttg

SEQ ID NO: 134159 - DNA, 762 bp, Arabidopsis thaliana
attaggtgacacttttaaaaaactttgaacttcccttgcccccttccgtaacctggaatcctttaaagcggccgcccttttttttttttttttttttttccaaaaccacaaacttatcttactagttaccactttccaaagaaagttttcaaaaggacataaacataaataatgtcaaacagaaaaaaacatgatcatccaacatcacaaagaagaggtaaggacttcaaaacgataacaaactagaacagaggagtctttcttgaaatggagaaatcttaagtaactcagagcatgcaatcagttcttgctggaagcctcctgaagaagttaagtggaactgatgggagcttgtacctgagcctcgggtgtctaagcacatacaagccaatggcaaaagccacaacctggaagggagttatatattaaaatcactgcagctatcagacagaacaagacgaagagagcagtggcacgcgggtcacgccagcttagcaacgactgaaatctctctccttgagttgcaagatcaccaacaactgtttgaatcctaccagcaatgctcctgagtcggtcgtatctcatcctgacgatgtctgatggtcgggaagtagggaaagtgtcaaactcctcgtcgagctcatcagggtgtgctgagtcagcgtgtgagagacgtgtgtccatgtgtggaggatgtctcggcctccagcgatagtaccaaactccaatcaagaagaggtagaggaaaatggtgggcaagat

SEQ ID NO: 134160 - DNA, 450 bp, Arabidopsis thaliana
  unsure (1)..(450): unsure at all n locations
gatagtggcacttaatttctcttgcagagcgcaacagattctttactctttctctacaggcttgggtcatgaatctaaatttaatctcaaaagcttaatgtacaagcaaaacttaagacgggatactaaaaactctttctatgcttggccctaatgtagataacaactcatgttgggaagcaaagggtccctgaagataaagaatgtctacccaaaagcatcgttttcctgatcaagaattatcaccagcacagttggtttttgggaccttgaaagctccatgggcgaattagtggatgctacccaacagaacccattgtctgagagctaagctgtggactcgctggacaaccctcgaaggtgcttgtgctcatgggagcatggacccgngcttatctgngggnccnaagggtccttggtcnctgccggggncatnggnncccgnccatt

SEQ ID NO: 134161 - DNA, 655 bp, Arabidopsis thaliana
  unsure (1)..(655): unsure at all n locations
actatcgaagagctangacgtcgcatccacgcgtacgtaagcttggatcctctagagcggcctgccttggtgttaaaggcttttttctttttttaaagagaaggataagtctttattgaaaagagtttgagatcagtacatgtatacacataaaaggatagattttttaaaatggttacaggacaaagagttttaagagaatgcagagtccccctgtaccggaattcataaaagaaaacactgacccttaaaccgaaagaactctaaaccctaaacgctaaaccctaaacagactttgggttacttctaaaaaccttctcttatggctttagtactactactaaggtgatctgtataggcttaaaaaggattggtatcaagttctgttacacaacacccttttcagccacttatgttacagacaccaatttaaaaacactacatggggttttttctcctaagctctttacatgttgaaaaagttaagaaaacggatgatggtaataagatcaaaccgataattagcaggaaaatgttaatatattctgtattaactattaaccccccatttttttgttgtttctaatcatctaccttcgtccattcaaacccgcctggtagtgggttgtcgttcacaggatcaaagttgtacttc

SEQ ID NO: 134162 - DNA, 601 bp, Arabidopsis thaliana
  unsure (1)..(601): unsure at all n locations
nnnnnnnnnnnnnnnnnnnnnnnnnnnnnnnnnnnnnnnnnnnnnnnnnnnnnnnnnnnnnnnnnnnnnnncttttttttttttttttaagagatttagtactcaagtaaaattatatatcaaacgatacatgtgagcaaactcgtggatgagaaagtatctcatgaagcaacagaacagaagacatgaagaaaaaaagattattgatgatgacagaacaaaaaacagagttgctcttaaaagtaaatgatcaatcaaaatgtgaggccatcaactgcataatgaacaactagttgagagccatcgaactcaggtataccaattcagttatcttcttcttcttcttcatcttcatcatcttcatcttcctcctcagatgcttctttgagccactgtatgaatgtatcacattgtttcagatatactttgtcagcttcatccgcgcctgccttctcttcctcccatctcagtatcgcatcttcttgcaacacgtccttgtcatatagaagatgtagaatttgtgtgaacaaagggcccaactctttgtgagattcctgacacatctcttcaaattcatgatcacttctatctgttcatcaat

SEQ ID NO: 134163 - DNA, 702 bp, Arabidopsis thaliana
  unsure (1)..(702): unsure at all n locations
nnnnnnnnnnnnnnnnnnnnnnnnnnnnnnnnnnnnnnnnnnnnnnnnnnnnnnnnnnnnnnnnnnnnnnncttttttttttttttttttatagatagatgatgatagaggtgagaaggccggaatcaaacaatgtacataccagcgtgccctacattgacattatgaccgtttgtctaataccaaatcttttattttccagtacccacccagattggggtttttggatctttttattccgtctgccttttgtacgtcgtaataatggtatcttatccttaacttacgttgagagccccattcagagcttcgaccgtgccccggagggtcctttggagggtctagcccctctcttaccatagggcctcttgcccgttaatgactaccaaccagctcttcctttccttgttgaccacatttgaccagtcacaccaaaccacgggtcttcatgccgcagttggactcacaatcacatcagagcaaccacttcgtcggctcttagagggtcggtgaaaccacatcgcatggtccaggctaagtgcggcggatttcaccccttttctccggtgagggttcaaaccaacaccacacaatattaaatccgaggcaaatgcaacgacacatgcggtgcaaagcttgatcatcagaaagccttccctttgctctaacncaatagttcaatctcggaggagactttgtctg

SEQ ID NO: 134164 - DNA, 657 bp, Arabidopsis thaliana
  unsure (1)..(657): unsure at all n locations
nnnnnnnnnnnnnnnnnnnnnnnnnnnnnnnnnnnnnnnnnnnnnnnnnnnnnnnnnnnnnnnnnnnnnnnnncttttttttttttttttattagcaaaagtgtttctctttcatatcaaacttcaatacgtttccattcacatgaacattatttagcttacttgcaacaacagttctaactatcaaggagatggaggcggttgcacgcacccacaaaacgcaaaccgctttttaatcctctttcgtcgctcacctctcactccgctatagatataatcccgaagaagaatcctcgttttgctatccgatatctttgcttttgctcgatcctctctatctccttccagtttcagtaacagaaactgtaatctctgtatctccaactgtaacctaccaatcttctctgatcctcttctcgcctgttctgatatcctcctccttctgctactctcattctcatcaagatccattgatgatttgcttccatctgatctttcaaatccattttgaactttcgtcaccagtttcctgttgatgcttaacagtttctctaatgcttcttcagcttcgttgatctgtcccttgatcgtctcgtactcgttttctttttctttctcgtctttctcctctgtctccactttgattntcaaatctta

SEQ ID NO: 134165 - DNA, 630 bp, Arabidopsis thaliana
cacgcgtacgtaagcttggatcctctagagcggcctgccttggtgtttggtgcatcagttacgacttcaagggtcattaacttataaaccattccaccttgaaaaaactaaacctcttcactcgtctgagcttacaatctctgaaagaaaagaagaaaaattggtcggctcaatctttcattattcatatgttatcctcgttggggccaaagggtcgcaatccataagacatatggcacatgttatagtcggcactggatggtctcattcctcaaatgatacggctgagtccagctctattcggttaagtcgaactggcccaaggatatactcgggcaaatcgctttcctcctttccctcaatcaagatggcgagatcaacaatgaggcttgtgacataaccaaggaccagaccaataacgctcctcgcaacagccgatgatccaatatctacatcaatctccaaaaagttatcctgcctcaggtacttacaggtcacagctttaccgagcaagcaggcttttgttccaacagcccgcttgaccatccaatatccctgaacaaatacttggaattagctaaatcttgcgtcgcggaactgtcactcccatccacgaattttcccagggat

SEQ ID NO: 134166 - DNA, 708 bp, Arabidopsis thaliana
  unsure (1)..(708): unsure at all n locations
nnnnnnnnnnnnnnnnnnnnnnnnnnnnnnnnnnnnnnnnnnnnnnnnnnnnnnnnnnnnnnnnnnnnnnnnnnnnnnnnnnnnnnnnnnnnnnnnnnnnnctgaaaataaccttagctgctaaatttaaatccctctgctttctgttttacaaatttcaacattaggaggagttgttcaacaatcaacataaagtttttcatgttaaaacttaaaatcgaaaaaagacagttacatagtgaaccaaacgtataccggaaataaccgaaaaacaaagagtctttgattttacattttctccggcaagatcaagttagaccaacaaagcatcatcttttgaaatttcaagcttcttctgaggactcgttcactggtttcaatccggatttacctttgcctgatctgacacgagggctgtcgtgcgcagcattggtgttcttgttcctgtgatcatcgtctttgttctgaactgttccagtgctgtgtcggttccggttagagactgtcttcagaatctcttcacgggaagacgagctgactgcgtcgctgaagctttttctccgagaaaggatcagttttggcgacttgggacgtgtcaaaggaagcttcttgagctcaggtttcgcaggaggtgcctcgtagtagaagttggggacgggtttagccttgaacttgagattctttctaagttgcttaaggctgcttctt

SEQ ID NO: 134167 - DNA, 568 bp, Arabidopsis thaliana
  unsure (1)..(568): unsure at all n locations
nnnnnnnnnnnnnnnnnnnnnnnnnnnnnnnnnnnnnnnnnnnnnnnnnnnnnnnnnnnnnnnnnctttttttttttttttaactgtttaaatgttttaccgaacttttttccaccccgccaaaaagacggttcggagacatcattatatttacatctttaccctcaccaattatcttaattacgaatctacccctcaccgggcaaaaaaaaaagaacaagaaaaaacaactcaaacgaccaccgtcctgatactactcggaagataccctccggagattcgatcattcagatcatcttcaagctcgatcctaatcacagaatcttccgaagacgaaactcgagatttcacgctattcaagctcgaacccattgcttcctcaagccattcctctaagctaatcttacttagccagatcgcacctgcaattctctccaaagcatcatcttcaatctccaccgttagtccatccgcgagaccatttgagaaacgtttctttaacgattcagcagttttgctcttgatcggagggggggcnccgggatccgncggacngngggggacaggt

SEQ ID NO: 134168 - DNA, 655 bp, Arabidopsis thaliana
  unsure (1)..(655): unsure at all n locations
actatagaagagctangacgtcgcaacgcacgcgtacgtaagcttggatcctctagagcggccgcccttggtggtttagtgcaatataatttagggttctgaaaatttgacatagcattttcaaacaataacattgatggatcagataaataacagaaatacaccaaatgggcattactcaacctaaaagcaatcttcatattcgatagaaccggtatcaaaaaccgtgcctgaggttgnnaacaataattctactctctgattagttcgagcagcatccacctttcttcacagctgaaacatctttaccgatatcgatcttgtctcctttcgatggaacattagcggattcgctcgcagcttccatcgccttcttgctcacaatgtggtgaatctgagtgaggacttcggcgaaagcgttctcaacattggtggcttcgagagccgaggtttccatgatgtagagagattctctctcggcgaatgacttagcatcttcagtctgaacagccacgagatggcgaaggtcagatttgttgcccacgagcatgactacaatgtttggatcagtgtggtttctgagttctttcagccaagtctcaacgttttcatatgttgagtgtcgggttacatcgtagacaagaagcgctcaaca

SEQ ID NO: 134169 - DNA, 526 bp, Arabidopsis thaliana
  unsure (1)..(526): unsure at all n locations
annnnnnnnnnnnnnnnnnnnnnnnnnnnnnnnnnnnnnnnnnnnnnnnnnnnnnnnnnnnnnnnnnnnntctttttttttttttttttaacttttgaagtcttattgtacatttcaaaataaggattttgaccgtctgattacaattacgcttacacacaatgatacagttttcaaattcacacccagtggaaaaaaagttttaaagagattttcattttcttatgtggaaagagagagatgaaggacatgactcattttacactcactcattcgtccagctccaaagcttttgttctgctttcaaactgaagaagagataaaaggtttgggtaggttatgcatcaggcaacatgatgcagtcaatggctcgtttgcatattcccgtcattgttgcctctggaccatatacctctagagggacaccaagttcctctccttaaagctcgcattctagcccaaaccagtctggtaatttggtccacctcttcttancgtaatgtgcattcttgatgctttcaatctt

SEQ ID NO: 134170 - DNA, 702 bp, Arabidopsis thaliana
  unsure (1)..(702): unsure at all n locations
nnnnnnnnnnnnnnnnnnnnnnnnnnnnnnnnnnnnnnnnnnnnnnnnnnnnnnnnnnnnnnnnnctttttttttttttttgaacgagcagaatttgtgaattatacttcagaacctgatgattacgcccgccaagaacatagtaacactaatttacaaagacagtaaccacccaccaacattatgcacaccaaaaaggggtattaccgtgattaggacattttctgtttacgacataaacgaccaaatagatccaccgaattttaaagccgttatataaactaagttccatacttatatatagatagatagatgaaagtagcctaaagagaagccaagagcttctaagagactcaaaaacctcactcaaatcttcatattaatacttacagatttttttgtgaagttcagtagttgtctcttcacgcagtggacagaacttccagctctgcccaccagagtggtgaaagttttgggatagtgtcgtctggtgataatccagtgatctctcgtaatctccctgtgacttccttcattatcggtctctgtttcgcgtctgctcttatgcagcttttgatcacttcacctatattctcaatcttctcgtcaaagctttcaattgtcggatccaccatctcccttaatgtctttcctctcaagaagacagccaatccggtatctatcgagtcgccttttttaacc

SEQ ID NO: 134171 - DNA, 478 bp, Arabidopsis thaliana
gtaagcttggatcctctagaagcggccgccctttttttttttttttatcactttccatcaatgtgtgatattgtagtacttaagaaatcataatctgtttaacaacatgagtttatgtatgaaagataggctcacaaacatttgagaatgtttcaggtaaagctatggcttcttctcgttgtttatcttcttaagcttcatttattcatgtagatagagagagtgtgatcaagcgtagagatcaatgttccaaaacttggctggttggttcgtgcggtatttcctctccatgcttttgatcacttccatgtcctctttcgatagttcgaagtcgaaaacctgaaagttctcttccaatctcgcaggctttgatgtctttggtatcaccaccgtttttctctggattccccacctcaggacaacttgtgccactgtctttttgtacttctcggccacatctttgagaactggatcatcc

SEQ ID NO: 134172 - DNA, 359 bp, Arabidopsis thaliana
tttttttttttttttttttcaataaaagttgtattgatcttataaataagaggtttacattacatttgggggaatcatctgaagaaggatggctacaattcttgcttacctaccaaagcctcaatgtgtgtatcccttacttacaaaacagataaaaacaagaccaatcttcgataaagagaatagtcacataactgaacattcctatgagggaccccaaaaaaactaagaacaatctgaggaaaaagagcagagtcttgaaaccttcaattcaagtgattgaatcgttctctatcatttccctgacttcgttaaccacgaaatgcgctttgtggccgccaataacttcagcttgtttc

SEQ ID NO: 134173 - DNA, 507 bp, Arabidopsis thaliana
gacggtcgcatgcacgcgtacgtaagcttggatcctctagagcggtcgccctttttttttttttttaaaagcaaatgtggtcaagataaccataaatcaagattatgttgatacaaagagagaaaaatagttatgaatctaatagactcagcaatagaaataacaagacaaagcttgagaagcaacaatatcaatgtttgtaacacctaaaacatattattaccataactgaaatgttctctctcaccaaggcaaaccagcagacagagacttgtatatattacttactcggatagagttgctttgagatcaccactctcacttagctccataatgatatcacatcctccaattaactcacctttgtagtatagctgaggaaaagttggccagtttgagaaattcttaatcccttgccttacttcttcatcagtcaagatatcaaacgatccgaaactcacgttttctcctctcaatgctttcacaactttggagctaaatccgcat

SEQ ID NO: 134174 - DNA, 603 bp, Arabidopsis thaliana
  unsure (1)..(603): unsure at all n locations
tgacgtcgcatgcacgcgtacgtaagcttggatcctctagagcggccgccctttttttttttttttaaggtataaatattttatttggtttattctaatttttcgcagagagaccatgaatgaggcactttagctgcacaaggtctcgaaagatccctggctctcgtatagaggtggtactcgtgacaaattcagaggataaattaaaacaagtatttggaacacgctcaaactcaatcaccgattctcgaactcttctacactcaagaggttccaattcacaacggcaaaaagcatttacagaacaggatcttcgccgtgtctttcttcaccttcttagcaatgagaagcaaaccccattttgtgtaggaacatcgccaaacggctaatttgccgttttctcggacatagagcaaatctcgaagatctagataacattattggccaaaccattctcaactctaagttcactccgttgttgttgttgctgttgttgatggttatcgttttccnnagaagagagcgaggttaagatcccttggctagtcaaatcagagttcttctccccaacttcgctcttgcatagagggcaagaggcattga

SEQ ID NO: 134175 - DNA, 537 bp, Arabidopsis thaliana
  unsure (1)..(537): unsure at all n locations
nnnnnnnnnnnnnnnnnnnnnnnnnnnnnnnnnnnnnnnnnnnnnnnnnnnnnnnnnnnnnnnnnnnnnnnnnncttttttttttttttttttgtgtcacggaacaagaatctcattcataacccaacagagaaaacataaataacaactcaaatctgtgcctattgctagtactagaatctattgtttttgatacagagatttctcttggagaatacttgtcttgagatttgtctgttgtgcttgtgcatcatgttttcctccgatttaatggttgttttcatgttcgccctccaaatctttcaagtatcccatgaacaaaagaaacccgaaaaggaagaatccacctgaagagctccctccaccgtctccgccaccaccaccaccaccatcatcccgaggtgggaacccgtttccaccgtcatcaagctttggggatttaacttttccatgagtaggagcttgtgtgattgttggtgattgccgtgtaacggtctgtgtttgtccttgactgcattttgaattcagcgcagagtt

SEQ ID NO: 134176 - DNA, 719 bp, Arabidopsis thaliana
gacgtcgcatgcacccctacctaagcttggatcctttagagcggtccgccttttttttttttttttcatttgaaactgaaaatttttattccaaggtaaaggtgaaaaaagggtaccttcttccagggcttccaattgggggtgggttaattaaccaaaaccttattcaccccttgccaaaggtcaagattccaaacttagttttcttatttttaaaatttggaaatcaaacttttcttttcttaaaccaaagggccttcttattgcccaaacccatggtttaggactcgaatggggtcgtttttaccgaattcttgaccatattctgcattacttatcagccctccagctttatcgtctttcatatccactgtgattggcatctggagaacgtgtgaacccatgaagagttcaggttcacctccccacacgtgtggatcccgaatttgtctgacgtaggtgtcgaaatctccttccacgaaccattctgtttcctgtcttctttggataaactcatcagcaaccctggtacgtaattcgtcagcgagttctctctgcatcttctcgcctggagctagtttcccagagcgtaaacagaatccgtgagctacagaacgaaacaaacatctgccatcccccggaataccaatgatagagtaatcagtataaactcttttcccattgtggaatttaccatcagacgaatgatgatgcacgtt

SEQ ID NO: 134177 - DNA, 506 bp, Arabidopsis thaliana
gacgtcgcatgcacgcgtacgtaagcttggatcctctagagcggccgccctttttttttttttttttttaaatgaaataatctttaaatagagcaacatatacaaaatatccggccttagtcatacctccaatatctctcctcttctccactattacatctcctctaaaaagtttcatttcacatgtgtatatttacatatgtgtattctctcatgtacagtttactttctaaatgtctgaagatggaaccaagatctctagcggtatacctgctataggctccaacacttgagcttctgggagctcttttaacaataattccttaaatgattcaatagttccttctttctttactaggcttgctaaaagtccctttgcttcaagctcgccattttgcatcggcacaacaaacttggctttcaagagtttggcaagctggacagcgtcttcttgaccagaaacaagagtaaatcgtgggagaagttgtttgatgaccggtgtgatt

SEQ ID NO: 134178 - DNA, 519 bp, Arabidopsis thaliana
cgcgtacgtaagcttggatcctctagagcggctgccctttttttttttttctctaaatcatacatcatacagaatatatataccaaagagtattttcaagctgtattaatgaacccattacccaaattatatgatacaataaaagaatatacccccaaaagaaaataatacaaagtaactcatcttaacacctcctaattctgcgttctaaagattgattacattcactattcatttttgccatctcttcattgtcttgtccgtagcagccgatcaccgatcgttctcaactcgaacgttctcacagcaaggccaacatcacatattgtagtgtctagcacataaggagtgttctcgaacacgactcgagaatcgttaaaaagttgacgacaaggctcgcggcgctgagagatcgaaccatggtagtggaagtaacggattttgctttcagccttgtggtatgttttcccttgtagattctgagacatgtgtacgcctgtcgcgatacatctccggctg

SEQ ID NO: 134179 - DNA, 531 bp, Arabidopsis thaliana
ttgacgtctcatgcacgcgtacataagcttggatcctctagagcggcctgcctttgttttttttttttttttttaaaaaagaaaccaataaatcaacggaggaaagtcaaaaacaaaaacagaatggctttcacagaagaatcagttctttgtcttaatttaaagaaaacaaaaagtacacctaattcgggaaagacacactaacggaagacgtccaatcagaaccagtttggtctgaaaaggacttagagaatccacacaaatggcggcgcatccattcttgtcccaaccacagtccggtacagatacaacttatccactttctgcctcccctcgtgtccgttttcttccatccggttattatcattctcgtttatgatctctacattgagccatggcgctttctctgcgagccttttgcatccactgagtgtgacttcacatgaagacatccaaagggatcgcattgtttcatacttgctcacatcagcaagaagcgccgtgtccccaaacggactatcccttatcttt

SEQ ID NO: 134180 - DNA, 512 bp, Arabidopsis thaliana
gacgtcgcatgcacgcgtacgtaagcttggatcctctagagcggccgccctttttttttttttttacaaaatacaacgttccttccttattggttctcttaatcacaacattacacgtaaacatctctatatttttttaattattatttgtataagaagaaaaaaagattaaaggaaaaataaaggatttagagataaagaagtcttattctcatgatggaacagctctgtggattctcttcgctgaagtaatcacatctagtgacgtggcattgtctataagcaggtggtggtggtgggcagcccccaccccagctctcgtagactggtcgtccatagcactcgtaaggctgcggcggcattccatatccattgaatgctggccctccgtatccatcgtagtagggcccgcaacacattgctggctgcccttgcggcatcatcgggatcgcttgcggtggcggtcccggctgcttcggggcaggtgcgggagctggagcggagcgggtgcg

SEQ ID NO: 134181 - DNA, 563 bp, Arabidopsis thaliana
gacgtcgcatgcacgcgtacataagcttggatcctctagagcggcctccctttttttttttttttttacgagattattagcttttccaattgtgaggggagacgaaagaagttttacactttccagttttcaccattatcatcttcatagaaagtttgaacacaaggatatgaacttaaacaaaacaaacagagaagacaacatttgaaacacagctctgctctttttcttgttccgcagctacttattcagatcaaattccgaaaacgaagaagctttcttaatgagggaagtagccagaaacctggaagaagctttctagatggcgattccaagggatttcttgaacttctcaacctctagatagatagttgagtaaggcaagaactctgagaagtaatctccacttaggtggttaatggcaacagcaagtttcgggatctctaaggtttcttcattggtgagtgttcgaataaaccttgctggattgcctccccatagttcaccagatgggattcttctgccaggtggtaaaacagaaccagcttctaggattgagcggg

SEQ ID NO: 134182 - DNA, 509 bp, Arabidopsis thaliana
  unsure (1)..(509): unsure at all n locations
atgacgtcgcatgcacgcgtacgtaagcttggatcctctagagcggccgcccttggnttttaaatttttttttttttntttaagaggcagaattaacttagagttatcacaaaatgttctgccttcaaattgtagccgatggccgataataataagcaaaagagagattgaatttatgttttgacacatttgatcaaagaaaggtactagcgaggactactaagcacatcgagaaacatacggtttattgagggcaatctcatttgctgctcctgaactcttcttctcttgagcagaggctctggagacgaagatgatgaggacactgaagcagtagtggagacattccaggagctatttgagctgtcatcaaagtctaatacaccacttggactgtcctgatcaaccaaattcatcatcctcttcttgcttggattgtgctccaacaacagttcatagcattcatttactttctcctgattgactttgagtagagtcgttatttgaga

SEQ ID NO: 134183 - DNA, 990 bp, Arabidopsis thaliana
tatagaagactatgacgtcgcatcgcacgcgtacgtaagcttggatcctctagagcggccgcccttttttttttttttttcttcgatttgtccgattccactgataaaataaatcacgatgaagctctatccaccaagtcaattcggctggaaagaactcgctgaactaatcccgatcaaaataaccgatataaccaactaaccaactaaccaactatacctttaacatgaaccaatcttcggttgacaacataccgaacacaaccacaaaacaaaaaagcacactcaaatgccgtcataccttactaaatcaattgcggttccggttcatgagaaattgcttggttaaaccacaacccaacgcctcatcaggtaccttaccaatacggtttaatccctccgcgaaaaccacacccattcccatatgcaaatgcggttcaatgtgacaatgaaaaaaccaaacccctggattatccgtcacaaaccttatcgccgtccatccatacggatacaaaatcgccgtattccgtaacggcggattcttcaaattatacgtcttctcatcaattcccggtttaaatttcccgtcaccgtaacccaaaacccagaaatcctgacccgtgaagatgccatgggatgaatcctcacctaacaataccttttaaaaccgttaagcgttttggataatcaccgtcgaccgttacattaaacgggaaaacgtatattccgtttcctgtagtggtgttaggaaacggcggtggattcataatatcgtaatccatacggtaactcctcggcggcgatttccggttaaatccgagtttcaagttgtatttaaccgaaccgagattcggcgttgccggagtcactagagagacgttgttgatcgcccatttcgtgtatccgtcgattagattctgtgtgttgagaagaatcaaccgttttctgtatttcttcggcggcgatggtgatcccatcgctgagaagatc

SEQ ID NO: 134184 - DNA, 582 bp, Arabidopsis thaliana
  unsure (1)..(582): unsure at all n locations
nnnnnnnnnnnnnnnnngtacttatacaaacttgtatttgaacaatacctttccaaataacaattattatacaacatcactttggatattttcacaaaacgaaaaatagcaaacccaaatattctcacaactacagataaaaattatcttaagtgaagcaaaagtttgccggggtagtttaactaaatttgatgttttttcttcgatttgtccgattccactgataaaataaatcacgatgaagctctatccaccaagtcaattcggctggaaagaactcgctgaactaatcccgatcaaaataaccgatataaccaactaaccaactaaccaactataccaataacatgaaccaatcttcggttgacaacataccgaacacaaccacaaaacaaaaaagcacactcaaatgccggcataccttactaaatcaattgcgggtccggttcatgagaaatttgcttgggttaaccacaacccacggntnatcaggntccttncccattcgggttnatcctcgggnaacccacccttccntntgaaattnggtnaatgtgcatggaancaaccctggtttcgtnt

SEQ ID NO: 134185 - DNA, 536 bp, Arabidopsis thaliana
  unsure (1)..(536): unsure at all n locations
nnnnnnnnnnnnnnnnnnnnnnnnnnnnnnnnnnnnnnnnnnnnnnnnnnnnnnnnnnnnnnnnnnnnnnnnctttttttttttttttattatatgcaagaggttataactatcatatccaccatccaccatcacaagatttaaatactactaagcccctaaccccccaaaaaataaacatgttaaagctaattctgagtgaaaggctcccaacaaaagactgtagtgcataaaaaactaagtggctaaaaacgcctaacgctgctttttaggatgcatacataacccaaaagcatagagagaaagagagagagagagagaagtggtgttttagttgtggaggtaattgcaggatgctcctttccgacaatgtccattttcgcggaagaacttgcatactctttgtcccttgaagttgttctgctgcccacctgactgccctggttccaaccattccccgaatccccattcggggccctgttgtggggttccccagtaaccggctgggccccctcctgaccctccgcttgggatcg

SEQ ID NO: 134186 - DNA, 237 bp, Arabidopsis thaliana
tgacgtcgcatgcacgcgtacataagcttggatcctctagagcggcctgcctttttttttttttttttttgcgtatgaatcattaagagggatttgatgggatcattaaaagcaaatcattttgccaatcgcccaatagacgtttcaagccagggaggtttgtaagtgatacagaatttgcagtcccaagtatgataaggtaagagacttgatattacaaccgttgcaaagcaaacc

SEQ ID NO: 134187 - DNA, 512 bp, Arabidopsis thaliana
ttgacgtcgcatgcacgcgtacgtaagcttggatcctctagagcggcctgcccttgtttttgaggttatttttgtggttgttgagttggagttattgtgtgtttttattaaaaaatacgtcttaaagacgtcaagcaaatcaacatgtttatcacgctaacaacctaacgcctaacatcacacaacacatcttataatattttaacattttttccctagtaattaacaatcaacacccaatgtctaaggcctatacaaatgaacttcaaaaggtcaaaagttgaaaggggattctatgtttccacagatcccgccctcaccttaccaactgggttggataacacggtttcgaaataacagcaacgggaaaaggtccaataacgatctcaatctgcgacgggttaaataatcgatcaaagattattttccattactaatctataattaatttcataatcaacccaaactatatatccttcaataaattaactagacttaatttaataaattaa

SEQ ID NO: 134188 - DNA, 523 bp, Arabidopsis thaliana
tgacacttacaagagcttgacgtcgcatgcacgcgtacgtaagcttggatcctctagagcggccgcctttttttttttttttttttttttcggaaactatttattaatattcttcgtaaatttagtcaggtcacatgtttgaaaagggaaataatatccgataacactgcaaagaatacaatattttctgctaaaacataccgtgtactgtgtctatttcagacgtcttacaattgtgaggaaaagaaaatgaggccaaatctgtcaacaagacatgctaagatctctactaattcattcaggtggtactaaaatccaacttgttcaccccatttgcttcaaatcacggaatcagcaagaagttccggtacactgacaagttcttcccatggcagcaattgtgataaaggcgaattttgtagagcaaccaactcttccctattgtacttcaccctctgatctaaaaaactcctgggaacagcaacagaactctccggcctctggttgttcctccttgctacct

SEQ ID NO: 134189 - DNA, 532 bp, Arabidopsis thaliana
  unsure (1)..(532): unsure at all n locations
tagnnnnnnnnnnnnnnnnnnnnnnnatagtttatctggtagacacttcttacatatcatcaggcgtagaaaaacgttttcttctggcttcaacaatcgaatttactatttctaggcacctcgatgtacatttacaaagaatagaatcggtacgtgaataaacaaactatcagatcatttcttcaaaagaactcacatccaagtttctcattctctaatagaaatgaagctagatgaagatcattgggttcatttacttagcaaattgttttctatgtgttcaactaaccttttcgtccaatttgattcaagaatctgtcttttcttctacgacaacttgctttaaggtcttggcatgtgcttcgtttgtcacgggcaagtccacgagcgtgtgtggaggagcaaagtacatatggagtgacatgatgcatatgacaatacccaagaaaagctgcagtgtcggtttgaagctaaaaaggtatatggatgcaaccatagtaagtagcatcgccattgatgtagaataaacctt

SEQ ID NO: 134190 - DNA, 507 bp, Arabidopsis thaliana
tatgacgtcgcatgcacgcgtacgtaagcttggatcctctagagcggccgccctttgtgttttggtttttttttttttttttgtcgagaaatgcattaacaaagctgtatataccaactaccaaaggttgcttaaatacacaaacttgagcacctcctagaaatttactacataacatcagtcggcctacaccattaagaggttcatgtgtttacttcgcgttacatgatgcagctgatttgatacaaaacatttgtttgcttgaactacaccacgagatgaattggtcttcctgggattctctttatgaactgcttgttcttttattgcacctctgtgaaggcgtgattgataatcttcttaactgccatcatcgcttggacgagccatgttaatattacatcacctcttgtagtgaccttgggttcatacctagcctctcagacaaacatgcttggtgtttgtatgtggcatacaaagagagaggatcatattcggaggatccgg

SEQ ID NO: 134191 - DNA, 528 bp, Arabidopsis thaliana
  unsure (1)..(528): unsure at all n locations
nnnnnnnnnnnnnnnnnnnnnnnnnnnnnnnnnnnnnnnnnnnnnnnnnnnnnnnnnnnnnnnnnnnnnnnnnncttttttttttttttttattcagaactaattgtaactcatttattaattcagatgagaaatcaacacaaaatcccaagtttgtcattttcgtgagcaaaccagacacaatacattgaccgaccagaccctcccacagttcttaaccctaaaccaccacaagactctggttcaaccaaaactcttacacacacagctcattacatacaaaaaacaatcaacgacactttgaatcaatcaaatgatattcccacccccaacaaacaaaaacattaaacaaacagacaattctgagtttctgcccgacctttcggtgcttgtgctcttccatgacggttcgatcagattaaacgaatgctccttgatgattacaacttttttttttcacaacgaaatgaatcaatcattgttgctttcagaaaaaaaagccaagagatgactaagaatatacgaagc

SEQ ID NO: 134192 - DNA, 749 bp, Arabidopsis thaliana
ctattacgtcgcatgcacgcgtacgtaagcttggatcctctagagcggccgcccttttttttcttctttttttttacaaagtttattctgaaatacatctgatgttataaatctctcttttgtccacaatgatagaaagaaagagatgtgatcttaacacagtaaccagaagaagaaaaaaaaaaggaacgaaaaagccagaacaagtatatgattacttcatctctatatggcttattccaagaaaatccaaagaaaatgtaaaaggggattgagagaagctgaccaaaaactaagtctaacagcttccagaagatgacaaatccatgattatcaggcaacgttcttgtcttgctgtttgatgatattttcattggtttcatatgttgtcacttcgtcatcacttcctttggacctataccatcttgacatcaccaagaaataagcaaaattaactgccaggattccagcgaccatgaaatagaagagatccaatcttcctttgttcaaatcctcagctaaccagttaccccctgacgagttctgggttgtcctgtgaactgttgcaatcaagaagctaccaaggtaacttcgaaactcctactccaacgtaaaagatggatccagcgaaactcctcatgttctcgggaaactgcttgtactaaaacttccatcgtccaatggttgcaaatgcctttgctacacccgccagggagagctgcggattcgccacatacttgacatcgacc

SEQ ID NO: 134193 - DNA, 542 bp, Arabidopsis thaliana
agtacactatagaagactatgacgtcgcacgcacgcgtacgtaagcttggatcctctagagcggccgccctttttttttttttttttagcaaaaaaaaagtctaaacataactttctttatagagtttggtcaaaatgtatgaaatgtaaattgaagttctcacttaggggaactctatacattatttactcttaaaggcatcaacccttgatagttttggctttcctctgggaatgttcctaccataatccactctcgaagacacagcacttttattaccttgatctagctgacataacttagaccacttaaatgacatgaaccccacaacaatcagagaaactcagacgattttaagcggctttccaagaagacaatggtggagtctcagagtttttgaacgtggtcaggatgctaatggatctttctcctttcacaaaacctggttgtgcaagggattcgagctcagacatctcttcgggagtaagtttcactgataaagctccaatgttctggttgaggttttcaatcttagtggttc

SEQ ID NO: 134194 - DNA, 596 bp, Arabidopsis thaliana
  unsure (1)..(596): unsure at all n locations
actatagaagagctaagacgtcgcatccacgcgtacgtaagcttggatcctctagagcggcctccctttgttttttttttcatttaagttccattgatgtatttcaaagggttcagagttttatcgttttacaaagaaatgatgagtgttcatgactgtaaaatccaccttcatcttccactttcagtttaacggctccggctctggatccggctccactactggtgctatgcaatccaccttatatcgaagagtctttttgaagaaagttgaatatgaattatcccaaacaagtttgtagtttccagccattagcgtagagaagttgccctggtcagcttcataccgacggtaaggtaatatcagagtcttttcccctgaagcatttatgtactccacgctaaatccgatatccatgcttatcttgccttgcatcaaagagaaatcccaagcaatatacgaattttcagattccaccatcaatgagatctcataggttctcccagcttgaacgattatctccttgtactcctcattgtcccttgaccacaatatgnccagctgtatcagctgaaataaagaagggggaattggga

SEQ ID NO: 134195 - DNA, 783 bp, Arabidopsis thaliana
  unsure (1)..(783): unsure at all n locations
nnnnnnnnnnnnnnnnnnnnnnnnnnnnnnnnnnnnnnnnnnnnnnnnnnnnnnnnnnnnnnnnnnnnnnnncttttttttttttttttttttaaaaagaaatatttttatttctttatttgaaagataaacagcaaaaagaaaagagatattaaaggcggtaaatacaattattctattctatatcatattgctaaaccaaacccggtttatctaaaaccgccatgctgatgtggcaacaagtgctcttccatgccagcacagcaccaattctccttgtcgtttcgccacgtggaatcctttaacttgcgctttctccaataaacactcagcttgaaagtcggcgaactggcttagctgtatcggcctcatcccggcggcgcaaaacgcttcccgccaagtcattccgccggtgtgtctcctgtcagccgccggttctaccgcagcggagatcttcggccgtagaacgaacgcttccactatcttcttcacccaatctccgggaggagctgcagggtttatcgactccagcaccatcgtgtataactcaagagcgctgacaaactccttgcggattgatccagatccggtggatcttcggtcatccctttaacttttcccgaatgtccaccgaccccttgggtgaacgcttctgccggcaacattggttttgccaatttttcacgggggttttctccacttgaggacctaaccgaaatattatacggcgcgcgggggtgaaattcccaaaaaaccggaccggggggtccttttttctccccc

SEQ ID NO: 134196 - DNA, 531 bp, Arabidopsis thaliana
  unsure (1)..(531): unsure at all n locations
nnnnnnnnnnnnnnnnnnnnnnnnnnnnnnnnnnnnnnnnnnnnnnnnnnnnnnnnnnnnnnnnnnnnnnnnnctttttttttttttttttctagcacaacaaaatttgtgtgcaaaatcaaatcatcaaatgaaacataatatcatcttttaataatagtagttatcactctcaaaaccaacctcattatcatttatggcaaatggtactatgtagattctttctgatagttgcagcgaaaaaaaagatttaaaagtttcaagattctggtgctggagctgctgctggaggtttcaggagaggctgtagcgccttcacaactatgctcatatttggtctaaactcagcttcgtattgcacacacaatgctgccaccgctgctagcttagcaactgcttttggagggtaatcggcttttagctttggatcaatgcactgtttcactttatcttcactgagtcttggtgtcgcccaggttacaagactctgttgacctctaggcatggtatgatccaccggtttcctccctg

SEQ ID NO: 134197 - DNA, 577 bp, Arabidopsis thaliana
  unsure (1)..(577): unsure at all n locations
nnnnnnnnnnnnnnnnnnnnnnnnnnnnnnnnnnnnnnnnnnnnnnnnnnnnnnnnnnnnnnnnnnnnnnnnnnctttttttttttttttttttctttcatcaacaaaaccaatgtctctcatctagcaattttataagaatgctagagagcatcatcagtttctataagagttttaggcagtagcagagcatattaacataatcacaaaactctgctcctttcactacagacaaatcatacaataaagaagcagtgaatgcagataaaaataaagaatcaacaaagttgcactagcagagcaaacctccattcacactctctcgtcttcacatgactacttgtgtgcatacatacaagagcaaacctccgtttttcaagctggaacgagttgcttcgagccctccatttttagaccaaaggctatgtatgtatgtatattatgttactggtggttgctggtggctgcggctatatccctttcccaagaatccaaatgtcatcctcagacgatcttgcagattacagggggtttcgcacccttcngggcagggctagcatcaccnagaaccggcaat

SEQ ID NO: 134198 - DNA, 533 bp, Arabidopsis thaliana
actatagtagagcttagacgtcgcatgcacgcgtacgtaagcttggatcctctagagcggccgccctttttttttttttttatgcacacgaaataataatctcttatttcagttttcaaatcatgcatcataataaacatatagaaatttcttattacaacccgcacaattaaatcaatatatataaacaaactcaaaggaggaatttcaaacacaacacaacaagtccaagaccaagccctaatccagtattcatctcaccggagccagacttctctgactctgacggagcagccgctttcttagaggactctgaatcatctgagacatcaggagattttgattttggtggaggcgccatcggtgagatcttacgttctccaaacatctcttccggcaacaataccatgtccaccacgtaaaccgcaagaggacggtcttgtctcaatgaagtactgagacgtgtctcaacggcacccagtagatacattgacttgattcccttgaccggtgaaattaagtccgtaaacccc

SEQ ID NO: 134199 - DNA, 536 bp, Arabidopsis thaliana
  unsure (1)..(536): unsure at all n locations
nnnnnnnnnnnnnnnnnnnnnnnnnnnnnnnnnnnnnnnnnnnnnnnnnnnnnnnnnnnnnnnnnctttttttttttttttttgtaacccaaatcgattgaaacttgaaaggtcacaatactataaaaccagaaaaagtgatttgctcgactctgaaataaacagagtatatctggtcccatgttggaagttaataataccaagccatttgcacgatttctaacttctttctttccttctctaaatcacatcgctgatatgaacaactgaattctcgcctgtcctcgttccttctcctctgctccatcaagatctccaatgttgtcgtgatactcctgaagaatctgcttgacatcggttttactaagcttctgttgcttcagtagcagctccacccgcgctctcattccagaatgctcagaacaccaaatatgccccaggataacagcaacaagctgaagactgtagagacctgattctagcttccgattatatttctcatcttcatccaactcaaggtcatcaagctcaagctg

SEQ ID NO: 134200 - DNA, 517 bp, Arabidopsis thaliana
atgacgtcgcatgcacgcgtacgtaagcttggatcctctagagcggccgccctttttttttttttttaccaaacaatactaaccaatataattttgctgaaaactgtttcttgtactgtttcattgcgcacatataccaatataacgtcaccaattttttttcaatcctgggtgtggaatcggaatcttctaaaagggttaaaattcacattacaaagagaaactcatgtttctttgttaccatatcttctattagttagtggaagaacgctgactttctctcatcttcatcaaaatggctacaatcacaaactcatgatgctctataagtaactagggaaatccatcatcccataatcaagagcggcggaggccgaggaagtccgtcctttggagccagaggtacaccggagcttatgaagacgtaccctgatctccgtgaacagttgcatgctatggcattccaattccttagcgaatctcattctctgcttctacaattcaaccatttccttcg

SEQ ID NO: 134201 - DNA, 522 bp, Arabidopsis thaliana
  unsure (1)..(522): unsure at all n locations
nnnnnnnnnnnnnnnnnnnnnnnnnnnnnnnnnnnnnnnnnnnnnnnnnnnnnnnnnnnnnnnnnctttttttttttttttaaagaccaattataattatataaaagaaacgagtaacacatctataggcctctagggtctaccaccaaaactatcatatgatatttgtaattaactaccgcattagaacttttctcatctaagattttctaagaaaactttatgtataagcgtctcaagattcatgaccgacgaaccatgtttatacctcgtcgcttcctcggccaaccgccgccactcttccgccttttctctcagctttttccccttttctccatccataagttctctaaccaccgtctcgacctcctctctcttcacatctttaccaatctctatacccactccccactcgtcacaacaaaacttacaattcgtcggttgctccgaaaaacatggccaacatatcatcggaacaccaccagcgagactctccaatgttgagttccacccgcaatgcgt

SEQ ID NO: 134202 - DNA, 537 bp, Arabidopsis thaliana
  unsure (1)..(537): unsure at all n locations
nnnnnnnnnnnnnnnnnnnnnnnnnnnnnnnnnnnnnnnnnnnnnnnnnnnnnnnnnnnnnnnnnnnnnnnnnnnnnnnnnnnnnnnnnnaagcaaacaacggctaagagttgtgtattcattgtaagccacatatctattttttcttcttatccggatgtttaatcacagagactcgacagtattcagaagacaataataagtataggtttgtggagagatgatctctctttacttgggatcaacgcgggcatcgagccaagcaacgatgtcattgattacagtgaaaatattttcgtctgtatcaccttctagaatgcaatggtagccacctggatagagttttagagtcttgtcttggctgactgcatgtttgtgaaggaatttactcacagtgggatctgtgactttatcagtgtctccatgaagtatcaacagtggcaacgagaccttgtcaacttgcatctcaatgtctcttgttgcatttagaagttcaacagcagttttgagacgtgtttgatcatcgtagcatatcac

SEQ ID NO: 134203 - DNA, 641 bp, Arabidopsis thaliana
  unsure (1)..(641): unsure at all n locations
ctatagtaagactatgacgtcgcatcgcacgcgtacgtaagcttggatcctctagagcggccgccctcttttgctctccttcagaacgaaaagtcgaaaaccattataatgtgactaaatctcacatctgtatcctctccataactaagagttcaagaagaaaaaagcgtagagattactggttatgtttttatcttagtctcagagagttcgcctgagagttaccggtccatttaataagaaaagctttagtttagtcatcttcatcttcatactccagttcatcagaactacctcctcccatcactgatacgtaaatgacgacagctagaaactgagcagctagaaagaaccttgctcttttcttaaattttttctcctcttcggccttttctacctttgggttgctctttggcttcggactctttcttgggaaatgaggaagggaatgagtgaagtggaggtgaaggagatgaagaagaggctccaaggaccccggcctaaagtttctcagcatatcgcaaaggttactatgtccagaagtttgnnccgagcncgntggaactggaaccntgggtaaaaaagatggnggggaagaaggnccaacccangnggctcaaagantttgncccancagngaa

SEQ ID NO: 134204 - DNA, 651 bp, Arabidopsis thaliana
  unsure (1)..(651): unsure at all n locations
aggattaaatagctgattttattattttttgttacaccaaggtttaaatttatgggccgagcccataacagtttcagagataacccaatagaagataaccggaaatggaacagatctagatgtgttgacaaattataccaaaccaaaaaacagagcatgaatcatccggatgtaagtagattttagtcttaattcctagaaaaagagatgttcttgttcagaagtctacctgttattctaagaataggatgattttaatatcattgacgtcttctaactactcttaacttcacaagtcttcttatctctttgactgatcctatgaagctaagaacttcatacatatcggaggttttactccggcgagggcaagcaccgccgcaggtaaagtccaaagcccttcgccacagattagccctgaagccaccgccggaaccataaactctgctttcttccgattcatcttctcccaaacaaacacaatcaaagtcccaacacacatgtcgattgcgaaataagctccgacaagaaacggaacagccatcgccgtcggaagtggcatgaatcttccaatcttcgccggagtaagatctctgacgacgttcgcntgcaaacggccgnggnaccggttcggcggccgaggncantttt

SEQ ID NO: 134205 - DNA, 519 bp, Arabidopsis thaliana
  unsure (1)..(519): unsure at all n locations
ccaaattaattccgacaataatgaattaataggtcacgtgcatttacatgaacatgatcagtcgaaatttaatacacattggctctttgtttcttcatgacgcctttttttttttttttgttagcaacgtagaaatttccatagaactaaaaacgaaaacattacaaatccctccccaaaaaactgtatatttacatattcttaacaaagttattacttagttctattctccaccacccccaattcgaccgagcccgaaaaaaaaaacattccgtcttatggtttaattaccttgattccttcccttaaccttttgttgaaaattccaaaaaaattgaccccagggaaattcgactgaaccttaaaagaatttgaatggtcaagaatttggtttggctttggttcttaccctaatattttcccttaaggaacttttttatactcatataacccatctctattgnactgaaccctccatcctctattgatctgatcgttgactgtgaatctatccctgac

SEQ ID NO: 134206 - DNA, 634 bp, Arabidopsis thaliana
  unsure (1)..(634): unsure at all n locations
gtgtcnnnnnnnnnnnnnnnnnnnnnnnnnnnnnnnnnnnnnnnnnnnnnnnnnnnnnnnnnnnnnnnnnnnnnnnnnnnnnnnnnnnnnnnnccttttttttttttttttttcaggttcacaagtgaatgggttatcacttatcaatatgaatataggtcaagcaaagtgccacgactcaagttggaataaccaaagttgcaggaaaatatcaaacaaattttttttgtaactaacaatgagcctacaattgaagttctcactatttttttgactaatgacttttcaacttttcttccacgagctcgatgcatcgatatagaaccaattcaattgggttcagaagccctacatcgtcgagtgaagattcttggccatgatcctccttgaggttctcagcgatgctgcagctcacaagagttcgaagaggcagaagccattcccttatacgctttccccagatcctcctttggccaaatatccctggcggacttgggtccccccttacccggggtnaaatcccccgggtccaaaaaaagggggaaccctgtaaggggtaaagggcncccacgggttttgaaggatggnanggggaaagnaaagncccgggacacnnggccgggnggggggggct

SEQ ID NO: 134207 - DNA, 489 bp, Arabidopsis thaliana
aggttcacaagtgaatgggttatcacttttcattatgaatataggtcaagcaaagtgccacgactcaagttggaataaccaaagttgcaggaaaatatcaaacaaattttttttgtaactaacaatgagcctacaattgaagttctcactatttttttgactaatgacttttcaacttttcttcccacgagctcgatgcatcgatataggaccaattcaattggggttcagaagccctacatcgtcgagtgaagattcttggccatgatcctccttgaggttctcagcgatgctgcagctcacaagagttcgaagaggcagaagccattccttatacgctttctccagattcttctttgacaaaatatcactgccgactttgcttctctctttacctgcttcacattctctcgattcaaataacagtgcaaacctgtagaggttaagtgccgccaggatttttaaagaattgatataggaaaagaaaag

SEQ ID NO: 134208 - DNA, 482 bp, Arabidopsis thaliana
gaaggctggcccccctgcaggtcccggcccggattaattcccgggtcgacgagctcactagtcggcggccgttcgcgatctagacctagctcgagccgttactaaactagatctagactaacactaacgaattatccatttgtagatggagcctcaacagcagctaggtctagagggaagttgtgagcattacgttcatgcatatcttccatcccaaggttagcgcggttaataatatcagcccaagtattaataacacgtccttgactatcaactactgattggttgaaattgaaaccatttaggttgaaagccatagtactaatacctaaagcagtaaaccgaatacctactaccggccaagccgctaagaagaaatgttgagaacgagaattgttgaaactagcatattggaaaatcaatcggccaaaataaccgtgagcagctacaatgttgtaagtttcttcttcttgcccgaatct

SEQ ID NO: 134209 - DNA, 486 bp, Arabidopsis thaliana
  unsure (1)..(486): unsure at all n locations
taattttttattatttattattaatatttattattaatataataaataaagtaaaatatgatactctataaaaatttgctcatttttatagaaaaaaaacgagtaatataagccctctttcttatttaaagaaggcntatattgctcgttttttactaaactagatctagactaacactaacgaattatccatttgtagatggagcctcaacagcagctaggtctagagggaagttgtgagcattacgttcatgcataacttccataccaaggttagcacgggttaataatatcagcccaagtattaataacacgtccttgactatcaactactgattgggttgaaattgaaaccatttaggttgggggcntagtctaatacntaagcagtaaccnaataccnnttccggcaagccntaagngnatttaaagaccgggttnttgaactgcatttggnaatatncgccaataccgnggngtnaatgt

SEQ ID NO: 134210 - DNA, 796 bp, Arabidopsis thaliana
  unsure (1)..(796): unsure at all n locations
nnnnnnnnnnnnnnnnnncactatngaccgagcatgccctcgtacgtaagcttggatcctttaaagcggccccctgtgttttttctctcggagattatctttctataattttagagaggaataaattacaaagcactctgagaaaagggcatatatctcacacaccgcatatcgacaacaacacccgaatctaatactcacatgatttatcttaaacccaactttctttttcctaactcaacgtgaaaccgtacgtatgtctttaagaagacccaagacctgttgcattgttggtcgcttcactggcgtctccgccgtgcaaaagtaaccaattcgaagactctctaccatctcattaaccgattctccagcagctaaccgcaatctcgagtcaagagcttcctctcctcttctctccttaaccaaccggcgaacggatttaacattctcatcactcccttgcttcccggttaataactcaaacaaaatcaccccgaaactatacacatcgaattctacattgtttttattagtaccatctccggttctcgcaatgttgttgataccgaaatcagaaatacgcggctctagggtttcggttaggaggatgttggtagcgactaagtgtccatgagtagtaccaacgtggtgttgataggctaaaccacgtgcaactcctatggcgatacggtgacgtattagccaatttgttttctccggtgatgagctccgacgtnantcttccatgtatcggnactccaatcttccacgttggttntctcccgccgggagctta

SEQ ID NO: 134211 - DNA, 529 bp, Arabidopsis thaliana
  unsure (1)..(529): unsure at all n locations
nnnnnnnnnnnnnnnnnnnnnnnnnnnnnnnnnnnnnnnnnnnnnnnnnnnnnnnnnnnnnnnnccacgcgtccgcatcacttaccttcttcacagagagagagcttcatcatcatatgtaatgtgagatgtctcttgaacaatagcaacaagaagctctctctttcctctcgccctctctcccttcccttcaccacaattttccctctctttctcgcctccgcttcaacaattgtcccgcactttccttcaaaccaaacacttcatcatcatcttcatcattcttcaaatccccagatataccctctctctcctccaccacaacaacaacaacaaccaccgaaaccctagaatcctcaatccacgagaaactcatttacctcgattcactcggaatcgatttcctaaccctaatcaaccgtcatccacctctcctctccaccgctctctccgccgttgaatcagtcgtcgattacatgaccactccaccaataaacttcactttacaagactttcgccgcctcgtctc

SEQ ID NO: 134212 - DNA, 521 bp, Arabidopsis thaliana
actatagaaagactatgacgtcgcatgcacgcgtacgtaagcttggatcctctagagcggccgccctttttttttttttttttttgagatgacgtcagtattgtgagacacggaattgtgttattgcaaaagcgctaattaaaatttatatgaagaaaaaacaatagaacgtggagcagcttgagcaaaatcttgaattggctcaaactttagagaaaacatttaactcagaaatccagatggagaaaccgatatcattcaacacggtctgatccggttacgatcctctggaagatgttgaaccagctgttcaaatactgcaatgcatcctacttgaggtcgaaatccctagtctccgtgtggttcagattcatgagatatagagcgtgtgcactactaatattcccaacatgccattaatcccccgcgtaatcgtacgtttcagaatcagatctaacatcctaaggtatctttgccaccatcttgcacttggttgacaagcgtccggtaaatctaaaccc

SEQ ID NO: 134213 - DNA, 513 bp, Arabidopsis thaliana
  unsure (1)..(513): unsure at all n locations
nnnnnnnnnnnnnnnnnnnnnnnnnnnnnnnnnnnnnnnnnnnnnnnnnnnnnnnnnnnnnnnnnnnnnnnnncttttttttttttttttttaattaatatataactagaaaattcattggaaggtatttaaatgtatgggctaactacatatgaaatatttcataaatccaaaataaaagacattaccgttcagagctaataaggtgtggataaaaagcttcctcaaaattttgtttatagaagagatgatgatgatagtgaaaggattaatgcccctagtggaagaaaaaataacactaatgatggacatatattctagggatgaggttgattgatctttctgacatcaagtatatgtatggtcacgccacgacggctgactgctacactacctttttcgtaaagcctccatagctatttcaatcgacggctgcttggttttgatatttgagttgctcttcctttgtccgcaagttttagagtctttgtcaattctcgtacattcgtggaa

SEQ ID NO: 134214 - DNA, 576 bp, Arabidopsis thaliana
  unsure (1)..(576): unsure at all n locations
gtgcttgcgattgttttcnnnnnnnnnnnnnnnnnnnnnnnnnnnnnnnnnnnnnnnnnnnnnnnnnnnnnnnnnnnnnnnnnnnnnnnctttttttttttttttatatgtataatacaataaacatgtttttgaagacactaatccaaatgagatacagcttttatttagccaaatttcatctcaaatgtgtcatcttaaattttacatttaattgtcatagaaagggcccatgtcattctctacaaacttttggcttaagattttataagctctttccgttggatggtaagagtcccaaaacataaaagaagacacattcttgcaaagaagtgatgtatatttgttgcaaagcggacctaattcgagtagccccgtcccgcaacatcctctatcaatctcatcaaatccatattttttggggttttgaatcatatcattgaaagaagagtagatgtcaatatacacccaatgtggtatttttcatgggtttagccaattcgttcaaacttgtggagagtttggaattaaaaagctgagctgcaaagttgagttcatcagcacattttcttttaa

SEQ ID NO: 134215 - DNA, 517 bp, Arabidopsis thaliana
  unsure (1)..(517): unsure at all n locations
nnnnnnnnnnnnnnnnnnnnnnnnnnnnnnnnnnnnnnnnnnnnnnnnnnnnnnnnnnnnnnnnnnnnnnnnnnnnnnnnnnnnnnnnnnnnnnnnnnnnnnnnnnnnnccaattaactccccaatctattataaaagccattgacttcttgcttttggattacaaaaaccaaaagtgggcagtcgataacgagacccgcggaaccttaagtacctaactaaccttaggccacagcctttttgtttctccgaccagttaatggcttaggcaatcctgtcaaaaatagaactagccatggctacttgggtgagtaactcaggtttcagggtccactttgaggttggccatagcgatgaaccgttgctgttacagtttggttcttgtagactagatgcgctaacagatttcctcacgcttgagaagctgtctcccacaggagcatccatcaaattgattggtatggaattgagatgtctggtttctgctgataagttaactctgcttgatgctttggaa

SEQ ID NO: 134216 - DNA, 528 bp, Arabidopsis thaliana
  unsure (1)..(528): unsure at all n locations
gattagnnnnnnnnnnnnnnnnnnnnnnnnnnnnnnnnnnnnnnnnnnnnnnnnnnnnnnnnnnnnnnnnnnnnnnnnnnnnctttttttttttttttttttaggcaaaaattgggaccttttagatgatgtctgtaatgttaaacatgtaacatcaatcataatcataacctagactaataatccataagaagaagaagaagcttgaaaactatacattacagagagaaaatatttagaaactactatgccaaattgctccatcgccttcaccacaacggtgatgtacttcaagcattctatctacggatttgcagattccactacagctccaatcgaacgatgctgcgcaagggtttcctgcttgacccttccactcacaatctaaaggtgttccacagcagaggcttctatcgtcgatatgttcaacatcgggaccaatgaaccaagaacctaaagagacatcttcatttgcatacttgtgaagtagttgccggttaactgagatataagttgctaaatctttgg

SEQ ID NO: 134217 - DNA, 519 bp, Arabidopsis thaliana
  unsure (1)..(519): unsure at all n locations
nnnnnnnnnnnnnnnnnnnnnnnnnnnnnnnnnnnnnnnnnnnnnnnnnnnnnnnnnnnnnnnnnnnnncttttttttttttttttttttagtcacaattttcgagtttttatcatttattagctgtataaaaaataaatttcccccttacaggaaaaattacaaataaaaaccaacaagttttaatcattttataaaattataaaaccattaaacggcaaaaacacgacattaaactccttgattcactgttacataaactgtcccagtaacaggagcgtttgtctcaacgaccacccggttatcagaaacgttccttagcgcgtgcagaggaaacacgccagcttcactcgccacaagtgtgtactgcacgtggttgattaaatccgggaacaacaaaaccgggttaaaatcaacggtccaagacgtcccgtttccatctaccgaacctctagccaccgtcgatttctctaccattccgttcacactggtacggncaacgaccacctggccaacgtt

SEQ ID NO: 134218 - DNA, 494 bp, Arabidopsis thaliana
agaagagctatgacgtcgcatgcacgcgtacgtaagcttggatcctctagagcgggcggcctttttttttttttttttaagtaacgatttattttttctcattttcatagaacaaactatcttacctcatatgagaagcccaaaaaacgtggcttcggttttcaaaatttacctccctttggttcccccaaccccaccccggggaccaaacaatatactttagactctcttctcgtcaatcggacatctccacttcagggggcttgtcctgttggtcctcaggtgaaatcgtagaagcaagatcttctactttcaggggagaatgtcgggccatatattgaaacatgatcttggaatagctatcagcaaaggctcgggctcgatttgatacaccgatatattgcaaatccgccttctcaaatctaccatccacacatttcagccctccatcgccaatggcaaagcgaataagacttcctgaagacagccctgac

SEQ ID NO: 134219 - DNA, 508 bp, Arabidopsis thaliana
  unsure (1)..(508): unsure at all n locations
nnnnnnnnnnnnnnnnnnnnnnnnnnnnnnnnnnnnnnnnnnnnnnnnnnnnnnnnnnnnnnnnnnngcctttttttttttttttttaaaggaaacactaaagcttcagcttcaacattgaaatatatatacatgagtaggctaagatgaaaatgtgatgaccaggttgtatcgaataataatacaggcccctcaaagcaaggaaagaagaggtaaatcttatctctacctttcccataatgaactttttccctctcctaaactttatccaatggggctactaggcattatccagcctgattcataccctacgcccaaattggctccacggtgacgcttcttcattggtgccgcagatatagagctcccatgggtgatggaaggcagagagctttctactgaacagttgggtggggatggtgtttttggtgtctattgctactgcaagctctgaccacgatgggcttatcatcatctttggtgcatcgaagtacgggactgatgttcc

SEQ ID NO: 134220 - DNA, 779 bp, Arabidopsis thaliana
  unsure (1)..(779): unsure at all n locations
nnnnnnnnnnnnnnnnnnnnnnnnnnnnnnnnnnnnnnnnnnnnnnnnnnnnaccggccctccttgggtcgacggttcgatagctgatatcgaatcgggccggggagatttgtgtgttcttaatagaaaggtttaaagaagtttggtgctacaacaaatcaatagtgatgacacttagaagaagaatctaatcaaagaggggagagacaataaaaactagatggcctaattaaggattcctaaaggctcttctcatgttgggcttaatctctcataatatacaaacaaaatactctcaacaactacttctaacaatcttctctctttcagatcttcaaaggctttgttaaactgtaaatgtttctactccaattgctccagaggcacacgaacaaataactgcccgtttagggttaccacagccgatgtgtgatgcggatcgattctcgttggtaaacttaccacctttttgaaaggagtagctccccaaggattcatagggttctggggttcgccaccttttacttacccgcccagccggatctgattggacttggacctctttacggactaatcctgggactgatgcatacacctcaaagaattttggcgttctctgtacgataatctttacccagtctgtctggtgggtcctacctttttccaacacgagaccatcccaaccttagtattttacattaccttggggattggccatttttttttgcctccaaggtttcaaacaaacccccttctttaacgtttatggaagaaaaaaa

SEQ ID NO: 134221 - DNA, 629 bp, Arabidopsis thaliana
ttagaagaagaatctaatcaaagagaggagagacaataaaaactagatggcctaattaaggattcttaaaggctcttctcatgttgtgcttaatctctcataatatacaaacaaaatactctcaacaactacttctaacaatcttctctctttcagatcttcaaaggctttgttaaactgtaaatgtttctactccaattgctccagaggcacacgaacaaataactgcccgtttagggttaccacagccgatgtgtgatccggatcgattcccgttgggaaacttacccccctttttttgaaaggggctagctccccaagggattcatagggttctcgggttcgccacttattactaacccgcccagccggatctgattggactcggccctcttcacggactaatcctgggactaatgcatacacctcaaagcaatcttgcgttctctgtacgttaatcttcacccagtcagctggtggtccaacatcaacaacagtcacatccaacatagatttagatacatggatggcattttttgcaccatgttcagcagccctcttacgtttgagcaaaccaggggtgggtcccatctgtttttcgcgcttttgaagaaaaaataaggttttac

SEQ ID NO: 134222 - DNA, 528 bp, Arabidopsis thaliana
  unsure (1)..(528): unsure at all n locations
ctatgacgtcgcatgcacgcgtacgtaagcttggatcctctagagcggccgccctttnttttttttttttttttattttttttttnnaaagacaaaaatattcacaattttattacaaaatcaagaaagggttgcttcctttaagagattaagaaaaaatttgaacaaaaaattgagggaaccagctataatgattataataataataaagtttaattagaaagctaaacaacaaggattagaacatagatttttacaattgcaaaaacaacaagaacaaagtcgtcccttgggacaactaaaacaagatgaccatctgatcttgcagttgcagctgcagcatgagctcttttttttattcagacacgacgggcgagtgcaactgcaactgcggaaacagctgggaatgcagcaagacatgtccggacaagaacaccagcaacctcggaagcatgaacagctcgggcagcttagtcttgggcaacaacaaatgtttgagcagcatgacccgtcacagcatttggaccc

SEQ ID NO: 134223 - DNA, 505 bp, Arabidopsis thaliana
  unsure (1)..(505): unsure at all n locations
nnnnnnnnnnnnnnnnnnnnnnnnnnnnnnnnnnnnnnnnnnnnnnnnnnnnnnnnnnnnnnnnnctttttttttttttttgtataaaaagagttagttgtcgcataagcatgaaaacaaagaagaaagcaatttgtttatagctatctttctcaagtaaaatacgaaaactcgttcttcataccaataaagggtgttaactaaggagttgcagagatttcagctaatggtcgttcaccaaccacaaaccgcagtttttacggtacaacggcctcgagaagcttctcatacacttgtctagctgataaatcctcgaccacgaggaggtttgatttgctattccaacctctttggagagtcatctggctcaaccttaaaccaagaacccttcccatgaattccagaagctcgttgttagcttccccacgggctgctggtgcagcaacagtcacacgaacatcatcagcatttacccttgtgattgctgaacgttgtgcacggtctt

SEQ ID NO: 134224 - DNA, 515 bp, Arabidopsis thaliana
  unsure (1)..(515): unsure at all n locations
nnnnnnnnnnnnnnnnnnnnnnnnnnnnnnnnnnnnnnnnnnnnnnnnnnnnnnnnnnnnnnnnnnnnnnnnnnncttttttttttttttttttctttttagaaggaacaggttttacataatcatctgagttagaagacactgttactgactaaaaacactgcggcgattgtaaaatgttgatttcgatgcaagatcgaaacttgacataccatgaagaattgaagatatatcaaccgatacaacatcaatgattttcttaattcttaccgagtttggctatgcattctatacttcacagctttcatcgccgcttttgcaaaaatatgggcagcttcagcttcggcttctgctttatctgcctctcttgctgcttcttcagcttctgccattgcaaattctgcttctgccacagctcttgcagctgctgcagcagcttctttttctgtcatacccattatcataacttctccacctacttgggatttagtaagatttttgacgccattctcctc

SEQ ID NO: 134225 - DNA, 519 bp, Arabidopsis thaliana
  unsure (1)..(519): unsure at all n locations
nnnnnnnnnnnnnnnnnnnnnnnnnnnnnnnnnnnnnnnnnnnnnnnnnnnnnnnnnnnnnnnnnnnnnnnnnctttttttttttttttttttgtttaaataaaagcattaacatcttgttgtgtatttttacataacatttttggaactcaatacaggtgacacaaacaaatttatttggtggagatagtttgaatcaagatcagctctctgtgaagaaataggaattatatagaacaaggcctcgtcccattcctaacctaagaagatcccgtacataatgttgcttactttttgttttacggacccgattgtactctccccatgttgggcggatatgggtaagatgaattggtcaaggacgagatgtcaccattttgagtctcgttctttgtttctctctggccgtactgattcataccgctatttaagctagcatagtaggatgacatgggactagcctgaacaaacctgaaattgactccatttgggtgagtttggttgacaagttgttgattt

SEQ ID NO: 134226 - DNA, 512 bp, Arabidopsis thaliana
  unsure (1)..(512): unsure at all n locations
nnnnnnnnnnnnnnnnnnnnnnnnnnnnnnnnnnnnnnnnnnnnnnnnnnnnnnnnnnnnnnnnnnnnnnnnnnnnnnnnnnnnnnnnnnnnnnnnnnnnnnctgcacaaggtataatataatttgattgtgaccgatctaattattcatctctaccaaatgttacgactatgttttatcacatcatctgcacaagacttatctagctttgatacaactaactgaatcctattacccagacagggactgagtatataatagttccaatcgcaaaagaaaccacaatggtaaaagatgcatacgcataggctctccatgggtaatcactttctctcatcgcattgaactcagccatgaaggtcgaaactgtgctcagacatcccaacagaccaaactgtatgctcgaagcaaccgtgttacatgttctcgtgttcaccgatttcttcaaggtagccaatgctgccataacgcaagctgcaactacatttgcaatgagggtgccaaatgggacc

SEQ ID NO: 134227 - DNA, 700 bp, Arabidopsis thaliana
  unsure (1)..(700): unsure at all n locations
gttacactatagacgagctatgacttcgcatgcacgcgtacgtgggcttggatcctctagagcggccgccctttntttttttttttttttttttttttttttttttnnnttaaagcagacaaatcgtttgtgtacttttttgtgtgtcgtttttgaaatatttgctgtttcattacaacgacaattgctactcaaacacacaagtaaattacatatctcatgatattacacaattgagaaacagaacaagatacagagatctcttgtattaatgtaaaaaaaacaaaacaaatgatgagtagcttcaattagaccagacatggaggaggccgtgtctgtttcctgggtatatttcattccgttcttcgtcgtagaagagagcggttatgtcttccaaagcctcagcaaccgcacttctccttcgagaggaattccccaaatcactactgctgcagtcctcttccttaggaggaccattatttgcttttatcttagctaagcatttaccagtcaagatattgcttatgttaatcgaccccgcatttccttctatccactgatcttcagtatctgccttgcaatttgagatgatcagatcttgatcgcttgttatgtagatattggttgggttacagtctggatgccaaagaagatgatccttaaaggagggcacaggctttccggggaaattccacacaaa

SEQ ID NO: 134228 - DNA, 618 bp, Arabidopsis thaliana
  unsure (1)..(618): unsure at all n locations
nnnnnnnnnnnnnnnnnnnnnnnnnnnnnnnnnnnnnnnnnnnnnnnnnnnnnnnnnnnnnngagtgaatatcatctttttttttttttttttaacgcaaagaaaataagatcacttttaggtaagcaaacacaacaccacatagctacaacaacttataattatacaaaaacaaaaaaagcttataattaaacatattgttgatgtatgcatgtatatgtactagatagatatttaccgaaaatatcataatagtaacataaccaaagttactattaaccacaagctgaaaaaactcagctctagttaaagtcaaaagctaacgctagaaagccaaacataattaccgactacactgttcttcttcctgctttgctttcagaatccagctttggacggttcacaaacgcggacgcagccaccaccaccgcggtagtagttaaacgccgttcttttgactcactacaaagagcttctaaaacgagaatctcgggctttcaccttccatggtggatatcacccgtttgttagtgaagagattacagtgagagataagagtgttctcattggcattctgcgtttacaaatggcagctatctcatccataacggtatggaa

SEQ ID NO: 134229 - DNA, 526 bp, Arabidopsis thaliana
  unsure (1)..(526): unsure at all n locations
gannnnnnnnnnnnnnnnnnnnnnnnnnnnnnnnnnnnnnnnnnnnnnnnnnnnnnnnnnnnnnnnnnnnnnnnnnnnnnccacgcgtccgcttagaaagagagagagagagagagagagagagagagagagagagagagatatcaaaccagaggaaaagagtgacagagaaagtggtcatctttgtctgtctctgtccgaaactcaggagccctaatctctgaatccatcaagaaagctctttctcttccttcttttatgcttctgaatttgctacatatataaactatctgaagaaagctagagaataagatgatgagtctaagtggaagtagcgggagaacaataggaaggcctccatttacaccaacacaatgggaagaactggaacatcaagccctaatctacaagtacatggtctctggtgttcctgtcccacctgagctcatcttctccattagaagaagcttggacacttccttggtctctagactccttcctcaccaatcccttggatgggggtgtt

SEQ ID NO: 134230 - DNA, 509 bp, Arabidopsis thaliana
  unsure (1)..(509): unsure at all n locations
nnnnnnnnnnnnnnnnnnnnnnnnnnnnnnnnnnnnnnnnnnnnnnnnnnnnnnnnnnnnnnnnnnnnnnnnnnnnnnnnnnnnnnnnnnnnnnnnnnnnnnnnccaaattatactcaatatcacattttcctttctttcataaaaaaaagttgggtgcaatcttaatcaaaacaatcacccgtaataacccatctctaaaacagtctcaaagtacaacaaaaacttaaagctctcgttattcttaaaattccaaatgtggagactcaagaaaagctctctctcgtggtatctccaccgagaagaagaagcaccactggctgcaccgggagggattctgatcccaaacccgaatccagtcctctttgcatcagatgaatcagtagaatctcctccatcttcgccaccggaagctgaccctttggaaacaaagccgcttttctcgggggccggagcaggaccaccgctggatccaaacttggttaatggcagcaaatctggatcaacctg

SEQ ID NO: 134231 - DNA, 524 bp, Arabidopsis thaliana
  unsure (1)..(524): unsure at all n locations
ggnnnnnnnnnnnnnnnnnnnnnnnnnnnnnnnnnnnnnnnnnnnnnnnnnnnnnnnnnnnnnnnnnnnnnnnnnnnnnnnnnctttttttttttttttttttggcaaaaggcagggtggatttatatttgaaccttggtacggcaggacaaccggctgcgaggcaaataaaaaactctacgactcagtcagggtggtttcggagagaaacagcaaattataagaaattagttaaaggcagctaatgtaattgtaaccagaaggaggggaagccccgacaaagttacaaaaaattacgaggagggacactggaacggaacggtcaagagggagggagagggagggggaggccatcgaacggattagacaagagggggggaacttaaacaatgttgtgccatcgggaagattcaacccacaacttaccacaaaagtgtgagccggctagatccgtccgtcggcacaaaccttcaagtgagaaccggcattgggggggcatcaaggggggctctagaacaatagac

SEQ ID NO: 134232 - DNA, 503 bp, Arabidopsis thaliana
aggggacctataaagaagcttgacgtcgcatgcacgcgtccgtaagctgggatcctctagagcggccgccctttttttttttttttcctgcgccaggttttataaatttcaaacttatgtcttaccacaccgcaaataacacgaaataaaacttccaaatgacagatttgaaaaaaacaaacaaaccacactccaaagtaaaagtaaatgtctcacatttgttccacaagatataagaagagttttcttgtttcaatcaagagttaatcttcctgcaattcttcctgatttcgccactagaacctgtcaagggagagatatttcccatcttgatcatcgattccgcaaattgctcaaaaaactctccttgatcttctgcatacttcttcacaagctctctcgatttctcgttactgctgaacagaacttggtccgagttcaacaaccccttgttctctatcaagttcttgaagtagctgttgtcgaagctcgcggcgctgatg

SEQ ID NO: 134233 - DNA, 567 bp, Arabidopsis thaliana
  unsure (1)..(567): unsure at all n locations
tcgcatgccccccttccttagcctggattcctttaaaccggccgcccttttttttttttttttttttttaaagggaaaccattaaaccctcggttttattggtaaaaatggtttcaaattataagttgggttggtccggatcacagataaattagctacacaatccataatccttgccaaaaacgctattaagtagtaccccattctctacactaatcttctttcaacatttcctcagaagcttccttatgttcttccaacaaccaattcttcatgcatgaactggcctagcaccagaagaaagctgcacattcgcggcatattcacgtgcccacaagtcatagtgaacaatctcttcaagagacggtgatgttaccaactcgtttcgatgtttatcgcatggttaattccacaaccttggaagatatcccaaatagcttatcttttcatcaatggacatttcaacagctttctcattggcggcgtgagaacncagtcattgggccncagtcgncagagataagcagntccaggntggattccatggccgggtctgaagcatgaccg

SEQ ID NO: 134234 - DNA, 508 bp, Arabidopsis thaliana
  unsure (1)..(508): unsure at all n locations
attgannnnnnnnnnnnnnnnnnnnnnnnnnnnnnnnnnnnnnnnnnnnnnnnnnnnnnnnnnnnnnnnnnnnnnnnnctttttttttttttttttttttttttaggaaaaatcctaagattattaagaagaaagcaaaccaaaatccaaactaaatcgaacacaaagcaataattctaatggagagggagaattcagcaaatgcagctatctagtgtagaggccattgcagtagccgttattatatcttacatcagccaagccattgggagatttcttggaagttccattgatgaaaatgtttgttggaccgttactaatcgaatgttgatgagcagaagctggattcaggactgtgtctaactcgccacacgatgctgcaatgagccctaaaaacagaggagaagctttcccgggtctggatttgaactcggggtggaattgagcaccgataaagaaaggatggtttggaagttcaatgatctccatgcgtttgccagtttcatct

SEQ ID NO: 134235 - DNA, 600 bp, Arabidopsis thaliana
  unsure (1)..(600): unsure at all n locations
tgtaagtcgcttgagagagttgatattggaggcataggagagaagcattgtcaaacaaggacaaaccgatatcaacatttatagttccaatgggattcttttgatcaatttgaaactttgcttctttttttgataaacgagattttatttcacaaacaaacacggttacaattaaagggccgtcatatttgggccttcaataagccatattttacattattggcccagttacattaccggtaagcccagttacgttaccactgataacagtcctttagtttcctccttctgctctgcacaaagtaacgagattaccgaactgaatcagaggagcagcttcttgccagatgtttcacatcttccaacagtttcaccgcatctctcatcgttggtctcattgccggatcttgctgtgtacaactcagtgccagttccgtcacttgcatcacctgctccctaagactcgaatccagaagctcgtccacgagaatcggattcgacgattgttgttaccataatccctccacattgttgttgctggctggctcaaggcagatttcacccagcttaacnaaacngggactttccgggaagatttgt

SEQ ID NO: 134236 - DNA, 691 bp, Arabidopsis thaliana
  unsure (1)..(691): unsure at all n locations
nnnnnnnnnnnnnnnnnnnnnnnnnnnnnnnnnnnnnnnnnnnnnnnnnnnnnnnnnnnnnnnnnnnnnnnnnnnnnnnnnnnnnnnnnnnnnnnnnnnnnnnnnnnnnnggattcatttcatttcttataaaaacgaatatcaaacagcaatcatttacattttctttcaattgaagtaaccacaatgtacaacatattaagagcgacaccatctgttttggtcatatcgatcagctctctaagtaaatcgcgtctctctttccccagccgaggccattagaagccccacagcaacagtaaacatcaccagcattccaacaagcaaagcatatgttcgcgtagatgatctcctatactccccaaacagatatatcccccaaaaagtcgatactaaaggaagtgcctgaacagcatctgaggctgcatatcctgcagcttgtccacccatgaactgaagaccgttaccaaacccacataacaatccagctgcaagtgcccaacctcttccgttccagtcactcaggtattctctaaaggaagatcttggtgagtctagcacaggtttgtacaggaaactaatgttgagagcgaccgcgattacaaagcaagatagtgagaagtagaagaacgcagtgtagacaatcagcttgggaacgccttgttttagagtgtgccattgatcgtttgtt

SEQ ID NO: 134237 - DNA, 446 bp, Arabidopsis thaliana
  unsure (1)..(446): unsure at all n locations
nnnnnnnnnnnnnnnnnnnnnnnnnnnnnnnnnnnnnnnnnnnnnnnnnnnnnnnnnnnnnnnnnnnnnnnnnnnctttttttttttttttgtatcaaatacattggtcataattgacgtcttgctacctgtgcaattacagacaaaatgagatgattttatagtgtaaacaactacgtgacatataaacgtccagctggaaaattgttgctctactataagaaatctgagtccttaatgccgtgtcccaaactcttgggtgatgaaaaggttactgatttaagcatggaaatgatcgatgatatgctctatgacatctgcttcctctatatgcatatctttcatttgtaacccggattaacactatggggcagcaaacctgtgcctgctactgggaaagctaacatcaactttttcccatgagacagaggagaggcctttgatca

SEQ ID NO: 134238 - DNA, 616 bp, Arabidopsis thaliana
  unsure (1)..(616): unsure at all n locations
gnnnnnnnnnnnnnnnnnnnnnnnnnnnnnnnnnnnnnnncaaaaacatggtttagatttatttatttttaaattagggagaccttttgtgtcttttttcaagtggtaaaaagatataattttgacgaacacaccaaaattcaacttagtgattaaaaaaaaaaaaaacaaatgcaccaaaaataatttatcaagtatctccacatggagaaactcactcttttgcctacagcaacattcctatgagcagtcttcaaaacattttgccttacatggaagcaaaaaactaggccatgaaacttcactcaaaacccaaaacattggtttttcttttactggttttcgtttagacttttcgattttgtttactgttgtttgcattcaggaggcctctctccttgttgatcatcggtaacctgaggtctccctcctttcttgcgtaagactgatggcttctttttgggtcttgcttacttcttcctcctcatcttcgncgncttcttcctcatcttcggcctcatcctcttcaccctcatctcaccccacgtcacacctcacggcatggcaattnaacccncccnaaggcnccgggaacncgggangntgggggnggctc

SEQ ID NO: 134239 - DNA, 675 bp, Arabidopsis thaliana
  unsure (1)..(675): unsure at all n locations
gnnnnnnnnnnnnnnnnnnnnnnnnnnnnnnnnnnnnnnnnnnnnnnnnnnnnnnnnnnnnnnnnnnnnnnnnnnnnnnnnnctttttttttttttttatatcattattctctattactttggataatttctcataattaaagagagaaataaatcacgtaatttgctacatttcacaaaatattaagggctattaatccaaaaaaggccacaacaaaaagttactcgaaattacatttttaaccctcataacaaaaacgacgccgttcaagcgaagagattgagcaactttgtcgttgctcctcctcctgcctccgccgcagcgtacgtaccgatcaccggcgttgttgttttgaaacgaaaccgtggtaacagactcctccgagtacatcgacggtgtatcttccttaaacggcaaggttttaatcggataaataggaataagagagagatcaagctccgacgaaggttgttgttccgacgataatcgtttccgtttcggcggagaagctgttgatcttgatctagatctagagcttgagaatcggcagtgatgataaatgttccgatcaccggaatcatcagcttttcgtagattcaacatttccgtacagatctccgaagcttcgtcggaagtaggagacggaaacccggcgaatccaccgncgttnagaa

SEQ ID NO: 134240 - DNA, 536 bp, Arabidopsis thaliana
  unsure (1)..(536): unsure at all n locations
ggnnnnnnnnnnnnnnnnnnnnnnnnnnnnnnnnnnnnnnnnnnnnnnnnnnnnnnnnnnnnnnnnaagggtttagagactctcttttgttgttttgttacttgaaaagattggccagttttctttggaaaaaaaaatgagacttgaagaaggagacttaaagaagtataatcagattaatgcagcttcaatagttcttcgaccctgttgatagtacttgtagtggagatccacatacttggtaactgttttatacaatcttggtcttgcctcagtcacaagcccatctgcagggtgaatctctttgtctagacccggtacacaaaacgttgccacagatatcctttccttctctctgtgggccaccactcgatgaaccgggctcttatatatcccattactcattatctccatttgatcacctaaagtgataagaattgtatcaggaactattggagctttataccacttcccatctttaagaaactgaagcccttcgacatctttgtcgggtaagagaagagtgatagctgaac

SEQ ID NO: 134241 - DNA, 571 bp, Arabidopsis thaliana
  unsure (1)..(571): unsure at all n locations
gannnnnnnnnnnnnnnnnnnnnnnnnnnnnnnnnnnnnnnnnnnnnnnnnnnnnnnnnnnnnnnagaagcgacatctttttttttgttggggggtttcacagtttgggttggacaagaaaaaaaagcaaccaatggagaataacaagcaaaactcaagtcaagaaaataaaaatctaaaaagaaagaggttgataaacagttctttaagttgatgttattgcttctactcactccattaagagttgcctatggcggcggagttcgttgaggtatgaggaagaggtgtgatcttgtagatcacaagcgttcacgctcattgttctttcacctgccttctgctggagctcagctggtccgtcttctccacttaacagcttgtccaaccgatttatgtcaaagttccatttgcggctattttgatgtacacatcatagaagcttgttagcactcactcatttccatctttgttgggattaaacatattttccttagccagagaatccaccatggcctttcctgctttattttttaaaaacaacgtttttgtccattgcacaattgctctttct

SEQ ID NO: 134242 - DNA, 555 bp, Arabidopsis thaliana
  unsure (1)..(555): unsure at all n locations
nnnnnnnnnnnnnnnnnnnnnnnnnnnnnnnnnnnnnnnnnnnnnnnnnnnnnnnnnnnnnnnnnnnnnnnnnnnnnnnnnnnnnnnnnnnnnnnnnnnnnnnnnnnnnnnnnnnnnnnnnnnnnnnacaacaaagggctctgtttttttctctgttttaatatcacacaaaacattcaatgggttttgacaataaaaacattccaaacccaatgggggaaaatttcctttttattaaaaacaattaaaaatacttgccattttcattttcacatgttaaaaactgaacccgtcgctaaatcgcaaaattacaattagcgacgttttaatattccgaactagaaccctaaaaattaaatttacccactcatttttatttaactttttccccctttccctttttttatttaatggttgaaacgtctcaaagctagatatgccaatactctatacccaaaaaacatcaaaaacaaaacaccaacgctggtccacatcccaacatttccgatcacttcctcctccacaaatcgacatccagccgatgtcgccgcactc

SEQ ID NO: 134243 - DNA, 556 bp, Arabidopsis thaliana
  unsure (1)..(556): unsure at all n locations
cgnnnnnnnnnnnnnnnnnnnnnnnnnnnnnnnnnnnnnnnnnnnnnnnnnnnnnnnnnnnnnnnnnnnnnnnnnnnnnnnnnctttttttttttttttgaatatattatccattcatcaaaacattacaaaggtttggtaaaatatttgtttcaactacaactaaaccacccaacaaaacctcaagaggcatcaaaagttatgtcaatttaactaatctcagtcaatcttcactgaggagtagatctttctaacgaaccacaaacatgcgtagaaaccgattgagccggttagcacgaaaaacgagtaagagataatgatcatgtacccgaagtagagcactcctgataccagttttgagatctcaagctttgtgaagaagtagaagacggagtagaggaagaggtaaagtgaagatgagcctgatgtgaggtatgctctccaacaccaattgtagtcttcactgcagagctgaaagtagcagaggacaattgtgatctctgcgcaggtcacaatcaagatcaagaacacgatgaagaggaatccgaagatgtag

SEQ ID NO: 134244 - DNA, 540 bp, Arabidopsis thaliana
actatagaagagcttgacgttcccttggcccccttccttagcctggattcctttaaaccggccgcctttttttttttttttttattctaacaaagataaagatctgagttaacatagaaaaagataaagtctttcctcacaaagacaacatgagtttgcggttttctccaagagcccaaatggggaatatgtttctataagctgagtaactgatcatacaattccgattaaagactcctagtatctctggttgggggtaatctccatcttccatctgcgaggtgatcagcgattttgccccgcgatgcaatggcatcggatctctactagcttgtcccgcttcaatgagagccaagagtgcccatgatgtgttcacaatatgcgatttattcccaggaagatgggtgtatactttgttttggcaagaaaggtagctctctccccatccaccacaacaaagttgtttggagagcaagaaaccacaagcttttctaatacaaagactgctctcatatgttttgcctgaagccaacatgcctt

SEQ ID NO: 134245 - DNA, 843 bp, Arabidopsis thaliana
  unsure (1)..(843): unsure at all n locations
tgnnnnnnnnnnnnnnnnnnnnnnnnnnnnnnnnnnnnnnnnnnnnnnnnnnnnnnnnnncgataattcttgttttcatcaacttttgcaaaatatgaagaagcaagcaagtgtaataatctctgaatggagaagtagtatttacaatcacgaccaccttgtaactacagacaaaactagagacaacccaaccatgtgtacacagttccagatctgagattcatcttgagaatgcagcccagatcaagaaaaaaaaacagtatagtgaatgtttcactgaaaaataatctctcaccctttacaaacaatctcactctatatctacaaaactattgtgatccaatgacttcttttgcacattctttaggtaatataagaacagagtctatgcatagcccacctttcgtgtgagtgcaatcgatttgagtcatggagaatttgattcctgttgatacatctggatttgtcactttgaaatctccaacgtgatagtgactccagctcccagggttgttgttcagataacacaatgatacagcttgttggttgtccgaaagtggcgagctgggaacttacaggttttatgtcccatccatgaatgtgttcagagttgcagatcctccttcacaagcctctttgatgttttaccgagctggatacggaagaagagactatatgttccagatggaaactggatctcaaactctcctcctacttcaaaccaccatatctgttgaacataagcagctgactggaacctggattcatcagttgggatatgactccagtatctccgatcatcaattccagtaatccttagtgcctttgaanaaatctcgtacc

SEQ ID NO: 134246 - DNA, 1349 bp, Arabidopsis thaliana
  unsure (1)..(1349): unsure at all n locations
nnnnnnnnnnnnnnnnnnnnnnnnnnnnnnnnnnnnnnnnnnnnnnnnnnnnnnnnnnnnnnnnnnnnnnnnnnnncggccgccaaaaaagttgaattgcatttcaaggaaaagtgattttgaatcatatgaaaattcttgagggaatcattgaaaattcaaatcccgggttcgatcacagactctcttttaaggttactgacgaattacaagatcgatatcggccccaacttctgcaatcttggcttcctttgacgccttcgctgattttgcgatgctctctacatcaaaatctatcgctatcttcttcacgagaccttcaagcatcagtgagccaattgctaccagactccggaacttggaatcaacatctgcagcttcttcttctgctacctgcaaagctgctgaaaggacttgagcttgaccttcttgatccttcttttctattaatagcactgcataattgagaagcaacgtcgaataagccaactgcagattcttatttggggatgaataacagtttgagaaggcatcaagaatttgactatgatgcgtctgtagccagtaatgaaatgaagaattcttgaatagattaaaggacacgaacagtcgttaaaagatttgcaggaagagcagaatcttctgtaactttctttatcaaatccaaaagcaggtcattgttgttttccacatgcttgataagtagacttgctccatgatgatgcaaaacgagcatccttactatatcagtagcaggaaacatcattgccggtggccatgcttgtagcactttcaaaagcaaagcaatatccatgtcagcaaaattggtagagtggtagtgtgatgtgtccttcagtatattaacgattgcgcctactctggatacttcgagttcggtcagggacttgtcattgtttactgcgtcagatcgtaaagtagtattgaactctgtcatctttttcagaatcccgtcatattgagcagcatcgaaaactagcacacctctttttggaatgtgcttgtataaaggttttgccggagttgcagctgtacgagatgcttgcccaggcacataagcatttgcgccggtgaagggatcacgaaaagatggattaaagttgaagtctttctgcccagaattttgtaatataaattcaacaatttgctgccgatatgcaaaggggagattctcttttagaagccacttgtcagctgcatcataaggattgtctgatcgattgtaaggtagcttccggataggttccgcggccgcgaattcgatatctagcttatctatacctcggnccttggccagtggccaatgcatttcaaagggggggggggggggg

SEQ ID NO: 134247 - DNA, 793 bp, Arabidopsis thaliana
  unsure (1)..(793): unsure at all n locations
gccccccggcccaaattgaaatgcactcgcaatggccctactcnnnngttacgttcgctagccgcccgcgggtggcggccgctctagaactagtggatcccccgggctgcttgaatttgcggccgcttctggtttccactaccaagggatagcctggggggaaaaaagaatcgcattcttcatggaatcatatatcacatgatagcaacaatacgcactaatgaacctttggtcaacttccgtagttagctacacggattggaatttagctttcaaacttcaactaattttacccacgccatgctgctaactcaataatctttttatagcttagtggttggctaatcaataatcactctacccataatctttacaggaacaatctccattcttaaagtggtgcaagcatcttgtgtcctccaacaatatgtcacagccgtatctcttagagacgtactttgcagtatcatggcagtctcggcacatcctaagattgttcacgatccttatcgtcgtcttagatgcacccggatgacgaaatgagaccaaacgccatggcaaatttttcactgtggattccacaagtttcttcccttccttcttcctcaatccaaagttctccattatattggtcacttctattatccagccctactcattttttccacccaagggatacagcacatcaagtacataattttcgacctgatcacccggccctgaatgtgtgaaataaatttcctgacttcaatccagctctgcccgagaggttttttaacaagttatctctcct

SEQ ID NO: 134248 - DNA, 1036 bp, Arabidopsis thaliana
acgactcactatagggtaaagctggtacgcctgcaggtaccggtccggaattcccgggtcgacccacgcgtccggtaacggttcttgagatggaggattcagtttcttgaaaagagtatcaggaatcttgattttgtagctggtggtgtttccacgatatgtcaagtaaatgatcttaagaattctccaggacctggtaagactgagcttaggttagctactaagcaagctcttcatcttcttcaagacaattaccctgagtttgtctctaaacagatattcatcaatgttccatggtggtaccttgcgttctatagaattattagtccttttatgtcacaaaggtcaaagagcaaactagttttcgcaggtccttcaagatctgcagaaacccttctcaagtacatatcacccgaacatgtcccggttcagtatggtggactaagtgtggataattgcgagtgtaactcggatttcacacacgatgatatcgctaccgagattactgttaaaccaactactaaacaaaccgtcgagattattgtttacgagaaatgtacaatcgtgtgggagataagagtagtgggatgggaggtttcgtatggagcggagtttgtgccggagaacaaagaagggtatacagtgatcattcagaaaccgaggaagatgactgcgaaaaatgaactggtggtgtctcatagcttcaaagttggagaagttggcaggattttgctaactgttgataacccgacttcgaccaagaaaatgcttatctacaggttcaaggttaagcctttagcttgtgagtaacaaaagccgcatctttcgtctgagtgtttcttagtttagaacttgatcatatgattgttgattgtgttttgtttttctctcttttaccgacttatatgcggccgcggttctgtttgctaaattcttttgttttatattgtattttgctctcttattttttatttttcagtttgcttccaaatttcactgaggaatgtttttgacttttgagtgttgaatggctttt

SEQ ID NO: 134249 - DNA, 806 bp, Arabidopsis thaliana
  unsure (1)..(806): unsure at all n locations
nnnnnnnnnnnnnnnnnnnnnnnnnnnnnnnnnnnnnnnngtaccggttcggaattcccgggtccacccacgcgtccgtgtgaaccaacggccaaaaaatggcggctctactcggtatcgtctctcctgtgactttcaccggaaagcacccggtaaattcccgatcgcgacggagaacggtagtaaaatgctcgaacgaacgccggattctcttcaaccgcattgctccagtttacgataatttgaatgatctcttaagcttaggccagcatcgaatttggaaaaacatggctgtctcatggagtggagcaaaaaaaggagattacgttcttgatttgtgttgtggaagtggtgatttagcgtttctcttatctgagaaagttggttcaactggcaaggtttatgttcttagaaatgtgtagcttggcttgattgtaaaattgttgttctgataacttggtaatattattataggtgatgggcttggatttctcatctgaacaactagctgttgcagcaactagacagagtcttaaagcaaggtcttgttacaagtgtatagagtgagctcactggtggattgaaggtgatgctattgatttgccatttgatgattgtgaattcgatgcgggtacgatgggttatggtcttcgaaacgttgttgatagacttagagctatgagcgagatgtatcgggttttgaaaccaggttcaagagtatctatacttgatttcaataagagcaaccaatccgttactacgtttatgcaaggctggatgattgacaatgtagttgcccctgtggc

SEQ ID NO: 134250 - DNA, 773 bp, Arabidopsis thaliana
gcagtaccggtccggaattcccgggtcgacccacgcgtccagaaacaaatctgaaacaaactcagtagtcgagctttactatcaaatcgagcctgaagaagctcaatcaacgagaacgaaagctgtgctggatctctttcatgaaatcatagaagagccattgttcaatcagttgaggacaaaggagcagcttggttatgttgtcgagtgtggccctcgcttaacgtatcgtgtgcacggtttctgtttctgtgttcaatcttctaagtacggtccagttcatttgctggggagagttgacaatttcataaaagatatcgaagggcttctggaacaactggatgatgaatcctatgaagattaccgaagtggtatgattgctagattgctggaaaaggatccctctctcttgtccgagacaaatggacttatgggagtcagattgttgccaaaagggacatgtttgatttctcccccaaaggagcaggaggcctaaggagtttccagatgaaagatgtggccagttggtacaaaacctatttcagggaatcctcacccaattgccgtaggcttgccgtcagggtttggggatgccataccaatatgaaagaaactcaaacagatcaaaaggcggtgcaggtcataggacacgcagtggctttcaagtcaacttctaagttttccccctcccttggttatgagaagaacttactaaagagttttgcttcgccttcccttttttttatcttttatattttgaatcactcaatttt

SEQ ID NO: 134251 - DNA, 1184 bp, Arabidopsis thaliana
ccccgcccccccccctttgaatttgcccgggcccccccccggtaccggtccggaattcccgggtcgacccacgcgtccgtgcacaagcacttgagtattgtagcagcaaaggtcgcgccttgtaccacgatcttaatgcttacaggatcttgtttgaccaggatggtaacccgagattatcttgctttggtcttatgaagaatagtagggatgggaagagttacagtacaaatttggctttcacacctcctgaatacctaagaacagggagagtgattccggagagtgtggtctacagcttcggaacgctgttgctagatcttctcagcggcaaacacataccaccaagccatgcgcttgatctgattcgtgggaagaatttcctgatgctgatggactcgtgtctagatggccatttctcaaacgatgatggaaccgatttggttcgtttagcttcccgttgtttgcagtatgaagctcgtgaaaggccaaatgtgaaatctctcgtgtcctcactcgctcctcttcagaaagaaactgatattccgtctcatgttttaatggggattctacatggagctgcttctccaaaggaaacaacttcgcttacccctcttggtgacgcttgttcacgacttgatctcacagcaatacatgaaattctcgaaaaggttggatacaaagatgacgagggtgtagcaaatgagctctcgttccaagtgtggaccgaccagattcaggagactctaaactccaagaaacaaggagatgctgcgttcaaaggcaaagactttgtcactgctgttgaatgttacacgcagttcatcgaagatggcacaatggtatcgccaacagtttttgcaaggaggtgtttgtgttatctgatgagcaatatgcctcaagaggctcttggtgatgcaatgcaggcgcaagtagtgtctcctgaatggcccaacggctttcttttcttcaggccgctgctctcttcagccttggaatggataaagacgcctgtgaaaccctaaaagatggaacttccttggagcccaagaaacataacaacagaaactgaaaacttcaagtgtataggtttcttctctcttccgccttcttcgttttgtgattggattctgagaaagcctcattgtctctgtcttctttaagcattatcttaaatttgtggt

SEQ ID NO: 134252 - DNA, 1076 bp, Arabidopsis thaliana
  unsure (1)..(1076): unsure at all n locations
ttgacttcactcccgtcttcaacgactcactatgggaaagctggtacgcctgcaggtaccggtccggaattcccgggtcgacccacgcgtagactctcagaatctgaagaagaagaagagattgttgtttttgccttttatcatcggtttctttgaatctctggttttaaatcggatttaatggtggagtctctgttcccgagcatcgaaaacacaggtgaatcgtctcgaagaaagaagccgaggatatcagagacggcggaggcggagatagaggcacgacgtgtcaacgaagaaagcttgaagagatggaaaacgaatcgtgtgcaacaagatctacgcttgtaagctcgtcgaagctttacgccgagttcgtcagagatcttccaccaccagcaacaacgagaccgataaactcgtctccggcgcggcgagggagatacgtgatacggcggatcgagttctagctgcgtccgctcgtggtacgactcggtggagcagagcgattttagcgagtcgcgtccgagcgaagctgaagaaacatagaaaggcgaaaaagtcaacgggaaattgtaaatcgagaaaaggtctcacggagacgaatcggattaagttaccggcggttgagagaaaactgaagattcttggccgtttggttcctggttgccggaaagtctctgtaccgaatcttttagatgaagcgaccgattacatcgcagcgttagagatgcaggttcgagccatggaggctctcgccgaacttttaaccgcagccgcaccacggacgacgttgaccggaacttaacggcggcagttagtttgtcagttgttaattagcttttcttttacctttttacccctttattttggcttcaagtgttttttttttctcgtcgacgcgattttaatttattaaattcatgtattttatttgtatacatcatcacttctttttttttgcggccgnnnnnnnnnnnnnnnnnnnnnnnnnnnnnnnnnnnnnnnnnnnnnnnnnnnnnnnnnnnnnnnnnnnnnnnnnnnnnnnnnnnnnnnnnnnnnnnnnnnggaagaatcat

SEQ ID NO: 134253 - DNA, 880 bp, Arabidopsis thaliana
  unsure (1)..(880): unsure at all n locations
aatacgacccactatagggtaaagctggtacgcctgcaggtaccggtccggaattcccgggtcgacccacgcgtccgggtttgagatctgatatttgtgtaatgaaaggtgatgttcgaacaaactctgcttcttcctcaatcttcctcttcacctcctccaccaataacaacacaaaaccggaaaagatcaaaccttacactagaaaatgggagactagtgtgatggacaccgttcaagaactcaacctcatcaccaaagattccaacaaatcttcagatcgtgtatgcgatgtgtaccatgatgttcctgctgtgttcttctccactggtggatacaccggtaacgtataccacgagtttaacgacgggattatccctttgtttataacttcacagcattacaacaaaaaagttgtgtttgtgatcgtcgagtatcatgactggtgggagatgaagtatggagatgtcgtttcgcagctctcggattatcctctggttgatttcaatggagatacgagaacacattgtttcaaagaagcaaccgttggattacgtattcacgacgagttaactgtgaattcttctttggtcattgggaatcaaaccattgttgacttcagaaacgttttggataggggttactcgcatcgtatccaaagcttgactcaggaggaaacagaggcgaacgtgaccgcactcgatttcaagaagaagccaaaactggtgattctttcaagaaacgggtcatcaagggcgatattaaacgagaatcttctcgtggagctagcagaggaaacagggttcaattgtngaggtctaaggccccaaaangcaacggaaatngncaagntttttcngtnngttgacncgggcgnttt

SEQ ID NO: 134254 - DNA, 778 bp, Arabidopsis thaliana
  unsure (1)..(778): unsure at all n locations
gaaacaatnnnnnnnnnnnnnnnnnnnnnnnnnnnnnnnnnnnnnnnnnnnnnnnnnnnnnnnnnnnnnnnnnnnnnnnnnnnnnnnnnnnnnncggccgcgcggtttctatgtttatccctccaaaacctcctttcttctaccctctctagaccttcctctctcttgattcctttcttcgtatctctttcagtcgaagccaaaccccttgaatttccccgatttcaaatggcaattgtgacaggagatcgctatgttgagaagctacaaaagtttttagaagacgaagctgagtctcttctagaagaaaccatgattctcaagcttaatcctgctggtcttcactatcttcatctccgtcttgactctctccgtgaactcgaacgcatgctctccaatgctcctgttgattaccttcgcgcctacgtttccgacctcggcgattaccgcgcactcgaacagctccgtcgtattcttccgaatcctcacttctcttaaggtcgtttccactcttccttctccgggctcggtgaatcccacggcctcttctctctttttccctttggtagccttaaagggttttggaacctccgtcgctgtgaatttggcttacttctccggctaaaggcttgatcgagctccgtcacactttggaaaagatcatctgccataattccactgatgctctgaggcatgtcttcgctagtaggattgctgagataacgaattcgcccgagtggaataagttggcggtcatatcttgtgcttgtaaccgtct

SEQ ID NO: 134255 - DNA, 769 bp, Arabidopsis thaliana
  unsure (1)..(769): unsure at all n locations
gaaacaatnnatttccgttnnnnnnnnnnnnnnnnnnnnnnnnnnnnnnnnnnnnnnnnnnnnnnnnnnnnnnnnnnnnnnnnnnnctttttttttttttttttttttatctaagaactagaacagtttcaccttcatatttcacatagggccaaaaggccataaacatagagagagagaggttctacctctttagttctacatacttatatatagataactttagggtaagctaaaaactaaaaagtcttttatatataaggcgttatatgcgttatattcgcttgcttatctaaaggtcaatgcttttaatgagcttcatgttggcgagtctctcgagaaagacattgaaaacgtcttcacgactaagcatgctgactcggacatgcttcttgtcagatccacaacgctctccagctctgctcattaccttgtgtctcctcaattcacttaccagatccgtctcttccttcgtccctagccacgcaaacgcagggtaagattcgagtgattttccaaagtagttgcaaaatgcttcagggtacttgggaagagtgaaagcatcgctctctttcacaacttcacgtagcttctcccaccgattcttcatcatctcacgaccatacttgaagaaattctcagactcggactcgctcttacaagtctcctttagaacgttgagtatcttagctgttcgaacctgtgactccttagacacaccaatcgagttcacaataatatactcaaccatcttcttagctacctccta

SEQ ID NO: 134256 - DNA, 757 bp, Arabidopsis thaliana
  unsure (1)..(757): unsure at all n locations
tnnnnnnnnnnnnnnnnnncagaattaactttgattaccaaatttatctcatatttgaatcatcctctacactacgtatagcccacaaattgatgcttttgacaagacaaacaaacatggcgcagcaagttttgcgttatcgttcaaacattagataggattgtataatttacattcaataagaatattaaagaggtattgagaatttcgcaccaaagtatcattctcaggcttctttgtgagttgagcatcatgatgatgacgatgatgatgaattgatgatgatctctctttcaaagtattggattcacataagctgacaggacagcttaaagagatcatgatattcacagcttcaggtcaatacgctccgaccattcaaatatgccagagtggacctggtcatgtcctatatcagacccgttacctccggcggcaaccctcatgatatcttcgatcaaagcaaagtttcccatgatatcaacatgggcaccactctgcgtcccgcgcccttccaacaggttagccggcggagagtgattgtattctcttatataagtcttgattccggaagggttgaatcttgtcttgccacgccacgcttttgcacacatgtacccggcacttaggacgggtactgtttcatccccatccacattgtaaactcctgctttcagacagctatcttcgtcctcctcgtgagcagaagtgaatatctgaaaggggatgcaactgtcgggagactggttaaacttgt

SEQ ID NO: 134257 - DNA, 826 bp, Arabidopsis thaliana
  unsure (1)..(826): unsure at all n locations
gaaacaattnnnnnnnnnnnnnnnataaggcaacaaagctggagctcaccgggtggcggccgctctagaactagtggacccccgggctgcatgttttccggttccctcgagtatcatcaaataaaaggaccatacagaaattctacttgttgaatcacatatctaagactgtagaatcagttcttaagaatgctactgtctaaatgagttatcatcaatcaagcatattagaagtctcctgcttcataaaacacacacatccacagatccactgaatctaactgtacacttccttttatacactattcgccatcttcatcatcatcatcaagctctacaatttgtgctcgcctctcagcagctttcctcctgatgaagaacccccatctcattgcggcttttatcttaagccatccaacaacagctctgcctgatcgaccacggtcttcatcataaccttgcataggcgtgtgtagaaacgatgggaaagtatatccatcttctggcaagtgtgttgcagagccattgcctcctcctcccatgctgaataggcggaggaactgttgcatgtcttcactctctagcatttcatggcttctgagtcggatctcttcctctgaaaagaaatcatctggtcctctctcacgggggtttgaccagtcttctaaatggttgagatctgcctggtgaacaaaaaaagggttgatgttttgggatcccgtttggggatgaatggtgaaggacccgagaacccaggccatttcatgtggttgaattggtttatgggtgccttttgagtttggatgtaagaatttccccatgaaac

SEQ ID NO: 134258 - DNA, 592 bp, Arabidopsis thaliana
  unsure (1)..(592): unsure at all n locations
nnnnnnnnnnnnnnnnnnnnnnnnnnnnnnnnnnnnnnnnnnnnnnnnnnnnnnnnnnnnnnnnnnnnccacgcgtccgggctgagcttgatatcaagaaagctctcgaaatcgatccagacaacaaggaggtgaagatagaatataagaagttgaaggagaaggtgaaagagtataacaagaaagatgctaagttttacagcaacatgttgtcgaaaatgcttgagccacacaaaggaactcagaaggaagcacaagcgatgagtattgacaccaaggcatgagtctttgaatcactttagagagtcgcattgattccaaaaactaaatgtgaaaagtctacaaatttctgtttttactctttgtaatcaatcttggtgtgtgttactgtttcagagttgttataaaacagacttgtaataaacgaggatctactccaagttaatgacccccttcttatgaaccaagaagtggcaaatgtcataaattctaataagcagaaagctaagcgttatttccaaatgggggggggccgttttaaaggacccaagtttcggtccgcggcattggaagggtttagtttttttttggg

SEQ ID NO: 134259 - DNA, 717 bp, Arabidopsis thaliana
  unsure (1)..(717): unsure at all n locations
atacgactccctataaggatagctggtacgcctgcaggtaccggtccggaattcccgggtcgacccacgcgtccgcttgtcaaagagaagtgtgtttgcgtcatcttcgattagtgtggggaaaaacttggaggatatgtcagcgtatattcatttcttggcgtctggatttgaagcttccagaacagcttttggtgctatacctggaagcttgcagcccgatgaagagttatgtagagatcttggtttgtctctcaacactccttccccaaatactcgcaagcaagattgacctgttttttaatttatctttgtctgcatatcattgggatatttttgtgtataaatcaatgtatactatctgaatcattctatagcagctttggtgtaatattgatgatgaaagttagatttttcatctaanaaaaaaaaaaaaaaaaaaaaaaaaaaaaaaaaaaaaaaaaaaaaaaaaaaaaaaaaaaaaaataaaaaaaaaaataagggggggccccttttaaaggacccaactttccttcccctgccttgcaaggttttagtttttttttagggccccctaattcaatttcccggcccgccttttacaaccgccggaacgggaaaacccttgggtttcccaactttattcccttttaagaaattccccttttccccagttgggttatttcaaaaaaggccccccccgtttgcccttttccc

SEQ ID NO: 134260 - DNA, 946 bp, Arabidopsis thaliana
  unsure (1)..(946): unsure at all n locations
acgcctnnnnnnnnnnnnnnnnnnnnnnnnnnnnnnnnnnnnnnnnnnnnnnnnnnnnnnnnnnnnnnnnnnnnnccacgcgtccggagacatcgagactcggtttcaggagaagggatgagagaagaggaggtgagtctgtggaattcgatggtggaagaagcagatcaaatgcaagattcctctgttgatcgtgacatgagattgagacttgtttcaccgatcactgcaaggattgaattggatgattatgccaattacactagaactgagcttttatataagataggtttggctcaagagcctgacaatcatctgctcctagctaactacgctcagttcctttacctcgttactcaagaccatgagagagcggagaactgcttcaagaaagcaatagagtcagaagatgtagacgcagaaacgtacagcaaatacgccatcttcctgtggaaagttcggaatgatctctgggctgctgaggagaactttctagaagctatatctgcagaccctaccaactccttctacgccgccaactacgccaatttcctctggaataccggtggtgaagagacgtgtttccctttagaagattctactcaggaaatggtttgagaaggagcgaatggcagtgaatggatgttggtttgtttggagtgaagagacagcgacacggaacttaggtacacgatagaagcaagaggaaaagtgtaagtagtgtttttgagtgaaccattgcggctgatgaaacattgcttctctttggttcttttttctttttgcttttgcctaatttttcactcagtagtatatacggtcgcagattccatcgaataagaacatgtgtagatccaacactattacacgaataataaacactgagcattgcttttcgtgaaataataagtgcgcatatttgaatagataaaaaaaaaaaaagaaa

SEQ ID NO: 134261 - DNA, 746 bp, Arabidopsis thaliana
  unsure (1)..(746): unsure at all n locations
gtnnnnnnnnnnnnnnnnnnnnnnnnnnnnnnnnnnnnnnnnnnnnnnnnnnnnnnnnnnnnnnnnnnnnccacgcgtccttaagatccaattggaaagggttatcctaattcccagtcattgatcggagaagatgagtgctgttgcgattaaccacttttttggcttaccggaggcgatcgagaagctaattctcccgatttctcgttccggcgaaagtaataacgagagtcgtggaagaggaagtagcaataatatcccaatagacattttggaatctcccaaagaatacatattttatctcgatatccccggaatttcaaaatcagatatccaggttacagtggaggaagagaggactttagtgataaagagtaatgggaagaggaagagagatgatgatgagagtgaagaagggtctaagtatattagactcgagaggagacttgctcagaatttggttaagaagttccggttaccagaagatgctgatatggcttctgtaacggctaaatatcaagaaggtgttttgacagttgttatcaagaagctaccgccacagccgccgaaacctaagactgttcaaatcgctgtttcttgagtagtttctgagttttggttttgtgtgtgtttgttttctagtttgtaatttttctgtgtttggataaaaagactctgtttcttttatgtgttctcttgtcgaaaatttgaaattgaagaaataaatagggttagcctcccaaacc

SEQ ID NO: 134262 - DNA, 781 bp, Arabidopsis thaliana
  unsure (1)..(781): unsure at all n locations
acgcccgtnnnnnnnnnnnnnnnnnnnnnnnnnnnnnnnnnnnnnnnnnnnnnnnnnnnnnnnnnnnnnnnnnnnnnccacgcgtccgctcaattgctactcggcagtctcaagaagctatcatttttcatgtgtagtttcggtgaggttttctacgacacagaagatatagatgtctctaaagctctatcgaatttacaagagattgacatagactactgctatgatcttgatgagttaccatattggatccccgaagttgtttcattgaagacacttagcatcacaaactgtaacaagctctctcaacttccagaagctatagggaacttgagtagactagaagtgttgaggatgtgttcttgtatgaatctctctgagctgcctgaagcaactgagagactcagcaacttgcggtctctggatatttctcattgcttaggattgagaaagttgcctcaagagattggcaaactacagaaactggagaatatctcgatgaggaagtgttcgggatgcgagttgccggattcagtgaggtatctagagaatctggaggtcaaatgcgatgaagtaactggattgttgtgggaaaggttgatgccagaaatgagaaatttgagagttcacacggaggaaacagagcataacctgaaggtgcttctaacgttttaagttttgagtgaaaaaaaaaacattttcgtagcttgtgtattcttattgactctttaatgatcacaatctagactaaacgagtaataatattacaagagtcaacatg

SEQ ID NO: 134263 - DNA, 770 bp, Arabidopsis thaliana
  unsure (1)..(770): unsure at all n locations
ctctnnnnnnnnnnnnnnnnnnnnnnnnnnnnnnnnnnnnnnnnnnnnnnnnnnnnnnnnnnnnnnnnccacgcgtccgccggtgtctgcggaagttgacgcgatcgacctgaatacgccgttgccgtttgattcggacagtgacgatgacaacgtcattgacgacgctgctgcactgccactcgacagcgagctgtcgagcctgcaggatgaaatggctgtgccgggttttgcagaaccggtcacgctggcagccgcgctcgaggccggcctgcacgtgatcgaggaggagcagaccctggacgacgacgggcaatggcccgtgatcggcctccaggccagcgaactcgcgccgggtgaggcagatgcctttgccgaggatgcggacgtcggcggggaggcggcggtcggtgaaggagagagcgccgatcagccgtccccggcgacggtgattgaggagatcaccgcagaggcgccgcagggcggcactgctgcggtgcgcttcttcgaaatggaagacgcaccgggccagggcacggtcgataccgatgcacaggttgcagcgaccgacatcgtgccgcgtgcgccgcaccacgagcaggcatcctgtgcggcggatgccgaagacggcgccgatgcactcgacttcagcgtgtacgaccgcgagctggtcgatatctttgtcgaggaaggcaaggacctgctcgaccactgcgatggcctgatcagcgaactgcgcgatgcaccgcatgaccgcgaggtgctggccg

SEQ ID NO: 134264 - DNA, 776 bp, Arabidopsis thaliana
  unsure (1)..(776): unsure at all n locations
nnnnnnnnnnnnnnnnnnnnnnnnnnnnnnnnnnnnnnnnnnnnnnnnnnnnnnnnnnnnnnnnnnnnnnnnnnnnnnccacgcgtccgatcggcttgattcagggcaatgggaacacattccagctaaattcccgagatctttgttggatggttacttagttgctggaactcagaagagattgtttctcgtgggaaggattggcctctacagtactctccaaagcatgagaatatgggagcttgatcacacaaaggtctcttgggtagagataagtagaatgccaccaaagtacttccgagcacttctgagactttcggctgagaggttcgagtgttttggacaagataatttgatctgctttacgtcttggaattaaggaaaaggtcttctatacaatgtggataagaaaatttggtcttggatttccggttgtgctcttcagtcatgcaacagccaagtgtgcttttatgagccaagatttgatgcatctgtcctctgaacaataagttatcgtctgtctcacatcattcttgaaaacttacaagttcgccagcaaaacatgtcagaaatatgaaatcaaagagggtttgatgggtcccttcagtgttaatgaagacctggtcagcaatgatatgcttcaccaatggttaacaatatcgaggagaaaaactgtaagataaacttgtttctagctttctgtaaattagcattcactcgatatgaaaactttctcaatatcccctgtctcgttcgcgtgaaatatatatacactt

SEQ ID NO: 134265 - DNA, 790 bp, Arabidopsis thaliana
cgcagggccggttcggaattccgcgtcgactcccacgcgcggccgcacatcttctgctagtaccccaaaaacatcttttgatttcatgaagaataacaacagtcacagcagtgctctatggttcttcttcttcttacttgagcagcaaggaagatgctcttgtcacgaccaagaagctcatggaaccaagcaaaacactaaacatgagcattaatccaaaacaagaggagtttggtgatgagaagaaaatggtgaaggaagctcctgaagatccagagattggtgtgttgggagctgagaagtacttcaatggagacatgggatccagaccaagggttcctagtgttctgtctctgacaaaacccagaaggttgagcagaaccgtcggcggctcgaagccgagcgcgaagaaatctactggtactccgagtgtccggtctgaatcaagctggaatagtcagagcgtgttgcttcagaacaaactggtgaatagctgcaacagttccttcaaggaaaagaagaacagtaatggtcagattcaaaaggtgaccaataataagaagagttttctcgcaaatttggggtgtaaatgcgcatgctctgatggggatactgtctatgtcgaggagaaaaccttcgtcaagagaagcgctgatccgaatatctctgttatcacaatgagatcttcctgcgatattaacacagacctgatcaagaatcagaagcaagaggagttatcccagagggaagtctcttggagttttttggatctccaagggcttttgagaag

SEQ ID NO: 134266 - DNA, 737 bp, Arabidopsis thaliana
aatccgttcaccatgacgtcgcatgcacgcgtacgtaagcttggatcctctagagcggccgccctttttttttttttttgcagatttaagtcatatatggtttccttctacaaacagaaacatgtaaccaaaaagtctcaacaactgtgtaaaaaaaacaacaaacttctccaaatattttagttttcctctgcctcaaaattcaactacttggaagtaacaagacaagacaaaagacaagagagacgagagagacgagagaagtgtttctacatgttttttctttttttcctttttaccttttcttcaaggatctggaagctgttggagagttctcaggtgtcttcagaggaagagctgatttttctgctgctttctccattggtttactatctttgtgtttgtcaatggctacacgaaactcttcaacaattgtcgggtctttgaacttcagtgcaaatgtagagagaccttctttgccttcgcttacactattcacacaagcgaatgtgattccctttttatccatgtttgcaagtttcatctctgggtaaagactcgcgtttaagatcaatctgtagtttcctttagctctcataactaatcttgctttaccatattactggagacgtttaccttgagttctccttttccacgctctttccatcctccatcaagatattcgaacatgatcgagtcagctgagaaggcaactttctcattctcttcacctgttt

SEQ ID NO: 134267 - DNA, 801 bp, Arabidopsis thaliana
  unsure (1)..(801): unsure at all n locations
cctagtcatngcattaacattcacaagctttttcacnggtctctcagctagtcgccaccctcttctcgccccacccgcccgtaccccaccggttacaacaacatttccaccacttcccacaaccacaatgccaccatttcctccttcaacttctcttcctcagccaactgcgtttccgccattaccaagctcacaaataccttctttacctaacccagcacaacccattaatatcccaaacttcccacaaatcaatatccctaacttcccaatttctatcccaaacaacttcccattcaatcttcccaccagcattccaacaatcccattcttcactccaccaccttccaaatgagaagctaattaagctctatagctagctactgccacacaacacatgaccacgataccatctatctattgtttgcatattatgtgttgtaaacttgtaatggtttttattcttttttttgtctaagtttgttatttcttttactgttcgtttgatgttatccttgctgttgatgttggtttcttttaatcagctgttttttgtaatatatccagcttattcttattctattgattacaaactttcttgttcccgataataaaggcccttccaaactattttggnnnnnnnnnnnnnnnnnnnnnnnnnnnnnnnnnnnnnnnnnnnnnnnnnnnnnnnnnnnnnnnnnnnnnnnnnnnnnnnnnnnnnnnnnnnnnnnnnnnnnnnnnnnnnnnnnnnnnnnnnnnnnnnnnnnnnnnnnnnnnnnnnnnnnnnnnnnnnnnnnnntg

SEQ ID NO: 134268 - DNA, 511 bp, Arabidopsis thaliana
  unsure (1)..(511): unsure at all n locations
atcaaacctctttccagtgacaactcaaacccctaatccccaaaatggctcactggttgtaatccctagtcattgcattaacattcacaagctttttcactggtctctcagctagtngccaccttcttcaatcaacaccagctattaccccaccggttacaacaacatttccaccacttcccacaaccacaatgccaccatttcctccttcaacttctcttcctcagccaactgcgtttccgccattaccaagctcacaaataccttctttacctaacccagcacaacccattaatatcccaaacttctccacaaatcaatatccctaacttccccaattttcttatccccaaaacaaactttcccatttcaatttcttccccaccaggccatttccaaacaattcccatttctttnaatttccaaccaacctttncaaatggggggaggttagttaagggtctttagggtgggntcttggcacaagaacaanatggncccgggttnccnt

SEQ ID NO: 134269 - DNA, 1174 bp, Arabidopsis thaliana
  unsure (1)..(1174): unsure at all n locations
gtccgcaattcccgggtcgacccacgcgtccggtttagcggaaaatggaaatgacaaatcatccacatattttcctatatatatttcctaaacgtttcttacactgaaacaaccaatcctatacacaatggcttcaagaaaacctgttaatcgcccatccgtgaggcacgcgagtcacaaccatccgctgcgtgtctttaaagctcgagacgaagatgaggtcgtttgctctggatgcgagctcgagctaaccggacaagctttcaagtgtatgaagtcagattgtgattacttcttgcacaagtcatgtttcgacctacctcgtgaaaccaatcacaagtctcacccaaaccactctttgaccctgcttcattccccaccgtacggtcagtcttacacatgcgacgcatgcggtgagtacggatctggtttcacttacaattgttctgaatgtcaatatgatgttcatgtcggatgtgcttttatccctgagaccgtggagcgcgaagatcacgaacccccactcacgcttctctaacaatacaccatgcaaaggtcgcgaggacggtgcttagttcatatgtgatggttgtgaagaaaaaatgtccgaaaatctttgggtttattactgcaaagagtgtgattatgggacgcatgtgcattcttgcgccgtctatgaagatcatgagtcagagaaaagaggaggaggtagggaagaaggagaaccgagctctgcggtttcaaggatgaaatcgttgatgaaggctcaacatcagatggcggggttacagctcgaggcaggtattagaaacgacactaataatgctatactcgatttatgggatagtccaaagcggagatattattattgatcgaataaacgagtgatcaatttgatacaatgattttattttattttgaataataataatgaagcttgtgattgttctttcttttgaaaattttgttttctcgtgtgatatgttgtaagtatttttctcaactatccaagtcaatctctgtaccctaatatagaagttaattatagatgacgttatatacattttccacataataaaatcgtaatttcgagttaaaaaaaaaaaaaaaaggacanncaagggcggccgctctagaggatccaagcttacgtacgcgtgcatgcgacgtcatg

SEQ ID NO: 134270 - DNA, 755 bp, Arabidopsis thaliana
catgacgtcgcatgcacgcgtacgtaagcttggatcctctagagcggccgcccttttttttttttttttttttacagaatttactccatagtgaaacaaacatcagattattttgtttgagggaatacaaattcctggtgaagcttttactttgttacacgaaccgaatcaaaaacacctagtttctttatttgttgatttttagtgcaataaacttttgtttggctcctctattgctcttctcttaaatctctgtaatactcactgatccatttctctataatggcaacctcttgcctcctctgctctttcagccactctgggtcatcttttgtagcagccctgagatctgcatggtgagctcctttcttggtcacaagcgcaacgatgctacttgaaatgttcttcagaacccctccacggctccaagggtcctgcattccattggagaatatgatgttgcttccaaatctcttcagtactgtctctatcctcattccaccaaattctgtggtgatccaatggggtcgaggcttgactccgtatctagtcatgcattgttcttggaatgcctcagagtcattttcgtacggagggagcatgctctggttcgagcagctcattggcatcaccatctctgtacacgcctgatattgccaaccatcaagtccatgatccatcagttggtggtccatctcgaagcatttttttgatccccaatagttgtagtataagccttgcagcagcaaaagcct

SEQ ID NO: 134271 - DNA, 540 bp, Arabidopsis thaliana
  unsure (1)..(540): unsure at all n locations
gttttgttccataacattttcatgaatgccacgatataatcagatattagttacagaattcactccatagagaaacaaacatcagattattttgtttgagggaatacaaattcctggtgaagcttttactttgttacacgaaccgaatcaaaaacacctagtttctttatttgttgatttttagtgcaataaacttttgtttggctcctctattgctcttctcttaaatctctgtaatactcactggatccatttctctataatgggcaacctcctgcctcctctggctccttcaagccactctgggggccacctttggaagcagccccggagatcctgcaggggggagccccttcctgggcacaaagcgcaacgatggctactggaaacggtccttaggacccccccaagggtccaaggggccggaatccatnggggaaaagaaggtgggtccaaancnttaagannggccaaccccatccccaatccgggggaccaaggggcgnggttacccggaacaagcagaatgnctggaagccc

SEQ ID NO: 134272 - DNA, 757 bp, Arabidopsis thaliana
  unsure (1)..(757): unsure at all n locations
cactctattccagctatgacgtcgcatgcacgcgtacgtaagcttggatcctctagagcggccgcccttgntttttttttttttttatccaagataagtttcagtatttcaaaaatttggggtagaaagtgatcattcgagaaatgtgattgacaaattcataagttttaaagtaaaaaacaacacagaagaacaatagagatgaaaacaaaacttttagtattacacaaaagttgaaataaggtattaataaattaatcaaggcttcttctcgtcttctttttctgtttatcttcctcacgatatctgtcccgtctctcttctctcctacgtttcttatttatttcctcattcttagctttctctgcttcatactctttcctcttcttctgatccgttgcctttttcttcttcatcgtgtgatgttgaagcagctggaattgctggatgatagtatgctcttttctttctttcggttccattataactgctcttttatcctctagtgatggtcttttccgctttggtatatttttgggtttcgacataaacggtaaatctttttctagacgctttggaatctgtagtggattgaacttcttttgctttctttcgattgccttgtagagtgaatccttattcactggaataggcggacgcgtggnnnnnnnnnnnnnnnnnnnnnnnnnnnnnnnnnnnnnnnnnnnnnnnnnnnnnnnnnnnnnnnnnnnnnnnnnnnnnnnnnnnnnnnnnnnnn

SEQ ID NO: 134273 - DNA, 732 bp, Arabidopsis thaliana
  unsure (1)..(732): unsure at all n locations
cttttagagagaatttagggtttagggtttatacgaagaagatgaagaaggggaaggggaagacgatgttcccacccattccagttttgtcagctttttaccagttctgtttaattacatttttcttttaacattcattagcaaatcctaacagtctaatctatttttgcttgcacaaaacgtagtgntaattagagtaaccaagaaaagtttcagtatttcaaaaatttggggtagaaagtgatcattcgagaaatgtgattgacaaattcataagttttaaaggtaaaaaacaacacagaagaacaatagagatgaaaacaaaacttttagtattacccaaaagttgaaataagggtattaataaattaatccaggcttccttctcggcttctttttcccgggttatcctcccccacgatatctgtcccgtctctcttctctcctacgtttcttatttatttcctcattcttagcttttctctgcttcatactctttcctcttcttctgatccgttgcctntttcttcttcatcgtgtgatggttgaagcagctggaattgctgggatgatagnangcccttttcttccttcggntccattaaaanngctcttttatccccaagggtgggctttccgcttgganantttggggtcgcataaacgggaacctttccagcgttggacngagggtgactcttggtcntcgtgctganggaccatccggaaggg

SEQ ID NO: 134274 - DNA, 836 bp, Arabidopsis thaliana
  unsure (1)..(836): unsure at all n locations
aaaacactcagtggttcgcttgggaaatgtttccggtcgaagtttccactgaaagaggnaggccttcagttgttattgacaaggatgaaggattggggaagtttgatgcagccaagttaaaaaagcttagaccaagtttcaaggaggatgggggatcagtcactgctggaaatgcatcaagcataagtgatggtgcggcagcgttagtgctagtgagtggagagaaggctcttgagcttggactgcatgttatcgctaagattagaggatacgctgatgctgctcaggcaccagagttattcacaaccacgccagctcttgctattcctaaagctataaagcgggctggtttggatgcatctcaagtggattattatgaaataaacgaagcattttctgtggtagctctagccaatcagaaactactgggattagatcctgaacggctcaatgcgcatggaggggctgtttcactgggacatccattgggctgtagcggtgctcgtatcttggtcacattattgggggtgttgagagcaaagaagggaaagtatggagtggcatcaatatgcaacggaggaggaggagcatcagcacttgtccttgagttcatgtcggagaagacaatcggatattcggcactctgaagctaagagctgttgttttataacgcaaagcttatgtatatggttcatgtgtgtgtcacaagactgtaactttgtacttgagagagatgcaataaaagtgtgttagaaaaaaaaaaaaaaaaagggcggccgctctagaggatccaagcttacgtacgcgtgcaagcgacgtcatagctgttctataag

SEQ ID NO: 134275 - DNA, 751 bp, Arabidopsis thaliana
ttgcagtaccggtctcgaattcccgggtcgacccacgcgtccgcttgtcctagaatcagagagttcaaaatcaagggcccttgaacttggtttaaagttggccggtagcgagaaacttgtcgataaactatcattaagagtcaaagagtttgaagagaaacttcaaaccaaagcaattcagcctgatattgttcaagaaagaagcatcttcgaaacaccgagagcaccttctacctcagagatatccgagattgaggacaagggagccttgggaataaaatcaatatcaccggtgcctacagcagcacaagtgagaacagtgaggaagggatcgacggttcatctttcaatcaacatagattcagagtccgagcatctgatgaacaacaacgaaacagatgaagataaaggacatgttttcaagtctctcaacatgtctggtctgattccaacgcaaggaaagataatagcagatcgggttgatggaatatgggtctcaggtggaagagtattgatgagcccgtcctcaagcaaggcttggcgttatggtatacagtctcttattgcatctgtggctcctagccttcattttggaatcaagacaggggactcttaggtttttcacatgaaactactacacacaaaagaaacacataaattgctctctcttctcttctctattcttccattctttgtcgacccgtaaacagaaaatgataggtgtcgtcttgtatatataacctgaataatg

SEQ ID NO: 134276 - DNA, 751 bp, Arabidopsis thaliana
gtccccaatttccggtttgacccacgcgtccgatttctcggactctctcgccttctttccctcacatgtctctatttccctgatctggaggtccgagacaatgctaggatatatctgaggatgctggtctgtataccaggacagagaattaagaacattttgaagccggcagatgctgtcactccatcaacccattcttctacattttttagtgttcaaagtcctcgttttcgtcatgatcctagtaaatctcggaacctttcatcctatattcatcttgaacggggttacgcccctactccgtggaacaagtcatggtcattgtcctctaccatctctaagtgttggaactgatggatatagcattatagaaaacaaaatccaggtagatgaagttgagccggatggcagtcaagaacttcagattttggcagaagctcgaagaattgaatcaggaaaacctacgtttagggtaatggactcaaagattgcagagattctaaaaagattaagaagatttttctctggtgattcctgatttcaaacacatgccaggaattaaggttagaataacgtgtaccttgagattggatgctgaaccatatagcagtttatgggggaagtgaaactcagaaaatcgatttaagaaagtcgactcacctcctgcgattttcgcgacggtgctcaaattctcatcttcagccccttatggctctatttccttatgtcgaatacctttccttttcgggga

SEQ ID NO: 134277 - DNA, 761 bp, Arabidopsis thaliana
  unsure (1)..(761): unsure at all n locations
catgccgtcgcatgcacgcgtacgtaagcttggatcctctagagcggccgcccttgnttttctttttttttattccaatttaaataaacttctcaaaaaacagaatttgtgttttgttcgtttgggtaaaactttacatgtaggttgggcccaaagaataagaagaaaatagtgaaagtctctgctattattacaaaaacaaagcttctaagtaatcatcaacataagctaagcaaggccaatagatctgttcttatatgcaccaatgtcgatccttgcccaacttccatttcaaacattcagatgatatccttggcggcagaaacatcagcatcttgtatctgttcccattcttccccctacttctcgtcatcgggaacctcttggtcatctccatatccaatgtatgtcagacgaagagggcctcggtttaatcccaccgaggatgaagaaggctggtccgcatttgtgtgatccccttgttcttcttcctcttccttccacacaatgttctcaataattcctccgtctcttacaatgtttacaagctgttctccactgatagccaccacaaagggcgctaaacgaagctcagtggcctgtattacagttttcgcagggacttcaagcagttttactgaccgagtcccgctgactgctgcagccattttgccaccttttagtgcaaatgtttcgtgtgcagtgctggacaaagaaccacacactttccacaaagcattgaatagatctgagtagtagct

SEQ ID NO: 134278 - DNA, 763 bp, Arabidopsis thaliana
gtacccgtttggaattcccgggtcgacccacgcgtccggtggtttcaggttctcaacgagagtctttcgacagcttcttgttcctagagactttaagtcaactcgcaaaccctctgggtagaagacggttaggagatacttctagtctctctatccctgcaaagaagcagaactcaagtggaccaagctctagacagtggcctatgtttcaacgagctggtggcggcaatatccacactgaaaataatgatggcgcgatgcaggagtttcatttcagatctagtctacctcattgtagtacagctgcctgcccttttacttcagtgagtgagcagttggtagaggaatggcatgcgagccctgaggagctcaggggtgacaatgcgttccagccttcttcaaacatcttttagtttggggatcctcccttattgagttgctgacccaatttccagtgtgaaagggctcgtgagggctgcaatgcctgatatccggccaccgcatttcttcctcccaaatttctgtcgggacaaatcccaaggaagctgggttttgtctttgggtacttcatcccgaaatctcttgccggcccattcaaccggggacatcttacaatcctgaagtctttaatggaaccccggattgtttgccgaaggcttttttttttcccttgaacctgaaggcacagagtctggaactttcaacacttccttttcttgtccccaaaaaactgggcgaaacctgctggaaatttcggggaagc

SEQ ID NO: 134279 - DNA, 1016 bp, Arabidopsis thaliana
  unsure (1)..(1016): unsure at all n locations
cccttctgcagtaccggtccggaattcccgggtcgacccacgcgtccgtatggcaaaaatattggctgggaggaggagatacttaggacattaacccactgttaggccgaatgcaaaaaagctttacagattattcatgaacaaagagaacacgacatgggaggagttttcatctaaagtccgttcgtttcagagagggttcatgggagagccaaaggaagtaagagctggtagaggtgaatttcacgaaaacccatccacgtgcatatgcgaagatacagaggctaaggcaaaggcgcaattagaatctagaaaacttggaaagaaaaacaaatccactaataaagacgcagcagtaactgtaaccaatgatgatcaaaccgaagaggatgacccagattggtcggagccagactatgaggaagaacagagtgatcttcaggacagaggattattcaacgggacaagtttagattacgatgatccatctacctctggatgagcctgagcttgaagcaatgctatcagattagttagatacgcatcagtgaccttcacatcactacactgaatctgtcctctgcttgggcacttcacagtgagttttccaaccttggtgctaagccttgttgtcaccattttgcatgtaatgtctcctgtacatagaaccacgcgatagagcattgttttgtttatcaggatctgaggacagatcaatttttttcagtcatattttagtactcggaattgtggctttaccagagaaagtagctatagaaaaagggaaaacaagtaggcatgtgtagcattatgacaccggtgattacttgatccgaatattttctttacaataaactgaattatagcagcaggttcattgactttgtaccaaagtattttcacgaggtttggttttccnnnnnnnnnnnnnnnnnnnnnnnnnnnnnnnnnnnnnnnnnnnnnnnnnnnnnnnnnnnnnnnnnnnnnnnnnnnnnnnnnnnnnnnnnnnnnnnnnn

SEQ ID NO: 134280 - DNA, 761 bp, Arabidopsis thaliana
accggtccggaattcccgggtcgacccacgcgtccgagatccatcaaactttattaaagaaagaagaacaaagagatatttgggaagaagaacaatggttttctcatccgtctcaggctttttagatccaccaattaattggccacagtctgcgaatccaaataaccatcctcatcatcatcagctacaagaaaatggaagtttagttagtggccaccaccaagtactctctcaccactctcccacaaaaccctaaccctaaccaccaccaatgtttgagacagcagccgccaccaccgttgatcccgagcagttctcaattggccaggcggtcctgagaggtgcggcggggctagcttaagaactctcagccgccagagggagccctaaagtgtcctcgatgtgactcagccaataccaagttctgttacttcaacaactacaacctcacgcagccacgccacttctgcaaagcttgccgtcgctactggacacgtggcggtgccttgaggaacgtacctgtcggtggtggctgccggaggaataacaagggtaaatccggaaattcaaagtctttcttttcctctcagaacaagcagtcaacgtctatggtcaacgctacaagccctactaatactagtaatgtccagctccaaacaaatagccaattcccatttttggccactcttcaaaacctcactcaacttggtggtattgggttaaacttagccgccattaatggaaataatggtggaaatggt

SEQ ID NO: 134281 - DNA, 718 bp, Arabidopsis thaliana
  unsure (1)..(718): unsure at all n locations
cgcatgcacgcgtccgtaagcttggatcctctagagcggccgccctttcttttttttttttatttttcngcccatatgaatataagtaagcaaaaaaggcaaaataaaaattaaaaaaggagaattatgaagaggagccattggaggaggaattgtagccgtaggggttattgcttgcccaattccatagatccctacacatctcctctatcccattcttagccttccaatttagttcgcgctctgctttttccgttgagccgtaaacaacctcagcgtctccaggacggcgtccagccatcaccaaagggattttctttccggatgctttttcaaaggcagcgaccatttctaggaccgatgttccattacccgttccaagattgtatacctcacaactgattttgagatcatcctgcttgcgcagagcagctatgtgtccatctgctaaatccatgacatgaatgtaatctctaacccctgtaccatcctttgtcttgtagtcggttccaaagacagcggacccgtggnnnnnnnnnnnnnnnnnnnnnnnnnnnnnnnnnnnnnnnnnnnnnnnnnnnnnnnnnnnnnnnnnnnnnnnnnnnnnnnnnnnnnnnnnnnnnnnnnnnnnnnnnnnnnnnnnnnnnnnnnnnnnnnnnnnnnnnnnnnnnnnnnnnnnnnnnnnnnnnnnnnnnnnnnnnnagtggtaaaagccctg

SEQ ID NO: 134282 - DNA, 789 bp, Arabidopsis thaliana
actatagacgagtctatgacgtcgcatcgcacgcgtacgtaagcttggatcctctagagcggtcgccctttttttttttttttattttatcgaaatttattggtacaccgtacacgaaacatgcaaacaaacatacaggatcatatagttttacgattcacgaccctcccttattgcatcacacacacatatttacaaacactcatcatcaccgtcaccgaacattgtttatgcagagtcaactccataaaagaagagatcaccaaaccgatcattggtttgagctttcccaccaaacatcaccagtcctttcttaccatcaatggtacctgtcgtggacgcagaccaacctctgatactcgggagtctcttgctcttcacctaacttatccagcttctcccacttcaacgtctctgtatccaacgcaaaagttccaccactcaattgacccggaccttcgtgagcttttgggtccatcgctatctcacctccaaagaccaaaatgtgtttcccaacaaccgtactagcgaacacactcctagcgcaaggcttctcaccgaacgtctccacttgtgtccacttgtcttgagctggatcgtagcaatgaacatcatgtacttcacatccgttgaatccatacacaacccatactttcccttgtaccacttcgagcccggtttcttctgttacgctacacgaacctcccggggtccaacactgcacccacttgtgatcaacgatgttgtaagcgtctagtgtcttgagccaaaccgtaacactcactccac

SEQ ID NO: 134283 - DNA, 867 bp, Arabidopsis thaliana
  unsure (1)..(867): unsure at all n locations
cnnnnnnnnnnnnnnnnnnnnnnnnnnnnnnnnnnnnnnnnnnnnnnnnnnnnnnnnnnnnnnnncttttttttttttttttttttacaatacaaataacatcatcatattccaattcatccaacattaataaaaataacttaaatattcaaagaaacaaaagaacatgaattttaaaaggttataaaatttattatagtaaaaaaataaatgactggcgcttacactgcacaaatgaattacgaaatgaagggaacacataagagacaacaatctcggacacattcataagtgggaaaataattatattaaataaaatacctcagctgcctgctccgttggtcacggtaacgccgccactctccaccttagggggagctgagaaccgccgtggtttaggcaatgcaggcgaagttggatacgagagccgtttcttagctgatgccttgtctgtgaacccttcgttttcctgtgtggtaccacctaatgggctttggggcttgagcctggctcgagctgatttagttggaaccatgtagctcgggagagctggtgagccagcgaggctctcatcgtctctgactgatgaaccagcaatgctgtgtctgcggttcctctcggacaggaccgagattgtgcttttggagtcgtcgtcattggatttcctcgaggattggtttagccttgagggagttggaggtgagaagaaactgtttttgtttcttggggtccctcttgcggatgatggtgtgtttggttgagttgagccattgcgggttagagattttgcagcttcgttgcggttaataagccccctgaccgaggcagcattgtcattggtgcctgtgctttgttctttctcggaac

SEQ ID NO: 134284 - DNA, 512 bp, Arabidopsis thaliana
  unsure (1)..(512): unsure at all n locations
gcaaacccaantccacccccttggaccgaaacccccaacccccaccctaaggggaactaaaaaccccccgggtttaagaaattacagccaaattggaaaacaaaacccgttcctaagctnaatcccttggcctgtnaaccctccgtttccctgtgtggtacccccctaagggcctttgggccttaancctggctcgagctgatttagttggaaccatgtagctcgggagagctggtgagccagcgaggctctcatcgtctctgactgatgaaccagcaatgctgtgtctgcggttcctctcggacaggaccgagattgtgcttttggagtcgtcgtcattggatttcctcgaggattggtttagccttgagggagttggaggtgagaagaaactgtttttgtttcttggggtccctcttgcggatgatggtgtgtttggttgagttgagccattgcgggttagagattttgcagcttcgttgcggttaatagagcccttgaccgaggcagca

SEQ ID NO: 134285 - DNA, 508 bp, Arabidopsis thaliana
tatagcaagactatgacgtcgcatccacgcgtacgtaagcttggatcctctagagcggtcgccctttttttttttttttgaatagaaagcgtagcattgtgaaataagcaatctctacacaaagaccacatcaaaggacacagacaaagtaacatttgcaaaaagaaaagctaatgaaaaattaactataacacaaagatgtttagaaactatccatgatttttgtggggaacaggagaattgatgacctgcaagatctgaacaatctcggccattgttggccgattcgaaggtatctgagaagtacagaccagagcaagtttcaagacaggcaaaacctcatcttcagagtattgttcctccatcactggatcaatacactccaacacattcccttgttctaacataactcgaacatggtcactaagtatcacaaagctgtcttcaccatactccaccggtctccgaccagtcaccagttcgagtatcaaaaccccgaacccgtacg

SEQ ID NO: 134286 - DNA, 922 bp, Arabidopsis thaliana
ccctatagaagagctttgatgttgcatgcacgcgtacgtaagcttggatcctctagagcggccgcccttctatttcttttttttttttaaaaaaggcgaattggacactggaaatgtcaagtcatccgagatttagaaccaaagcacgacctattaaggatgaaaatcatttgaaaaatgactattcgaggaaaactattgccacggtgcttcaaaacactgctctaaacagctcagcgcattttgtactcgcactatttacagccctcatcgatacgatccttggatacttgagatgatcaacgtcacatattttcgcatcatcttgcatcgtcaggttgttggccaccagctacctctactggaagaactgtggtctcgtacgctcggagaagatgaacacttgctagaatgagagcctttcttctatcgatctgctgatgttggttctctaacatctctttgttttctctggcctttgctatgtttccttatcaaaagtagacccaggggtttcttatattcgttattgtgttgcaaccttcgttggaaaatcctatgcgttttttcaggattctggctctttttattttgaaaacccttttcggctcttcgggtgcttcccacggaaaaacccgggtttcacaccggaggggctctacttcgtgggagaacacggttggtccaaccggggtttttggttttggtgttcaagatgcggacactgtgcgtatcttaagggtaagggccatctgctgtaggcggcaatgtgttttggtataggggtacacatgctcgcctttggagaactcacagcctacggggtatcctggatctccccaaaaattatgtggaaacgatgggactctgttagatagcctccgggatttggtccctgagggggttattaattttgcattcg

SEQ ID NO: 134287 - DNA, 529 bp, Arabidopsis thaliana
  unsure (1)..(529): unsure at all n locations
cgcgtacgtaagctaggatcctctagagcggctcgcctttgtgtttaattctttaatgaaattagtagatttggacactggaaattacaaatcatccgagtctcagaactaaagcagacctattaaggatgaaaatcacctgagaaatgactatccgaggaaaacgaatgccacggtgcatcaaaacactgcctccaaacagcgaagggcattttgtactcgcactatatacagtactcaccgaaacgatactgggatacttgagacgatcaacatcagatcctcccgaatcatcttgcatcatcagggtgttcaggccaccagctacgctaccggaagaactgcgggctcggacgctcggagaagacgaacacttgccagaatgagagcctcctccaatgagtggtggtggtggttccctaaancccttggcctccctggccttgcanggaccctatcagagagtccaggggttaatccggtgngtgactcgngngcccgntccagcngnccctgaccttgccaggcc

SEQ ID NO: 134288 - DNA, 801 bp, Arabidopsis thaliana
acctatagaagagctagacgtcgcatgcacgcgtacgtaagcttggatcctctagagcggccgcccttttttttttttttttgatgagaataaaattcaacattgaacccaaatatggaccaaatcatgtataaaatcatattgaggagtacaagttgtaatatgagaattgtataatcattaactgattatacaacgaacaaaccgattttgttgcgacaagtgagacagatgaaatctatattgagagctaataatgatatcttcttgctgatatgtacatcactaatttacctctgactgctgatgctggaatgattggactgaggatcttctgcaggcaatgtgaccattctgacagcgggtgagggcttctctggttctgcaactatgtgaagagagttcttagtgtctattgtctgtccccatggctgatctgttgactgccaagcgtaatgtgagtggttgggcgaggatcaagacatggatggacctgacatactccatgaagcggaagagactactagggaggatgcatctaccagaaccggagcaaatgtgccaatccccaaagtgtatggcgagaaatctggcaaaggtcggtttttgttcaggtacaggaccactcgttccattgtgggtctggattctggccctatatttgaacagagcagacccagtttcataacgcgtcttgacttcctcagctacaaattttcctcccaatctcgggtcagtagcatcaagcaaagaatccttttttcagcactcacaaacccatttgatcatatgtcgtttctc

SEQ ID NO: 134289 - DNA, 450 bp, Arabidopsis thaliana
ggttgtaaagtagaacatatgtatatgttactgtgtaaagtacactgtaaatcaaattaaaagtctgtatcattccgacttatgaaaacgattcaagaacgtaacttataagtctatttggacaatgcgactttaattagcagacaggatattacaatttcggttgaagaaagatattaaagttacagtaagtgtaagtaccgttacaacaactagtcaaccactgattcatctacttcccgcctgaccgtcaagatataagttgttgttgatagaattgtgttccatctcttatgttgggttctctggacctgttcttgggatgatcagaggtctgaagaaaactaaggcgaaaagtaattccataatgaacaaactcatgctgatccagacaaacaaagttttcctccagttccatatgatccttttcaagaaaggaagtttggattc

SEQ ID NO: 134290 - DNA, 792 bp, Arabidopsis thaliana
ttagacgagctatgacgtcgcatgcacgcgtacgtaagcttggatcctctagagcggccgcccttttttttttttttttgaggaaaatgtagtttttttttttgttgtttccttgtaagagaagcgtaattgaaaagtatttcgaagtaagtaagacaaatataaagtctgcaaaactagccaatccccatgggaaggataaatctctctctttctctcttgctctctctctatttatctccctttttgaccattcacaattccacatcacctccttttcaaaacagctctggatcactctgcctgaaccataaccggctttccccgtcccattgagaatcctctggtcccatcaggcattcgtggtccaggtggttgctgtttccccatgcctggttgctccatgttgttcattggattgttcgaaggttgtgttcccacttgatgatgatgatgatgatgatttcctcgcccattgtggttgtggttttggttatggctgtggttgttgttctggttttggttctggtgtggttgccctcgtcctcgtccctttcctctacctctgttacgcccttttctctgcccagccgctttctcattcccttgatcctctcctattggctgctcttgcatatgtgtatcccattccccagaacagtcatcagattgtttctcaatcggctgctgctcggatgttgtagcatcatcttcctcatgttctacatctgcatcatgtccttttcttcctcgcccttgaccttgttttggttccttcgtctgatgctttac

SEQ ID NO: 134291 - DNA, 914 bp, Arabidopsis thaliana
  unsure (1)..(914): unsure at all n locations
atttccgttnnnnnnttagaagagcttgacgtcgcatgcacgcgtacgtaagcttggatcctctagagcggccgccctttttttttttttttttgtgtatttaagaaatcttggtagttggtatatatagttttgtcaatgcatttctcgacaaaatcaatgctttccatttctcgacaaaacaattgctttccacaagagaagtcatccagtaatgagcttaagcagaagaatgatgtgctagagaatcatctaaaggtgcatctctgaaaaggtcatcatatgaaacaggtaccctgatcctctcatgaacagatttcctttccttttccggtttggattcagtctggtcagctaccggcataacacacatctcgctcaccagagcttcatcagcagatacatttccagaggcaactccttcggaggagctaccctgatctcttttgggccctgattttggtctcgtgtttggttgcctaaattgtttctcaaactccttggtctttttcattatctctctataagcttcaagctgtctcgctttgatgatgttccacaatacaccaccacttgtccgtttcctagtgccatcagcagtcacctgacctccacaggtctcaattgctaccacctcattgacaagatcacttaaggcagcaattccgagacacccaacagctgtgtatatcatgtaagacttcttctccttgaggcgtctacaagtttccctaacaaaccagtctacactcatgggtttgtccatcacagggccttttctctttttcctcctcttcttcctcttgttcttgtttgtctgctgcagtcccttcttctcacccaaaatcgcctctttatctttgactccatcaccatcataattttgtctctctccagaatctaagtcatgatcc

SEQ ID NO: 134292 - DNA, 705 bp, Arabidopsis thaliana
ccggtttcggaattaccggatcgacccacgcgtccgcaccacaaatagaaacaataaaccccacacccctttttattatccgagccaacccctcgagaaattggctggtggtttttctaccactactctgtcactccaccatagccaaaccttcctcatcaccaaactcctagcagcagcatcaacttcattgtctcatcatgccgcgtcacgcgttaccaaactctctgcgtcaaatgccttgccgcttttgcagacaaaatccgccgcaacgaaaaccagttagctcaaaccgctttagccgttactcttagtccgggttcagtccacggcaatctatgtatggaagctgactaaagctaggagaatcaaaaggagagagtccttaaccgtgaaggattgtgttgaaaatcttggagaccgtttagaaatgttggcctcaatcgatgagggagttgaaccaagttggtcgatctgttcgtgatcgaaacaagtttttgatataaataaaaaatatgttttaatatttctaaaaaaattttaccccatgaaggagatgataaaagaataatctctttccctctcttaaattctctagtgcaattctatatacgcgcgggaacgtttataagctacagtgcaatagcgtatgcgcgatcatagctcatccaatgttggaatgcacataaggctgtgcatgcacta

SEQ ID NO: 134293 - DNA, 926 bp, Arabidopsis thaliana
  unsure (1)..(926): unsure at all n locations
nnnnnnnnnnnnnnnnnnnnnnnnnnnnnnnnnntcggcagtaccggtccggaattcccgggtcgacccacgcgtccgcaccacaaatagaacaaagaaccccacacacacaccaatggaaccaaagctaacccatctttgttattgccttctactttttcttccactactctgccaatccaccatagccaaaccttcatcatcaccaaaccctagcagcagcatcaacttcattgtctcatcatgccgcgtcacgcgttaccaaactctctgcgtcaaatgccttgccgcttttgcagacaaaatccgccgcaacgaaaaccagttagctcaaaccgctttagccgttactctagtccgggttcagtccacgacaatctatgtagggaagctgactaaagctaggagaatcaaaaggagagagtacttagccgtgaaggattgtgttgaaaatcttggagacggtttagagatgttggctcagtcgatgagggagttgaagcaagttggtcgatctggtcgtgatcgagacgagttcttgtggagactaagtaacgttgagacttgggttagtgctgccttaacggatgagacaacgtgtctggatggtttcgatggaaaggttatggacggtgtggtcaaatcagcgattagaagaagagtggttcatgtggctcgagttactagtaatgcattggctcttgtaaaccggttcgcggctaggcataagtcatagaatattcggctaataaattaaaattcggtccttaataaggttttgtcatgtattttcttttttgtcctagtgggtgatttgtttctttatgatactttgtatttatgcgtaggcttgggatgtttatgcctttgtcatggtttcgactagagatatcgatgattttaacgggtttatggagaanaaaant

SEQ ID NO: 134294 - DNA, 927 bp, Arabidopsis thaliana
ggatagctggtccgcctgcaggtaccggtccggaattcccgggtcgacccacgcgtacggacctgtttttttgcacaatggatgcaaaccactaatggtgcatagagacatcaaaacaacaaatatattgctgaatgaacaatttgatgccaaacttgctgattttgggctctcgagatcattcccgattgaaggtgaaactcatgtttcaacagctgttgctggaactcctggatatctcgatcccgaatactacagaacaaattggttgactgaaaagagtgatgtttatagtttccgagtcgtattgttagagatcatcacaaaccaacccgtgatagacccaagacgtgaaaagccacatatagcataatgggttggggaagtgcttaccaaaggatacataaaaaatataatggatccaagtcttaaatggagattatgattccactttctgtttggaaaagctgatgaactagcgatgtgttggtcttaatccttcatcatcttagaacaaccgaacatgtctcaaagttggtctttgaattaaaccaaatgtttgacctcctgaaaattcaaaggcgaggatctattcctagaccttggacctccagaaaggttcttttatgaaattaagctttgacccttttggtaccccgaaaaggaacccccattgtgcctccggtaggcttcacctttaaagtaattccaaccctttccttctcttaaaatttttttgaaaaggggtatctcttcctacaaacaaccacttttgtaggaaaattaaggttcacttcccaccatttttttaccccaatacacccatggtgtttttcctcacagagtttttatatttaactcctctaataaaattttcttgtgtgtgtcacccctctcgaaagggttaaattccaagagtgtatcccc

SEQ ID NO: 134295 - DNA, 910 bp, Arabidopsis thaliana
  unsure (1)..(910): unsure at all n locations
cggtaccggattcgaattcccgggtcgacccacgcgtacggacttgagtatttgcacaatggatgcaaaccacttttggttcatagagacatcaaaacaacaaatatattgttgaatgaacaatttgatgccaaacttgctgattttgggctctcgagatcattcccgattgaaggtgaaactcatgtttcaacagctgttgctggaactcctggatatctcgatcccgaatactacagaacaaattggttgactgaaaagagtgatgtttatagtttcggagtcgtattgttagagatcatcacaaaccaacccgtgatagacccaagacgtgaaaagccacatatagcagaatgggttggggaagtgcttacaaaaggagacataaaaaatataatggatccaagtctaaatggagattatgattccacttctgtttggaaagctgttgagctagcgatgtgttgtcttaatccttcatcagctagaagaccgaacatgtctcaagttgttattgaattaaacgagtgtttgacatctgaaaattcaaggggaggagcgattcgagacatggactcagaaggttctatagaagtaagcttgacctttggtaccgaagtgaccccattggctcggtagtttacatgaagaattcagcttctttttgaatttttgaatggtttcttctaaacaccatgtgagaataagtcatccacatataaccatacaatgtttttctaagttttcttactctcaaaattttgtgttcagcttgaggttaatcgaggtatcctagtggttaatcgaagtatacttcttcaaaaaaaaaaaaaaaaaaagnnnnnnnnnnnnnnnnnnnnnnnnnnnnnnnnnnnnnnnnnnnnnnnnnnnnnnnnnnnnnnnnnnnaac

SEQ ID NO: 134296 - DNA, 697 bp, Arabidopsis thaliana
ggataagttgttccgcctgcaggtcccggtccggaattccggggtcgaccaacgcgtccgttcaaaattttttttttttctaggtttattactacacaaaaccaaacatcatcaactttagttactaaacaatggcatcaggctcaatgtcttcttatggctctggctcatggactgttaagcagaacaaagcctttgagcgtgctctagcagtctatgaccaagacactccggaccgttggcacaatgttgctagagctgttggtggtaaaacaccagaagaagctaagagacagtatgaccttctagttcgtgacatcgaaagcatcgagaatggtcacgtgccattccctgactacaagactactacaggaaacagcaacagaggcaggctgcgtgatgagggaaaggaggatgagaaggcatgaagcttgcagtgaggcaaggagcaacaaaacctacctccgtatgatcgtcaaaataaaaggggttcacttcagagagtggtgtttttttcaatgtctgccgaatcaatgtttttttcttgcaatttcccaggtttttccctaagaataggttttttttttcgaggccaccaacaaaaaaaaaataaccacctcgaaattttgtttacacaaaaaaaaaaaccaaaaaaaggggccgggccccccctctttaataagggattcccaaagcc

SEQ ID NO: 134297 - DNA, 792 bp, Arabidopsis thaliana
ccaactcactttagggaaagctggtccgcctgcaggtcccggtccggatttcccgggtcgacccacgcgtccggccaacctcattggattcaatcttgaacctaaatttgagggcaaagatatgctttcccggtcagctcttctgtcagagctggtttcaaaaggtgttttgagctgtgcatctcaggaggtcaaagatcttttccatgttttggagcatgaatttcacccacttgatcttggctccaagattcagcctttgctggaaaagatttccaaatctggtgggaaactgtcctcagctccttctttaccagaagtgcaactttcccaatatgttccttctctggagaagcttgctactctgaggctacttcaacaggtgtctaagatttatcagacaataagaattgagagtttatctcagttggtacccttctttcaattctcagaggtagagaagatttctgttgatgctgtgaagaacaattttgttgccatgaaagttgatcacatgaagggtgttgtaatttttggaaatttgggtattgagtctgatggactgagggatcatctggctgtttttgccgagtctttgagcaaaggaagagctatgctggatcctgtcccaagtaaagcatcaaaactagcttgcggtataccaaatttaacagattcctgtgagaaagagcacaaaagactgctttgtcgtaaatcaatccttggaaaagaggaaggaggatcaagagcgtccgccactctaaaatgggacctgaagaaggacctaaaccg

SEQ ID NO: 134298 - DNA, 473 bp, Arabidopsis thaliana
  unsure (1)..(473): unsure at all n locations
gtcatctgttgtcttggcggcattgtccattccaccatttgtgcgggctcagagcgcatcccatatggaacttgaaaatgagaaagaacgcaatttgaggatggctaacctcattggattcaatcttgaacctagatttgagggcaaagatatgctttcccggtcagctcttctgtcagagctggtttcaaaaggtgttttgagctgtgcatctcaggaggtcaaagatctcttccatgttttggggcatgaatttcacccacttgatcttggctccaagattcaagcctttgctgggaaaagattttccaaatcttggtggggaactgtcctcaagctccttcttttaccagaagggcaacttttcccaatanngttccctctcttgggaagntttctnactttgagggtnntttaacaggggctaaagtttttcagccataaggattngggggttttncaagtnggaccct

SEQ ID NO: 134299 - DNA, 647 bp, Arabidopsis thaliana
tatagggaaagctggtccccctgcaggtcccggtccggatttcccgggtcgacccacgcgtccgaatcagaactatttttgagtatctgagtcagttctttttttttttttttttttggagcaacatctgagctagttcatggttagatttgtttagattttttttttttgtgtgttttatgaaaagacaagaaaaataataagcaaatcgaagtcaaatctactttggttttgatctggtttcaattagttaagattagttatatatgtatttgaaacaggattactcttatatctattttaatgagttttattggttatttttctatgtagtcagtcatgtataattatagaaatttgacgccctactgatttgtttaattcgtttttatccatttttctgtggtggtttcggtttgattttatccaattgatcacctagttgtgaatcaaaaataatcacacttctgattttattgcatcttcagatctttatgattcttccacacttcggaggactttctcaatgggattttgctggtgattaaagtttaattttgttattagtatatatagccattaatattttaattatgcgaattataagggtttgtggaactaataatttatttttcctctcacaaaaa

SEQ ID NO: 134300 - DNA, 670 bp, Arabidopsis thaliana
ccaacccactatagggaaagctggtccccctgcaggtcccggtccggatttcccgggtcgacccacgcgtccgcgacatctaacctctgctctacttcagcctctacaacactactccttcttcttcttccttcttcttctcttcctctcttctctactcaacatgcgtgagattgttcacattcagggtggtcagtgtggtaaccagatcggtgccaagttctgggaggtgatctgtgacgagcacggtgtagaccctaccggcacctaccgcggtgactctgaccttcagctggagcgcatcaacgtgtacttcaacgaggccaccggtggtcgctatgtccctcgcgccatcctcatggacctggagccgggcaccatggactcggtcagggctggtcccttcggtcagatcttccgccctgacaacttcgtgttcggccagtccggtgcaggcaacaactgggccaagggccactacaccgagggcgctgagctcatcgactccgtcctcgatgtggtgaggaaggaggccgagtcctgactgcctccaagggttccagatcacccactccctcggtggtggtacccgctcaggcatgggcaccctcctcatctccaagatccgtgaggagtacccccgaccgcatgatgtgcacccttctccgtg

SEQ ID NO: 134301 - DNA, 810 bp, Arabidopsis thaliana
ctatagggaaagctggtacgcctgcaggtaccggtccggaattcccgggtcgacccacgcgtccgggttcgattattaagaacattagaggtagaactagagctaacgttaaggttgtctctaaagatgtttctgatccttctcacacttgtgccatggattttgacaacattgttatgatatctggtgagactgaatccgtgaagaaggcacttttcgctgtttctgcaatcatgtacaaagtcagtcctcgagaacagattcctctggatacaactgtccaagaagttcccgctagtattataattccctctgatctgtctatctatccacaagccgggttatacccaagtcaggattctattttccaacatggggctaatgtttcatcgtttatcggtacactacctcagggttatggagaaaatgctgcaaatcctgtgccggttttttctgcttctgctcttcctgttgttcatggttttggtgggtcttccagatcagaaaagttggctataaaagttatttgctcttcttccaaaattggtcgtgttatcgggaaaggaggattaaccattaagggaataagacaagcaagcgggtctcatatcgaagttaatgactcgaggacaaatcatgatgatgactgtgttatcactgtcactgctacagagtcctccgatgatttgaaatctatggcggttgaagctggtcttctacttcagagatattaatggatgaaacgaggaccaagttaaaatgcacttccttgtatcttcttagggtaatatggagcctttttgggaaaag

SEQ ID NO: 134302 - DNA, 717 bp, Arabidopsis thaliana
actactgagtatagggaaagctggtacgcctgcaggtaccggtccggaattcccgggtcgacccacgcgtccgagaaaggccatttgataggtttcctctcactttcaagatggctgacctagctgaggagcacactggactgtctagtctgacgagttcagatctttcaccaaatagctggatttcgatagcttggtatcccatttatccaattccaccagtgataggcgtggacggaatatctgccgctttcctaacgtaccatttattgaagccaaactttccagaaacaattggtaaggatgataaggggaatgaacaaggagagtcaagtacaccagaagttctacttcctccatttggagcaatgacttacaaggcctttggtaacctgtggatgatgcctgggacatcagattatcagaacagagagatgaatgaagaatctgctgactcgtggctgagaaaacgcggcttctcccacagcgatttcaacttctttatgtcccgtaagttttacggcggaccctattaatgccatcttgcaggtgaattgctaagcctaacaatggagtcctatcatcatatgaaaacctttatgcctgtaaaacattccccatctctctctattctctctcttccctctcttctgacttttgggattcttggctggttcttttaccttcttggagggaattatattttctccttttaaa

SEQ ID NO: 134303 - DNA, 1138 bp, Arabidopsis thaliana
  unsure (1)..(1138): unsure at all n locations
nnnnnnnnnnnnnnnnnnnnnnnnnnnnnnnnnnnnnnnnnnnnnnnnnnnnnnnnnnnnnnnnnnnnnncttttttttttttttttgaagaaaacaaaaaccaatttattcacacgcaatcaactatatatttatacaaaaattagcaaaagcaacggccgcatagacatttttaaaactttggaaataaagaaaagtagaaagaaagaaaaaaagaaactgataggtctcatctcaatttgaggctcaagaattaacgaacaaactagaacaagaacaaagaagaagaagtagaaaaaaggcgggaagtggggtcgacactattcaagaaattgcaacttgaccccaaacaatattcaaatcaatcaatttagacccccaaaaaatcagtcggatacaggatttggggagccagatgaatgagaaacctcctcaatgagtctggtgacttcagccatcgaaggacgactatctgggaactgagccgtacagctcataccgatcttcaataaacgaatgatgttctcattgccctcaggttggtaccttgtgagctcgggatcaagcacatcggacggtgtttgttgctcggtaacagattggacccatctcggcaaatctacgccttcttcattcaactgctgatgcgttggagacttacctgtgagtaattcaaggattaggacgccaaagctatagacatcagctttttgggatattttgcgagcatcagtgatttcaggggcacggtagcccatcaatacggttaggtgcagatgtagaactaatgatgggagcaagaccgtaatcagagaccttagcttcataggagtcagataatagtatgttcgaggacttaatgtttccatgagaagttgtcccatcacgcgaatgtaggtagctaatcgctcttgcagctcctaaggctataccggctctggtttcccagttcaacggagttctcccgtttcctttgttcccgtgcaatatcgcagacaagcttcctttagacatgtactcaaagacaagaagcttctcgtcacggctgaaatagtaagcgatcagagtcacgagattggcatgactcattgatcccaaaacatgcaatctctctatgaactctttctccggacgcgt

SEQ ID NO: 134304 - DNA, 646 bp, Arabidopsis thaliana
  unsure (1)..(646): unsure at all n locations
nnnnnnnnnnnnnnnnnnnnnnnnnnnnnnnnnnnnnnnnnnnnnnnnnnnnnnnnnnnnnnnnnnnccacgcgtccgcataacttggtttctataccgaatcggatcattgggaatggaaagagcaggagttcttgcattttcactcaacagggacgcaagggtattaatcaggacgcaatgattgtgtgggaagattttatgtcgaaagatgttaccttttgcggtgtgtttgatggacatggtcctcatggtcatcttgttgctcgtaaagtgagagattcattgcctgtaaagttgctgtccctcctgaattccattaagtcgaagcaaaatggacccataggaactcgtgcaagcaaatccgatagcctagaagctgagaaagaagaatctactgaggaggataaattgaatttcttatgggaggaagctttcttgaaatcattcaatgctatggataaggacctgcggtcccatcctaatctggaatgcttctgcagtggctgcacagctgttacaaccattaaagcaggggccaaatctttccatggggaacattggggggtcctcggcggtacctgggcctaaagacagcaatgattcgatgattgcagttcagctaacaatagacttaaaaccctgc

SEQ ID NO: 134305 - DNA, 800 bp, Arabidopsis thaliana
cgactcactatcgggatagcttttgcgcctgcaggtcccggtccggaattcccgggtcgacccacgcgtccgcctccgcgcagattctgaacctatcaatctaagccggaatcaaaatgcagaatcagattcgaaacaatcgaaaaccaaaaccgaaccagatgtacggatttcaatcccaggcgcagagaaaagcattgtcgtagtacttcacaagcctacgcgtggttcgtccaacattcgaagcctgcaaatccgttacatcgatcctccatagcttcccggtacgaatcgacgaacgagatctctcaatggacgcgtcattctccaccgagctacaacgaatcttcgggaaggatcagaaccagaaccagaaccaggcgaagacgccgaagctgccgcgagtcttcatcggtggtcggtacataggaggagcggaggaggtgaaacagctacacgagatcggagagttgaagaaacttgtgcaagagttgccgaagattgaaccaggggtatgtgagatgtgtggtggtcatagattcgtgccgtgtaaggattgtcatggtagccataaagtgcatacggagaagctagggttcagaacttgcttaacctgtaacgagaatggtcttggcaggtgttcttcttggtcatttccacaatcttcttccaccctaaattcctaggattttcaagttttttttttttttttcaaattttcaattttttggaaaaacccagaaaattgggaaataaatttaaaattattgggggttttttaaatcctaaatttttttaaa

SEQ ID NO: 134306 - DNA, 628 bp, Arabidopsis thaliana
cctgcaggtcccggtccggaattccggggtcgacccacgcgtccgcgcatcacaataagggatgtgttctaatgtcaggctctcaattccaagtaagacatgaatgaaaaccatttctagctaattttcttaagcatagctctaattttcattggaagcccgtaaagacgaataaacccggctgcatccgcttggttgtagatctcactcccttcaaacgaagatatgtcctgtctatacagactgttaggactctgacgccctgtaaccgacacagatcctttgtacagcttcagtgtcacagatcccgtggttgtctcagttatcttctccatgaaagcgtccatggactccctaagcggatcaaaccatcttcctgcgtagaccatctctgcatatttcaggtgctaaatgtggtctttacctgaatactctctctgtctagagtgaggggattctagttcctgtacagctgcaaagagggtagtgcctccaggggtttcatacacacctcgtgatttcatcccacccggccggttctcaaccatgtcatcccgcccaatcccgtgctttcctcctattgggtttgccctcggcagaagtgtgggtggactcagagccttcccgt

SEQ ID NO: 134307 - DNA, 722 bp, Arabidopsis thaliana
  unsure (1)..(722): unsure at all n locations
gactcactatagggaaagctggtacgcctgcaggtaccggtccggaattcccgggtcgacccacgcgtccggatcaagattctgatagagttaaactcggagaagaaaagaagaatccaaacgacgtcggatttgcatcaacaacaacaacaacaccaacatgatcaaatcggtggatatacacttcaatctagcaacagtggatctacagccaccgcagccgccgcgcaacaaataccgggaaatttctggatggttgcggcggctgcggctgcaggtggtggtggtggtaataacaaccaaacaggtggtcttatgacagcttctattggtactggtggcggcggtggagagcctgtttggacgtttccttccattaacacggcagcggcacctttatatagaagtggcgtttcgggcgttccaagcggcgcggtttctagcgggttacattttatgaatttcgcagcgccaatggcatttcttactggccaacaacagctagcaacaactagtaatcatgggattaatgaagatagaattaataatgaaggaggaagaggtgcccgtggtggtgatcatcataatacaccgaggcctcatcatcattacaacacaacaacacatcacnnaaantccnccgggttaccagtcggcggaantccggggccccaccaggnccttgnggggnttggggcccantttnccccaacnttttgggc

SEQ ID NO: 134308 - DNA, 765 bp, Arabidopsis thaliana
  unsure (1)..(765): unsure at all n locations
gnnnnnnnnnnnnnnnnnnnnnnnnnnnnnnnnnnnnnnnnnnnnnnnnnnnnnnnnnnnnnnnnnnccacgcgtccgtacaaatctttaaaaggagacagaggagaagagagaaaagaaaaacgcagaaacaatgtctttttcttccctcaaattgccaatctttctcattctctcaagtcttctccatgcggctataggggaaaacattgtttgcgagaatctgccaacaaatatgtgctcgttctcaatatccgcttccgggaaaagatgtatattggagacggctaatgtcgccggagaattcacttgccgcacttccgcagtggacgtggaagggattgtaaaccacgtggagaccgacgagtgcgtttccgcttgtgggggttgatcggaaaaccgtagggatctcgtcagactccttgatggaggcaggtttcgccgctaagctttgctcatccgcttgcttggactattgccctaacattcttgatctctatttcaacctcgccgccggtgaaggtgcatttttacctgatctatgtgatgctcaacggatgaatccccaagcgttcgatgaagggattcattcagcttcggcgccggccccaggcccctggtctccgaaaattggaccccgggccccccaccttccgaaaagaaagtcctcaaatcttccctggctcttaagccttccgggctttccttattggttaaaaaatgggttcccaattaaaatttcccaccaatggggggttttaaaaa

SEQ ID NO: 134309 - DNA, 480 bp, Arabidopsis thaliana
  unsure (1)..(480): unsure at all n locations
tatttccacgttctctctatattacatttttccttgaaaacatctcgaggttcaaaatctttaacccctacaaatcaagaaaaggagacagaggagaagagagaaaagaaaaacgcagaaacaatgtctttttcttccctcaaattgccaatctttctcattctctcaagtcttctccatgcggctataggggaaaacattgtttgcgagaatctgccaacaaatatgtgctcgttctcaaatatccgctttccggggaaagaatgtatattggagacggcttaatgtcggccggaggaatttccctttcccggaactttccgcaagtgggaccgtgggaagggggtttttaaaacccccggtgggggtnccccacggggttccggntttcccnntttttggggggttttattccggnaaaacccnttnggggttctttggtcaanactnccttttnttggggggcaagttttccccnct

SEQ ID NO: 134310 - DNA, 443 bp, Arabidopsis thaliana
cacttgccgcacttccgcagtggacgtggaagggattgtaaaccacgtggagaccgacgagtgcgtttccgcttgtggggttgatcggaaaaccgtaggggtctcgtcagactccttgatggaggcaggtttcgccgctaagctttgctcatccgcttgcttggactattgccctaacattcttgatctctatttcaacctcgccgccggtgaaggtgcatttttacctgatctatgtgatgctcaacggatgaatccccagcgttcgatgatggaattcatcagctccggcgccgcccccaggccctgtctccgaaatttgcaccaggccccacctccgaagaagtctcaatctcctgctctagctccggcttctatgtaaaatgttcattaattccacatgtgtttaatactttatatttatattttcgattgatgatgat

SEQ ID NO: 134311 - DNA, 724 bp, Arabidopsis thaliana
taggttggaccgcccccaggtaccggtccggaattcccgggtcgacccacgcgtccgacactgtactgataagaagcggcgccgttttgtcgtggaacgctcgttttcagatcgctaaaggaatcgcgtctggtttattgtatcttcacgaagaatgggagaagattgtgattcatagagacgtgaaacctagcaatgtcttgattgattcaaagatgaaccctagattgggagattttggactcgcgaggctttacgaacgcggaacgctatcggaaacaacagcactcgttggaaccatcgggtacatggcgccagagctttcccgcaacggaaacccctcatctgcgtctgatgttttcgcgtttggcgttttgttgttagagatcgtttgcgggagaaaaccaacggattccggtaccttcttcttggtcgattgggttatggagcttcacgcgaacggtgagattctcagtgcgattgatccgagactaggatctggttacgacggaggagaagcaaggcttgctctcgccgtcggattgctctgttgccaccaaaaaccggcgtctcggccgtcgatgagaatcgtgcttaggtatctaaacggagaggagaatgtacctgagattgacgatgagtggggatattcaaagtcttcaagaggcgaattcggatccaagttggtaggatatgtttcgtcgacctcaattaccagagtttc

SEQ ID NO: 134312 - DNA, 841 bp, Arabidopsis thaliana
  unsure (1)..(841): unsure at all n locations
nnnnnnnnnnnnnnnnnnnnnnnnnnnnnnnnnnnnnnnnnnnnnnnnnnnnnnnnnnnnnnnnnnnnccacgcgtccgtaatatagttaatgactgctttgactattacacatccatctctgcacaagaagaatacaaagagaaaggtagatttttgtatggagaatcaatgggaggtgcagttgctttgttgcttcacaagaaagatccttctttttggaacggggctcttctcgttgctcccatgtgtaagatatcagagaaggtgaaaccacacccagtagtcataaatctactaacgagagttgaagatattataccaaaatggaagatagttcctacaaaagatgttatcgatgctgccttcaaggattccggtcaagcgcgaagagataaggaacaacaagctgatatatcaagacaagccaagacttaaaaccgcacttgaaatgcttagaacgagcatggaccttgaagacactctccacgagatcacattgcctttctttgtccttcacggtgaagcagacattgtgactgatccagagataagcaaagccttgttcgagaaggcaagcacacgcgacaaaaccattaaactttacccaggaatgtggcatggattaacttctggtgagcctgatgctaacgttgacctcgtttttgctgacattgtcaattggcttgatgctcgtaccggcgactccgcttctctgacagtcactccccgtacatgattttacctccaatgttcaaaaggtcgctgacggtgttagtaacggtcaaggaaaatctaaacgaccacaagctagtctcctttgtggtttaaatggtggtgga

SEQ ID NO: 134313 - DNA, 959 bp, Arabidopsis thaliana
ttggtccgcctcgcggtcccggtccggaattcccgggtcgacccacgcgtccgaataatatgatcacctctctcttctctccttcatatcttttagagagaggaactgttgaattctgccgaccggattattctggtaaactgccgtcccaagttttgggcttttgcccggcatctttttggctttgttagcaaagatggccggtcctcttctggcaaatccggcttctacaagcggttttggccggcttttatccttcctccgccgttcgatcggttgttcttaccgattgctttagtttctttttcagtttttctttcaataatttctaaagatttcaattggagattaattttaggtcataatagcctaagattaagttttcggatttgtatctttagaaagtttgatttgcagaattacctcaagtatgaaaggaagttttgtttccagcatattgggattgcctgtagccgtttctacatgtttatggagcttcgatcgatcaaatttgaggaatactcagattttcctttcctcattacctgtttttgccaaatctcttgattgatgattttggcatgcagatggaattgaattctctgtttgtgtagcctcccttctctgtttagcagtttccggtgagaaaaaaacaaaaatcgatggttgccctttttcgacgttgattgtgttcaccggatcggagtctttgacggcaaaggatgacaggaacgtttcatcgcttctcttgcaacacgtgtcttgttatacgatcgtgttttgttaaagagatatccttcctttaaagaaatgtaactaagtggacctttgttgggctgtattctgtggatcattaataaacataatctttccagtgaaaaaaaaaaaaaaagaaaagggcggccgctctagaggatccaagcttacgtacgcgtgcatgcgacgtcatagtagtgtaa

SEQ ID NO: 134314 - DNA, 573 bp, Arabidopsis thaliana
  unsure (1)..(573): unsure at all n locations
ggnacggacgagaaaacttgggacggcagtttaccagattatatccggtcgacagaattcaacagttcctctctctaaaagatatgaaggagattaattttggctttgttagcaaagatggccggtcctcttctggcaaatccggcttttacaagcggttttggccggcttttatccttcctccgccgttcgatcggttgttcttaccgattgctttagtttctttttcagtttttctttcaataatttctaaagatttcaattggagattaattttaggtcataatagcctaagattaagttttcggatttgtatctttagaaagtttgatttgcagaatgacctcaagtatgaaaggaagcttttgtttccagcatattgggattgcctgtagccgtttctacatgtttatggagcttcgatcgatcaaatttgaggaatcctcagattattccttccccataccggttttgccaaaccctgatgatnatttggatgaatccccgttgggancnccccccggtaacagtccggggaaaacaaaacgngtgcccttcncgnntggccngggc

SEQ ID NO: 134315 - DNA, 744 bp, Arabidopsis thaliana
  unsure (1)..(744): unsure at all n locations
cccactctagggtaggttgggccgcctgcaggccccggtccggaattcccgggtcgacccacgcgtccgcatgcacgattgggtcaacgtcgaaaagctcatcggaatggagaaactctgtcaaaactgacgaccctttctcaacgtcctctcgccggagttgccctaaatgggaatcttacaccgtcttccaaaagtacgacgaagaaatgacttttctcactagaatctctgctcaaaagcttcacgaagcagaatctttgaagtcaattatggtggagccaagatctatctcggagaggatcgttcacaagttatcatcaaacggtcacaagaaaaaacaaaaacaatatccaggcagcaatggtgtcgagaccaaacccttacgtggaactagaatccgctttacgtggcacagatatgtctaacatgggaagctctaagttggaactacaaaaacttcgagagaaaaagatcaaccacgcaacgaagcttcaacgacgtaggatgtcccgccggaatcgccgaccaattccgtacgtttcacattcttttacaaagatacgtagaaaatgaaccttatgaacatggaagaagaccagagatttatgctcgcatgcgaactctngctcctaaatgcttcttgttcctgaataccaagattatgaggaagaggaggaaaagggaagaccagaatcgaagagggtttcaaggtcgaggatatcggcagcttcgttcttgatg

SEQ ID NO: 134316 - DNA, 762 bp, Arabidopsis thaliana
gaacccaccaaaggtgaactaaagcgggacctccaccgcgggggcggccgctctagaactagtggatcccccgggctgcttgaattcgcggccgcaatcaacaaaacatcgtatagatcccgacaaaaagatagaaagaggtctgatcgatcctctgatgctacaaaaagtattaactgaacaaacctaaacattttatgcatacgccttcgttccttccttcttgcggatctctttcctaacacttttttttttccttcttcattttcagctagtctctttctcctctcttcccatgtacagatcagatacaacaaatgaatagcgtggtcacctttccttttttttgttttcttttccggtcttgtatcctatataagtacctggctttggtctgtcagtatatgatgactctaaggagaccggcctgtggttcggaatagtcaagacctccttcttcgagtaggtagcgctgtacagcaactgggagtctagccggagtgcgggaaccccttgtgtggtggcctgtccctacacatatgtaaatctgaagcctctcttgcgttgctcgagcttgtgctcctcaacacactcaagttcgtgcttcaacacctgaagtgcttcactcacatgtaacccatgcaaggctatcattctctcattccctctactgtttccttgacccactgggttcctgtttcattttttactcataggcaggttagaacagaaaaactgagaacaggagttttgtttttcatt

SEQ ID NO: 134317 - DNA, 780 bp, Arabidopsis thaliana
  unsure (1)..(780): unsure at all n locations
cccgtnnnnnnnnnnnnnnnnnnnnnnnnnnngctggtccgtctgcggtaccggtccggaattcccgggtcgacccacgcgtccgggttctctttgtcgtgtttggattgttgaattcgcttttcgaagggaaagtggtagcgaagcttccgtttcatccgattacgattgtgaggaagatgagtcatagaggattgaaaggcgatgattccactgattgttccatggcttttctttatctgctttgttctattagtataaggactaatctgcagaagttcttgggtttctctccacctagaggagctgctggtgctggtggtttgttcccaatgcctgatccaaagaccaattgatcaggtttgatctgatgatgaattggattctggattctgagctcgttgttactctgaaattttcatagataacctcaatgctctgatgtagtggtgttgttttcagttcgtttgatgagaaacactttcaaagtttcgagttttgagttttcttctagtatgaggtttggatttggatcccttaacatgatctactccttttcaaattcagtcttgattattgtgtgttcaagtccttttcatatgctttgacatctttctaatcatttgtacaccaaaaggcttgagttttcatgcgtatggattgtttggagactgaaatgagaggttagtgaaagatgtaggtaataaagagtacacatggattggggttttgtcaagtggtaatgggtaagttacagagaggctcaagtcatatcctcag

SEQ ID NO: 134318 - DNA, 752 bp, Arabidopsis thaliana
accccccctctggtcgacggtatcgataagctggaatcaaattggcggccgcttttcatatgattcatgttaatgttgttgatacaatgtgaagccaaataacaataaaagtattgataccaagatacatgatttcactgtaaacctttttggatacatttgtgttacacacttacacttgcacatataactcgtcgaacgatgagaaacaatggacttcctctattagatgaacaaaaacagattgagtctcttacttctataacttgtcggtccgaatgcatctcaaatccttgtcaaaagtaaagactttccctggcaacaattcggcagccgcagagattcctctgtacactattctgggtggaaacaaatctgttccgaccaaagaccaaacctccacaagggttccctttccattccactttatactaaccggcacaccggcccctttgcccttagcccattcacaaatgccgttaggccttttatctgctggaagtgccgggagcaaatatagatccttcgtagtgctctgcactaacatttctgctaccgctgctgcgaatccaaaattagcatcgatctggaatggcgggtgtgcagtgaacatgttactatacagtccctcctcatagttacgttcgttcaacggatccacaagatcaaaaatatgtgtaaccatccgatatgcgtgctcgctattgtgaagccttgcccacaaagcggctttccaggtggttgaccatcct

SEQ ID NO: 134319 - DNA, 769 bp, Arabidopsis thaliana
cgtgcacgtacctggggtggatggcctcgatgagcttggcatcggattcgcggccgcattataggtaatagactgagtgttagcatctctagggatgattcttctgatggtaaaaagccggtgtctgctctatttcgagccaaatctgcgaagtcgagtttgagtttggatgtaaaaaaagaatctttggggaagctcaagacttcttcgggttctaagtctattccttcttcgccgacgagttgttactcactgcctaattcttttgcaaagtttgctaatgggattaagcagcaacagactgtgaagccaaagttattggagaagggttctcctagaatggggttgtcagagaagggccggtctcttcttaaagcggagagtccgaaagttgggataaagcttcccatgattaagaattttgtgcaggggattgagtttggagctaaggcgttgaggaaaagctgggaagggaatttagatatcaggggttcagatagaacaaaatccagccttcccagacgtgatttaacccctgattcccggagtttagcagctccgcggagaagcacatcgagtgagaagttgccaagcaaacaggagagggctaatgtatttgcaagatcatcgaaggagcacaataagatacagtccaaccaaagaaaggtcgaagcccaacttggcaggtggttgggaccacccagaaaaattaaaaaccgagttacgggccttaaaaatcctaccatttctggtgtcgaagaaaagaaaa

SEQ ID NO: 134320 - DNA, 764 bp, Arabidopsis thaliana
  unsure (1)..(764): unsure at all n locations
nnnnnnnnnnnnnnnnnnnnnnnnnnnnnnnnnnnnnnnnnnnnnnnnnnnnnnnnnnnnnncgataaaaacggcaaacgannttttcccattttcggccgccttacttgcaaagcaagaaagaaagcaatcaataaaaagtctatgtccccgcacaagttttcaataacattatcatacaaacaacaacaacaaaaaatcatatcgtggcaaatattagaaccggaacaaaaacctaaagcggtttttcagagttgtggccaagacgcagatcgcttgatgactggtttcatgagtttgtcttccttcaagagagatcataccaatgtgtgaaggatcttctagcaacattttcgccactaagtaaccctgcgtttgcccaagtctggtatttccttgccctgttttccaacggaccttccggagcttaccggtcgtaatactctgggccaacagtctcggtgaagacgcgattctatgaggtcaaccgcgcgtcttgcgatctgcggtctccctgtcttaatgcacgctgctgttagctgccacagcaaaactggccaagatccaccattgtggtagctccaccgtgtgttcttggggtcacagccagtaacgatgcgccactcatggccctcgaggcatggataacanatcttgagaggcatctcacctacaagctctgcccaccggtgctcaaagaggtccataatggccctggaattgaatctgaatggcccatgaagaaagtattgagacaccattac

SEQ ID NO: 134321 - DNA, 784 bp, Arabidopsis thaliana
  unsure (1)..(784): unsure at all n locations
nnnnnnnnnnnnnnnnnnnnnnnnnnnnnnnnnnnnnnnnnnnnnnnnnnnnnnnnnnnnnnnnnnnccacgcgtccgcgcagatccgaacttgaaaccatatatacaactcttctcaaggccaacatggatgctgttgcattctggaatcaacaaccactagctgcaagggaatatgcatcagccactgtaattccagccagtgaagttgttgtggacatttcaaacagcgcaaaagatttcattgagaaagaagtgtctgctttctttcaaagtcctgataacagtctttatatgcttccagcaactccccagggacttctggaatctatgggagctaatggatcgacgggacctgaagctgttgcatatgcagagaaggatgctgctctatttacgggctagagcttggtgcaagagatcccttcggccaataccatctatattggccgcatttccttgctgcccttcaaatatcctcgcaggtcttgaaggggttcagaatgcaagtttggcctcagtgttagagtctcttgagttctgcttaagagttcgtggttctgaagcatgtgttttagaagacttagcaaaggcaatcgatttggtccatattcggcaggatctagttgaaagtggccattctctgttagatcatgctttccgtgcccagcaaaaatatgaaagaacaactaactactgcctagatctagcttctgaacaagagaatacaatatcggaccagtggttacctgaaactangactgcagttcaaaatgcgcaagct

SEQ ID NO: 134322 - DNA, 1029 bp, Arabidopsis thaliana
  unsure (1)..(1029): unsure at all n locations
acttntggaaagcncaaggccctgcacntnggaagccntngaccgaatggaacccnggntnctnttccccnggnctgtccntagatcccgggncggttctactattactttgncaaccccattgnaaccagcaggtaaggngaaaganctnaaagaccaagngaaggcacaagagctctacttgcaagttaaatctgaggtagaacaatgcattgactatttaaaagtgaaaagagagagtgatccctacagacacttattgcctaggatgttgtatcaggcctcacatggttggtcttctgaaattccaacgtttgatctctaagtctctctttgtacccacccatttaatcatgatgaatagaggttctaagattctttggagatctaagatctttatatgttcaagaaaagtaagacaaaagatcattttatcgaatgcgcggccgcatgaacctacctataaaggttttatgaatgcagtcatatgtgatgtgactttaggttcatacatgcgtttcaactacagtttaaaaggatggattcttcatttacatgttatgaaagtagaggtaaattctgcattgtaaaactcaccacagaagaagaacgattctgactaaacatcgtttatcagacaagacaaaaatgtagaatcttctccagctgggcaaaagtgttatgtgaaatcccctttgattcgcttatctactatgctttgacatacttgtctacataacccataaccagtttggtaagcttctgctgtgaggattcaatgtacttatcggtcttagctcttgattggggaatacggcggccctccattgggtttgatactttatccaccactctcttcacaatagtcttaaacccctccttgctcatattcccttgtcttcacgatggtttcagaagatccttgacgaattttgtaagcacgactttgaaaagcttcatggacacttgatgaatctctctccttttgatttctctcgagacttttttccttgagttaattcgcctttc

SEQ ID NO: 134323 - DNA, 589 bp, Arabidopsis thaliana
  unsure (1)..(589): unsure at all n locations
cccccccgcctagtgagaggaaacaataagcttgatatcgaattcggggccgcattcatatggcttaaagctctacacctactagaatacaaacattggtaagtacattatacaacaattttacaacaacaaaatgcagacttgcgaaatctgctggcgtacaaactgtttctcatattggtgatgttattgaatgttaaacgacggctttgagtagagcctcatgtacagcttctttggttggaagggccgggattgcgcctctcactttaacggttaatgccccgcatgcattcgcaaacataagagcctctctcagtcgctcttcgtcctgaagcaaggagagatcattggctagttgcgatagtatccccgcaacaaatgcatcaccagcacctgttgtgtccactacatccaccttcaatccatgcactctcccactaaaatccttggtgtagtaccgacagccttcaggaccttcagtgacaaggagaagtttcagcttagggtggaacaactgggganaanttttcncnaagggggttccctttcggagnagnaatccccnccnctactttaaaacggggtc

SEQ ID NO: 134324 - DNA, 596 bp, Arabidopsis thaliana
caagatctctctaattcaaactgagagttacaaagatcaaaagatggattctagttcttggctcaacaatatattcaaaggcttaaagctctacagctactagaatacaaacattggtaagtacattatacaacaattttacaacaacaaaatgcagacttgcgaaatctgctggcgtacaaactgtttctcatattggtgatgttattgaatgttaaacgacggctttgagtagagcctcatgtacagcttctttggttggaagggccgggattgcgcctctcactttaacggttaatgccccgcatgcattcgcaaacataagagcctctctcagtcgctcttcgtcctgaagcaaggagagatcattggctagttgcgatagtatccccgcaacaaatgcatcaccagcacctgttggtgtccactacatccaccttcaatccatgcactctcccactaaaatccttggtggtagtaccgacagccttcagggccttcagtggcaaggggaagtttcagcttaggatgaaacaacttgcgtacaacattatcatcatacggatcttctcctttcgttagaacccacgcgtccg

SEQ ID NO: 134325 - DNA, 748 bp, Arabidopsis thaliana
ggtcgactgtatccataagcttgatatcgaattcgcggccgctatataacagaagaaagacagtttgcaggagaacttttagacaaactaaaaaacgttttagctttttagcgtcaaatctcacaagtcacataacgcaatacaagactatccaccaaacaaaaagaaaaactaacgacaagacgctctatggaaatttcccagctccaggatcaatttaccacaacaccctttgaaacttttctgaaaaccgcttcttaaaaggtcgaaattgcccctcgtcatttgcacaaatttacagttcctccacaacacaacacacccactcctcctctattattccattcagctctcctcccgtagccatttgatcaacgttctttgcatccccatcatcaactccaggctggagcttctatcatggagccagcttttcattccttcctggtaatccttgcttgagcctttcttgggcccgggcatggcctggactttaaccactgacctctcaagccgttcctccgcttgtttctggcttgtcttgtaaaaaatctccaccgcctcactcccttcctttttcgtcagggtgacttaacctgaagggcctttgaaatcctttttctctttcaagtctccaatcttaaaaaattgggcctttttcaaagaaaccttcccacttggacccatgggttaattttttccgggggaaccttggggcctttcctttaaccttgggggaaaaaaccct

SEQ ID NO: 134326 - DNA, 806 bp, Arabidopsis thaliana
tggccagcctcgggtctacttatctagaatctaaatatcggatccgtggcctcgcaatcttcacctatacatttcctgttgtctagtctagaaaaatctaagactttttactcctcccttgtcttctggaaatctgggaggattttaaggttcttcttgtccaaaaattaaaaaaattgccaatcgtggattgtgtatcattcattgtcatcatctaatcttcttcttcttctacttacgagtttggagaagttatccgccattgaagcatttaaaatgccggagaaaggaatgattttcccgccggtaccgagccaattggtgattcttccggccaagcccttcttcttcaattgggcgggcttggtgcctcttacaagcactcggcctgcttccccttatgttcagtcggtctggaggtattgacgggttgttccgattcaaaaggcttcgttcagccattggagattcaatgcttactctgttcgaatcagtccttctgcgtcgccgtttatgtcaacgaaacccaatctagtatcagagaaacctcaccgccaaaatctcaccttgatgatggctccacgaaatctggttccgaagaagacgaatctcactttcaactcgacccgggtccagttcgagtggataaccgctggatctcagaagaatttcaccgccaaattgatgagaagctgcttgggctcccggaggaacgcccgtgtaaagaaatcgaagaacccgtctaagattttcaattttcccgggtggtctaaccgggatattggatttttttggggaggtttaac

SEQ ID NO: 134327 - DNA, 546 bp, Arabidopsis thaliana
  unsure (1)..(546): unsure at all n locations
tccttttttttttttttttgtcatcaaaaaaatttggtcaaaaattaaatcgacagctaaaagtttgaacataaaattcggtaacagaaaacagtaaagccaccgacgatgtaaagttattatagaaacgaaattcaatgtgttgttgactttcgtttctatgataactttggcagcttttgaagttaatgcattttgataactccaaagagaggaaaaaacgaatcatcagccaaaacgccgtcgtacaggctccaaaaccttcatcgtcttggcgtcttttgtcttgttgtgaatgtgagcagctgagcaatttctgaatctctctatcttcttctgtttcgttcattttaattccattaaatgcttaaaccccacattccattaatgctctcctccttccacttcaatatttctttttaatcatcaccaccgtccaaatttcatcttacatctcggccctacacgggctctcctctcactcncggggaanagggcccgggcncgactaacgggcgagatgggggngncgagnacggccgcacg

SEQ ID NO: 134328 - DNA, 582 bp, Arabidopsis thaliana
  unsure (1)..(582): unsure at all n locations
ccccccctcggtgtcgacggtatcgataagcttgatatcgaattcgcgggcgctttttttttttcatcaaaaaaatttggtcaaaaattaaatcgacagctaaaagtttgaacataaaattcggtaacagaaaacagtaaagccaccgacgatgtaaagttattatagaaacgaaattcaatggtgtggttgacttttcgttcctatgataactttggcagcttttggaggtaatgcattttgataactccaaagagaggaaaaaacgaatcatcagccaaaacgccgtcgtacaggctccaaaaccttcatcgtcttggcgtcttttggctgagacccatagtaatataagaaagggtgtatcctagtcagggaaattcaacggtacctagtaacaaattatttattgtctccatgactatacggtatttcatattcataaatggaattccgtattttagcagcattaattaggggaggggaagaaataaagggatgggtattatttatttatactaaataggataaatnacgnccctggtggggatgtganngctggnaattccngancccccnncngtc

SEQ ID NO: 134329 - DNA, 550 bp, Arabidopsis thaliana
  unsure (1)..(550): unsure at all n locations
nnnnnnnnnncagctaannnnnnnnnnnnnnnnnnnnnnnnnnnnnnnnnnnnnnnnnnnnnnnnnnnnnnnnnnnnnnnnnnnnnnnnnnnnnnnnnnnnnnnnnnnnncggccgccatttacttaagcgatataaattatttgcatcaacaatatatacatgagtccactaaccttaaagccaacaacaagatttagagagtcttaaacttacaattggcaaaaaagactcactcattacatcaaccatcttgcaacatgagagcaactcttaatcgcatatttacatttgtttaaatggtgcagatcaagatcttttaaatccctttttaagttaagtagttgcaagttgcagagacccgcaagcatcagaagcatgcttgccttctccaaaaaccaagttccctctcacaaatgtcgaaaccactttgcctgataatcttcttcccaaataagctgagatactagggtgtttgaagtgaattggatgatcttcatctacatcaaattcggcttcaggttcccacacaacaagatctagcgtgtttt

SEQ ID NO: 134330 - DNA, 461 bp, Arabidopsis thaliana
ggccgctggatctggcgcatgatctctaatggacctctcaagcaatctgctgaatctacctcaaatgaaacccataccaaagatgtgtataatttatcattttcgaatacacgcaatggatgagggaagcaaagaacgaagtcgacaagatgatggtcacgaaccagtgggcaaagtcgattgttctaatagcttagagccgataggttcatcgaaggacttaacagtgaatactaggcctgaagttgtaccttatagcaatatagacaagcaatcgagtgaaagttttgatcgggcttctactctaagagaaactgcatctcttttttctggaacctcaatgcagatggatggtttcattcacggcaggggatcaacctcatccagaaaagactctctacaacctactaccaggatggcagggtcttttgacgaagttgccaaaaaccaacagggaagtg

SEQ ID NO: 134331 - DNA, 596 bp, Arabidopsis thaliana
  unsure (1)..(596): unsure at all n locations
cccccctgaatgaggagagaaaacaaaagctggatatcgaattcgcggccgcctgaaactggacattataagttcttgaaaattatgtataaaacccacatataaaaagggaaaagaatttaaaaaacaaacaaaaaaatagtgaatataaacggtatttttttccttgttctctgtcttggttttgtgtgtgtctagctgatctgttctccgatcaaatccaaccctacaaccaagaaagacagtccctgaaacaacaaaaagtagaagtgaagaccgtgcgccgatagaaagctccttgcagctgcggttagcagcaagaacgcaagcccgagctctttcttgaacaccatgttcgtcttcttcttgttcttcggcctcattagccctccaaggctcttcttcacggtttcttgccctacaagatttgtctcttgctccttaaggttgctcagaagctccaaacctgactccgagtttctcctatgcaactcctcttccttttcaagcaacggtagcaaatcggnctccgtgantnccgggtttcttcgganaaccactcgaagncggtcnaacngaaagccggggtatnggta

SEQ ID NO: 134332 - DNA, 791 bp, Arabidopsis thaliana
cccccccttgtggtcgacggtatcgataagcttgatatcgaattcgcggccgcgcaaaataaacatttcttcacattgcaagtgctcgtggtcgctacaaaagtaaactaatcttaacgtagctaacaagtaattgcttcaaaactcgtaaaagtgaaatctttggtcttctcttatgtgaactcgtatgatctcaaaacttgcacgatgtaccaagtctctgtgtgttcctcaacgtcatggtcttgcgttctgcaaaagccgagtaaagcaactcctgaaacctctccaagaacacaacccattcaacttctttcatgtcggctaacttcacaaagtttacgctaagcgggagctgcacgttcgcgctcttgtgacttaccaatgctttgtcggtttggttgtctttcggaggtttcaggtatccggatcccatggtgttgcttagattggtcttcattgatgtggaaagctttgagagagatagagtaagttttgcctcctcttcgtcatcttcttcttcttcagcaatgctctctttgagctctccaagtgaagaacgtccggttgaaaatgggttcttggcgaagaactcatcggtttctgtctcagagccataaaccgagtctagctcattgtagtctatatcaaactgaaactctgtctctccttctccatctgacttgggagacaaaacgtcttgttcagtggttaatctcttggcttcgatacacaacatttctagttcacatggttcctcttctcctgcacgaaattctcgagtcatcatc

SEQ ID NO: 134333 - DNA, 479 bp, Arabidopsis thaliana
  unsure (1)..(479): unsure at all n locations
aggcaactattttcattcaacttattcttgtaaagacaatgcaaaacgatttgaaacaaaagaaggaaatggaagttagggaaaaaaaaatggtaaagaatatttacaggcaaaataaacatttcttcacattgcaagtgctcgtggtcgctacaaaagtaaactaatcttaacgtagctaacaagtaattgcttcaaaactcgtaaaagtgaaatctttggtcttctcttatgtgaactcgtatgatctcaaaacttgcacgatgtaccaagtctctgtgtgttcctcaacgtcatggtcttgcggttctgcaaaagccgagtaaagcaactcctgaaacctctccaagaacacaacccattcaacttctttcatgtcggctaacttcacaaagtttacgctaagcgggagctgcacgttcgcgccctgggactaccaatgctttgtcggntggntgccttcgggggtcaggancggg

SEQ ID NO: 134334 - DNA, 731 bp, Arabidopsis thaliana
  unsure (1)..(731): unsure at all n locations
ggcccccccctcgtggtcgacggtatcgataagctggatatcgaattcgcggccgcaccagaatctctggtttcttcttctcagataaacagatctattcaactaaaaattttgaaccgggaaatgatcactcctggtggtttcttaaccggtttccatggggcaaagagttttccttgtaggagaaggcaccttctttcctttcagccccttaccttaagcgggcaatcaaaaactcttcagtgttctgtaggcaaaagaattgtttaagcgagaaccgggatcggaacattgacccgttggtgttccatggctcactcaaagcttccaggtcgatcaacctccctcatcttttgccaagaacctcttgcctcgacccgaggtcaaggggacccgagttagactgtctctcgaacctccctgaccccgtgtacatttccgatgtagataatcctctctctgtatcaggctcagagtcgtaattgggtagcattggataccgagccatccttgctgagctgtcaccacaagagctctcagcttgagtgtcatctctaaaatcgtctttagagatagaagttaaagaattgagttctttagcttcatnacattcgttgctgacaagtttcaaagcttgcactacttctcccatgaaaggacggtgtgatacttctggttgaacgcacatagaagctattgccgcgactttagctatgctatcgaatgagatc

SEQ ID NO: 134335 - DNA, 725 bp, Arabidopsis thaliana
  unsure (1)..(725): unsure at all n locations
ggaccaaagcctgaacctccaccgggggggcggccgttctagacctagggaatcccccggcctgaagaaattcgcggccgttcaaaaccaatcttctttattcgacctgaaatggtgaaggaggatgatacttaaggcttaagcctgttactttaaaacgtgatatgtccattcaaattagatttaacagaatctcttgtttcttcttctcagataaacagatctattcaactaaaaattttgaaccgggaaatgatcactcctggttttatcttaaccggtttccatgaggcaaagagttttgcttgtaggagaaggcaccttctttcctttcagtctcttaacttaaacgggcaatcaaaaactcttcagtgttctgtaggcaaaagattgtttagcgagaaccggatcgtaacatgaccgttggtgttccatgctcactcaagcttccggtcgataatctcctcatcttttgccagaaactcttgcctcgacccgaggtcaagggaccgagttagactggctcctcgaacctccctgaccccgggtacatttccgatggagataatcccccccctggaatcaggntcagagccggaatttggnagcattgggtancgggccanccttgctgagctggcaccacaagagtctcagctgaggggcatcctaaatcgcttagggtagaagtaagatgggtcttagtacaatngtgnngnagttng

SEQ ID NO: 134336 - DNA, 672 bp, Arabidopsis thaliana
  unsure (1)..(672): unsure at all n locations
gaagggggggttccnccaaagggggntaanggtgggnacccccagggtttccccaggtccgncgttgtaaaccggcggcccnggggattggattttgggngcccttttgggaggncntttggcngnccgatnacngnggccgaaagnttggnccctctngggcgggcccccctttttttttttttncggctacattagtcttttagcataaaaactggaacaacaaaaatccaaaatcccatataaaaaacaaactgaaaaaaccaataaaatcactgctttctactacagattattactctagcttcctctttcttctcctccattctcttctaagctaatctccttcttctcctcagtggacgagaatctgcactgtcaacatcagagacccttgaactgttctcatgtcttctaacagacgaagaagtcgatacagtcaacattgaattaatctcagccgccgtttcaacttggctctccgagtttatcacacctactatgcttgagaacgaatccctgtcttcaacaccaacaggaggactgctgttttgttcttggttcctccccaatgcatgtgttatcaaataagtatccgctaatctttcagcagggctcaaagtaaacgacgacaccctcccatacatctgtgcccatcgtctctgggttgcc

SEQ ID NO: 134337 - DNA, 546 bp, Arabidopsis thaliana
  unsure (1)..(546): unsure at all n locations
tnncgcccatgcccgggggcggctggccccctgagggccccccctttttttttttttaattaattggcttttgggataaaaactgcaaccaccaaaaatcccaaaatcccgcttttaaaaaccaaactggaaaaacccattaaaaatcactgctttctactacagattattactctagcttcctctttcttctcctccattctcttctaagctaatctccttcttctcctcagtggacgagaatctgcactgtcaacatcagagacccttgaactgttctcatgtcttctaacagacgaagaagtcgatacagtcaacattgaattaatctcagccgcngtttcaacttggctctctgagtttatcacacctactatgcttgagaacgaatccctgtcttcaacaccaacaggaggactgctgttttgtccttggttcctccccaatgcatgtgttatcaaataagtatccgctaatctttcagcagggctcaaagtaaacgacgacaccctcccatacatctgtgccnatcgtctctgggttgcc

SEQ ID NO: 134338 - DNA, 1109 bp, Arabidopsis thaliana
  unsure (1)..(1109): unsure at all n locations
ggtaccgggccccccctcgttgtcgacggtatcgataagcttgatatcgaattcgcggccgcctggataggaaattatttgtttaaaacccaaaatgatgattcttgaaaacaaaaatacagatacaacacatgtgaagaaaaagatgcaaaagaagtagagcaagaccaagaacaatgaagattaaaaaatttacttgggaaaaatttggctcaggaattttggaaactgtttttgacttctcgtcttcgcttggcgtcttataaggtcaaactatctggattctcaatgatctttgcaaaggtttggagaaaagcagccaagtcagctccatacacaatgcgatgatctgcagtcacattcaccagcattgtgttttttacactgaagaatccatccttatcagcaactacagttggctttgacgctccaacagccataatagcaccctgtcctggcggaagaatagcgtcaaatctatccactccaaacataccgagattcgataaagtaaaagttccaaagttgtattcatggggttgaagttgcttgcttctagctttccccaccagctctttccatttttgagattaccagtccaaatccaacttatctgcatcttgtagaacaggcgtaatcaggccaccattgattagcaaccgccactgcaatgttaatgctactattgtaactaaaactcttcccgtctttgcagctagcgttcaccacaggatgctgagccaaggccatccctgcagctttagctaataaagctgtcattgttacaccctttggcttcaccttctcgtaaagtgcatcaagagcgtcagtgttcacaggataaccaacacggaatgtaggaacagagagactctcaatcatgttcttagatactgcagattgcattgctgtgaaaggaacaatgcttgaatcaggtaacagaggaggcaaattagtggtggttgctttagccgtcaccggaggtggaggaggaggcggtggtgcgatggaggatttggacggagcaattcccggacgcgtgggtcgacccgggaattccggaccggtacctgcaggcgtaccagctttnnnnnnggagtcgtattaga

SEQ ID NO: 134339 - DNA, 591 bp, Arabidopsis thaliana
  unsure (1)..(591): unsure at all n locations
ccccccgattgaggggggaaaccaaaggctggtaaccgaattcggggccgcaaaccaaatggtcatttgaagaggaccgtaggcagcaaagagggcatttaccaagctgcagatcctaccgagagacctctcaagggtgccacattctcaatctgccatactgcctagcagggtacctaccaggggcgcaaaggttccacttcttgcgcgtggaaatctcatactgggaacgtggcaccgggcactttcttccggttcgaaggatgggtctattcaagaaattccggaggcggttgacaaatccacttgctatgctcctaaaggggctaaagcatggcacacatgggcattattcaatacagcagtgatgtcgcattacatttcacgaggtcaaattgcttcccagtacgttgtttctgcagccaactggataatttttattctatagcatgtgcagcaaatgccaaaaggagctgaggatagtttacaagacatactgcggctcctgcattgtggtcaccatggnggcncagctgatgccaaccgcttganncagntnngcntggcacattanncatgggtgttggnttc

SEQ ID NO: 134340 - DNA, 579 bp, Arabidopsis thaliana
  unsure (1)..(579): unsure at all n locations
ggtaccggcgccccccctcgaggtcgacggtatcgataagcttgatatcgaattcgcggccgcgctgttgtctacctccgagcccaccgtctctaccgatcattggtcatcttcactttctcctctctgttccatgttacaaatcctttcagaaactctcctccaagtatggtcccttccttcacctccgcgctttcaatatccctatagttctagtctcgtcgggctccctggccaacgaagttttgaggatccaagacctgaactttgctagccgtgatagcgggcagactcctataatggaaaaatcattactttttggatcttttggctttgtctcagttccttatggagattactggagattcatgaagaagctcttagtcaaaaaacttctcggggctcattccctcgagcagacacggctcctccgtgggaaagaactcccaaactttccggggctaggttgcgttgataaaggcggcaaagaatgagactggttgacgttggtaaagagatggtgaaagctaacggacaacaggaattttnaagganncaatngggagggctgtcagnggc

SEQ ID NO: 134341 - DNA, 633 bp, Arabidopsis thaliana
  unsure (1)..(633): unsure at all n locations
cccccccccctcgatgagggtaaccataagcttgatatcgaattgggggccgcaaaatggtactaagagaaaaaggatgatgacaaagttatctgtccacaagagacgatcaagattttgtatggattccaagaataactttgacccagaaaaggggaaacaaagtagatacaattgtaatgtattagtgggtaatttataagatctctcccctattctctctatgtcctctctaatatacaacttaatgctaaacccatcttctgatgatgacacagccgaatcaaaactgaaccaaaagtctatcagatgcttaccgcaaatctcatttccaacaatcacactcgccgaaaagattttactcctaacctacacataccttactgacttggaatcggtctacctaggggaagcctttctcattatggaagcctaaccaggccataccgcgacatctcccattccaatgggtggcgggctatcaaggggttaaaacactgccattgggggtggtggtttncccggggtaangggccncacccatggggnttgttnngggggggccttccccggggtggaaccaagggnanccccanccnaaccnggatgggggnaccgttggggggggnnant

SEQ ID NO: 134342 - DNA, 556 bp, Arabidopsis thaliana
  unsure (1)..(556): unsure at all n locations
aaagctggatatcgaattgggggccgcgttgtgcttttaatgcagaaggagaagaaaatggtcacctgatcttatttacccatttgtacccaattaggtcaaaagaaagatactgttatatgtacaaaagaaaagagaagagagagcacgatgatgtagagacaagcacttggtgaagaaaatagcaatgtatctgcatcatcttggaatcatcccacaaagctaaaactgctgttggcattattcactaaatcgacttctcttcttccgcagaggttttgcagattgggcaccaattcttcatccgcagccattgttgtacacagctcacatggtacatatgttgacatggaatagtccctaattcatctccatcaacatactcttcctggcaaatactgcacttgatatcatcatccttatacagagagatggaaccggtttcatctgtctcctgataaatgcttgcttaagggtcctgggagtgctcttcgctagngntgngccactgacccattttatccccaagcnggacccccantggcaggtanggggc

SEQ ID NO: 134343 - DNA, 570 bp, Arabidopsis thaliana
  unsure (1)..(570): unsure at all n locations
gccccccctcgtggtcgacggtatcgataagcttgatatcgaattcgcggccgccgtggaggacgaaggcggtttggtaacatggctggggtttttcaagtaatggcatttagtgttggtgcgttagagaaaggggagagtgattcagttttcatgggaaagcttgctaagattgctacagctgagattatatcttccaaggtgtgttgcgacggctgaatcattgttaaagatttcttttttgtacgtactgatagttagatagatttacgtagtgaacttggaatccgtaggtgagctacattatttctataaaaacaggggacacttcttgcaatgctcacaaactttctcgcaactgtccgtatatgtttcctgatcaattttggcaccttttaatggttcatcataacggagggactaaatgctgattggcaaaggcaagcatcagggctgctcgtctcaattggaacacattttcccgatcctggaagcctggtttttcccttccggttgccaaatccaagnggggttcctgacattggaaaaacnggtttttaggccccgggc

SEQ ID NO: 134344 - DNA, 553 bp, Arabidopsis thaliana
actgggtgaccacgccccccctctggtacgacggtatcgataagcttgatatcgaattcgcggccgctctgtgacaatactaagctcgcataaagtcgacgactttcttatcgcatacgcttatttctagatcccaatctgatctgacttacttcgtgagccgcaccaatgtgacttcaccttactagtcgggtgactagctagtctatagcctccgttgctctctgcgagatgtcctctttgctcgctggtttcacatacaggcctcactgacctggcgtcatgacagctgtcactgtctacacgatgctgactggtgtcgtctatctcctcacggcactatgattagtcactctcttaccattgcttcttaaggctaacgttcacgaccttgtgttgagtgataagaccagagatctcgatcgtgaggttgcgatcatcatgaagcatactcagacgtgcttgcatgttcacctgctgactaccatgatcaagacgtctcttgatcgacacaccattctatacactacgactagtggagttcgacgagact

SEQ ID NO: 134345 - DNA, 601 bp, Arabidopsis thaliana
  unsure (1)..(601): unsure at all n locations
ccccccctcgactacgacggtatcgctaagcttgatatcgaattcgcggccgcccaatggaggttacctccaccaccttcatctccactaccagatcttctaaataccttaccttaacttcgtactctccggtgattcttccggcttctactctccgccgtgattttcttggttgttgtcatagtctccgtccttctcctcatcttcgaactcgcgccgggaaacgcaattctcgtcgttcttcaattcgatcgcctcgtttagttgttagagcttctatcgattctggtttgattcttattgttgttgctgtcactgcgttctctgccattgctttcgcttattgccaaagtactttcaggaagcggaaatcttccgatgaggttgcaacggttcatggcggaaaaaatagtgctgagaatcggcgggaaattcatggagatattcatgaaggcaatcctgtggaaataaatgtaggtttcagaaaggtagaggaagaaagtgggaccttttggggaagaaagggcanaaancatgaagttncngggtgggaanggtcagtcancggggnccagtgcngnnaaggggcaagtgcaggcng

SEQ ID NO: 134346 - DNA, 554 bp, Arabidopsis thaliana
  unsure (1)..(554): unsure at all n locations
ccccccctcgatgtcgacggtatccataagcttgaattatcgaattcgcggccgcggaagatcaatgtctaaagtagttagcttcaagaacagagtatccaagtatcaagaacagaacatcaaagtgtcgaaataaagcttatacatattattacagactcttttgtaacataatcccttacgtgttacgacgattcacatccttcatatgtgcctctttttaacacagatcacacacatgttcttcctcactcgcagacttcttttacaagagtgtatgtacaatggcgttcttcttcggtttcagagaacctcccttcggcatcctccatgcctgcagattcattcgacgcaggcctccatgactggcgaagaggtatggcctcaaaaaaagtcgaggagatttgcggggttttggcttcagggacatttggggaaccccctggtccctttccttcaatccccaacatatggggatttgtttgctcccaccatcggaaccggggcaaatggggaatcangacgggntcacnccaaaaaaaggccccccttgg

SEQ ID NO: 134347 - DNA, 586 bp, Arabidopsis thaliana
  unsure (1)..(586): unsure at all n locations
cccctctggttcgacggtatcgataagcttgatatcgaattcgcggccgccgaccacaaaacaaagagagagttggttccttgttcatgactttcaaatgtgtttgttttcttattcttcttgccgatttggcgtgatttcttcacctaatttggaatatagttatggtgatgcaatatttgcatgtttgatcttttgttcggtaaaaaggcaaatcctttggacataccaaagtgtcaaactatatgatgaaaccattcttctttccctctatatttgtcacttgatgatctgtactatcgaattgatacagagttaccaccaagaattagatgatgtgtgtatattgacgtctatataaaaatcagaagttgctctggcatctaacctttaaatttgtgaactctctgaccaaatgtaaataaaaagaatcgattttttttgggttgggtcgggttggccctacacacgggacctaattgggcccgaataaaccgaaatgaacaaaccccaaattatggttactcaccctccanaancagnttnccttnaacttttaancncaacgcgcgntngggggatggtc

SEQ ID NO: 134348 - DNA, 643 bp, Arabidopsis thaliana
  unsure (1)..(643): unsure at all n locations
ccaccccccccctcgatgacgacggtctcgataagcttgatatcgaattcgcggccgcgttttttttgtttcaataggaaatgtctgttgctgatgttgctttaagcccgattcatagaggatcggcgtttgctgttggtggtttcggacaatcgacgacgacgcattactctgttaaatcggttttggtgttccttagtgtttctggttctacgatgcctatgctcatcttggagtctgattctattgctgaggttaaacttaggatccagacttgtaatggttttagggttagaagacagaaacttgttttcagtggtcgagagcttgccaggaatgcctcacgtgtgaaggactatggtgtgactggtggtagtgtgttgcatttggtgcttaagctctatgatcctttgcttgttactgtgattactacttgcggcaaggtctttcagtttcatgtggatcgtcgtagaaatgttgggtatttgaagaaacggatccctaaaaagggaaaggggttcccgaaggtgatgaccaaaaaccttgttaaaggcgagaaccttgtgccaacagaacnttgatggngttgaaanangaacccgaaccantccgggaaaaccgggnacccgggaaaaaaaacctc

SEQ ID NO: 134349 - DNA, 728 bp, Arabidopsis thaliana
agcttgatatcgaattcgcgggcgcgagacatcttatttgagaaacacttgctgtttacaatatcaattatcaaagctgcatcgtttattctataactttaactgccattatccatcatagcaaccttaaaccaggtggattacaaatttttaattttgaggaaccaacttaagggagcaaagataaaattttgtgagacaaaagggaaagggcaagagacaaacattggagtgccggttttttagttcaaccttagtttcagcgatacttcagaccatcgggggcgcctctgggccatgatcactaaagcatctcagagatgggggaacgtggcaatccacacgatggaaactactcctgtggatctcatcggctctttctcgaaccccatcggttgggaattgcttagcatattcttctaccatctcacggagctttgacatctctgactgtaatttctcatttgattgcattgttgctacaaagtctttcaactttgttccttgagactcttcagtcgtgacgttcttcgaaattccgaccggacggcttgctatatactgttgcaccaccaacactgatgccaccgtcgaaacactttcgctttccgttaacaaattcccgatcggtccaagctcaggcgtgtcgcttcttacgtttatccctgacgctacagaaccttccggtgacttccccaccaagaaaaggttgcttttagaatactctt

SEQ ID NO: 134350 - DNA, 465 bp, Arabidopsis thaliana
  unsure (1)..(465): unsure at all n locations
gcaattattatttacaatatgaaacacatgttattatacaagccaatcttttgacctttcgagtcttggaatcccaaataggaaattcactaaggactctcagaatcctcaaccaagcgactcttcaagccgtgacgttctccgaaattccgaccggacggcttgctatatactgttgcaccaccaacactgatgccaccgtcgaaacactttcgctttccgttaacaaattcccgatcggtccaagctcaggcgtcgtcgcctcttacgtttatccctgacgctacagaaccttccggtgacttccccaccaagaaaaggttgcttttaggaatactctttaataacttcggataacttcctcggtaacattttcacggattttctcttcgtaaatgatattagatttagaatccgaattagnacgagnactttctttttctttaatctttgctttaagttcgg

SEQ ID NO: 134351 - DNA, 650 bp, Arabidopsis thaliana
  unsure (1)..(650): unsure at all n locations
cccccctcgggtcgacggtatcgctaagcttgatatcgaattcgcggccgctttttttgataaatctatgggcctacacttttgggcccaaatttatataactcttctcgcgttaatcagaaactgatgctacttctcaaggttcttacaaaatgtgtaacaactaacaagtaagaactaaagaacacaaatctcaaatttgcttttccagtttctcaggtctagaaggaagagattcctgccagcagtctaaacttctcataggagacccaaaacacgaactgccacggtccaagccttgcccatgtcgggaagaaacctttccacagagctcttattccttcaaacttaaccgtcttcaccaaacagtcgtaagaatttctggtacacagcattttcaccctggttcatcatcctcgtcttcaccacatcagctgggcaactccaaacttgtcgaagcaagacccgacattttggaagcaagcagtggtgcgcaaaaatggtaatccccagcaatcttcttaccggtggcaaaggggtttgggggggnntagnaaggaggtcncccaattccnngaaagncncnggggttggngnaaccttccanancctttacccccgggtggggttggnaacccgtggccgggcnc

SEQ ID NO: 134352 - DNA, 597 bp, Arabidopsis thaliana
  unsure (1)..(597): unsure at all n locations
taagcttgatatcgaattcgcggccgcaaagaattgaagtacaattacaattgataaatccgttgcttaaaccaagcatgaaatgtaaacgcaaaaagagccttggtggttacatggttaggctacattggctaacaatggaggaacaaagctcgatcctttaagagtctgctcaaatatgtgacccactttcagcaatttctcctcatcaaacgctgctccgatcatttgaagaccaacaggaagacccgagggaccaccttcgactaatccacaaggtaataccattgcaggaagtccggcaagattcacatttgaccgtcataatgtctccagcatacattgccagtggatcatctttcttttcaccaatccttgtatgcagcagatggggctgccgggggaataagggtatcggtctgttctaacgctgctttgaaggcctttccgtttaggggcctcacctgttgagccgcttgnagaagnatcggaggnacccgcggaagnggnntgncccataaaatnncaattcacccnccnccnaaccntttccacgggggatnaanagtnttgggntcgncanctggtccaacggcc

SEQ ID NO: 134353 - DNA, 624 bp, Arabidopsis thaliana
  unsure (1)..(624): unsure at all n locations
cccccctcggttcgacggtatcgcataagcttgatatcgaattcgcggccgcgtatgcgcatatagatggaaatagagagaaaggaaacaaaataaagcatatacaaaagcttttgaaaacgctattttatcagcgcttgttactcttcttagcttccaatgtagtcccatccttaagagcttgctgagcatcggcttccatacccagcttgaacaagctagccgcttgcagatacaaggcggttggccaatccggagacacaacctgtgcctgcaatgcatctgtcagagcctcttgtgcgttgtcgttcatcagatatgacaagcaccgccgtgcgtggtactgttggtgacaccattgttcccccatctatgaactgagtgtagcaatcgaccgcgggttgtaaaatctttggaacgggaagctaaagtcgccttgcttcttcgaattgagagattcctgcatctgattgggccacatttgaaacgggagcccattggaatccttcatcatcctggaccaacctaacngggattcccggatgnnggaantcaccctaagatgntcccaaggggcaaaaaacggncctnttagccggtnatgggnncnaaaacggggnannt

SEQ ID NO: 134354 - DNA, 509 bp, Arabidopsis thaliana
ccccccctcgagtacgacggtatagctaagctagatatcgaattcgcggccgcgctccatgtaaaatatgtggggaggatataaaatataaggaaatttgaaagatccattttgagcaaacaagcaagaaacacttgataaaaccagtaaccacaaactcatatcatccatcacctctctctctctcctttcatttatctttattctagaagaagagcattttatcacctttaaagcgaaggaggcacatactgtctagacaaactaaacagatctttaccctcaaaaggcgatgtccactctctcccatttccaactaaagcagctttcctgcactcccattgccacacccatcccattcccattcgtcatcattcttgtccttccattcatgtgcgcttcatacggggatgttgctgcactatatggggttgatgctcccacagactgctggctagggctcacaacaagctgggcctttatctagactccagccgatgatgttgtaa

SEQ ID NO: 134355 - DNA, 558 bp, Arabidopsis thaliana
  unsure (1)..(558): unsure at all n locations
ccccctcgttacgacgatatacataagcttgatatcgaattgcgcggccgcatcactttgtcaccgcgacaaaataattcttctgacttagaaaaacaaaacacaaacaccaatcacaaaataaacacagctaagctctaacttacagttttgagaagagtttaagtcacttttaagctcgttgtgaccttctttgtcctcttgccacgaccatgttcggcattacctcttcaagatactcacaacggtctctatggtgttcgatccatatacataactgtcttatcgcttctctcttctcttctcctaatcccaacaatgtctccttcaacttctccttctctttctcctcttctcttacttgaccttcaagcttctttctccacctcttccttctccttcggccatctcgtctttctccttctttcatctctaccacacacttgttcgccggcaagggcatcttcggcgcttcaaccactggtttcttggagggtttttggngtnnttttnaggttttaaggaaagggttggnccggtttnggatttttgntttac

SEQ ID NO: 134356 - DNA, 558 bp, Arabidopsis thaliana
  unsure (1)..(558): unsure at all n locations
taccggttcggnattcccggctcgacccacgcgtccgcgaggcgccggcgatgccgacgatcaccccggccaggatcaccacgaacagtggccgcatctggtcaggccccatgcccagcgtgcgcatcaggttgaccacgccgtaggactgctcggtggtgaggaagcggatcaggaaggcgccgacgatgaaatgcaggaccggcagtgtcgacagccaacggatctgcagcagcggattgcgccggtagtgttcgatgatcaatgcggtggtggtcagcgcgatggatgcgatcagcgcccagcccagccacggcgtattgagccaccagcgcgtgtagccctgcgccagcacgatcaccagcagcgcaacagccggcgcgagcagggcaaaggtgaggaagtccaatggctcgaatgccttcacctggatgccgggtggcagcttcagcagcaccaccgccgcgaacgcacacagggccaggccggcttcaaacgagtacagctggtgccactggccggtatcgaccaggcccggcgagacgatccaggcaatcg

SEQ ID NO: 134357 - DNA, 865 bp, Arabidopsis thaliana
gcggtaccggtctcggattcccggctcgacccacgcgtccgatcggtttcctgatgcaactcctgaagaacttagttcaaatgatgccacttgtatcatatgtcgtgaagaaatgacctcagcgaagaaattagtatgtggccatctatttcatgtacattgtcttcggtcatggttggaacgacagaacacatgtcccacttgcagagcactggttgtcccagctgagaatgctacatcaacagcttctggaaaccgtgggccacaccaagaatccctgcagcaaggaaccggtacttcaagttctgatggtcagggttcttctgtttctgctgctgccagtgagaatatgagcaggcacgaggctaggtttcaagccgctgcttctgcagcctctatatatgggagatcccattgttatccatcttctgcaaacacactagtatggtctcaaggtaattcattacttcctcagacggaggtagaagctcaaagaagatttcttgagtcccaaatcgaggtgttaacgaaccaacttcggcttttggagaaaccgacaactgtagatacgaaaggaaagtccgttgcggatactgcatagtggtgaaccattaacgcaaatgtggtggtctcatcagaggtcatttgcgtaaacaaaaaacaaaatgtggtaaagaagagttaggatttcggagtaaagagagaagtaagagtaaacttcagattgtgtgaatggttttgctatagagaggatttgaaaatgtaaatgttgggtgtctcatagaagcttggaacttaaaagtagcaaactggtcttctgtttaccttaccacacttgtctctctatctataatagtttttcttt

SEQ ID NO: 134358 - DNA, 700 bp, Arabidopsis thaliana
taccggtctgggattcccggctcgacccacgcgtccgcggacgcgtgggaaacgatccaaacgttcgagatctgatcttcatcataaccaccgtctcactgaggaagagtatctagctttctgtctcatgcttcttgctcgggatggcggcgatcttgactctgtgacggttgcggagaagccgagttataagtgtggcgtttgttacaagacgttttcgtcttaccaagctctcggcggtcataaagcgagccaccggagcttatacggtggtggagagaatgataaatcgacaccatccaccgccgtgaaatctcacgtttgttcggtttgcgggaaatctttcgccaccggtcaagctctcggcggccacaagcggtgccactacgatggtggcgtttcgaactcggaaggtgtggggtctactagccacgtcagcagtagtagccaccgtggatttgaccttaatattataccggtgcagggattttcgccggacgacgaagtgatgagtccgatggcgactaagaagcctcgcctgaagtaagtctttgttgaagacctggaagtttatcaaatgtaaatatcaaatttcaatttcaaggaacagttttgttgattctattaccaatacacaatacgattcaattcctttgtttctgaagtaacagcatactaaattcattagaaaaccgaatcg

SEQ ID NO: 134359 - DNA, 863 bp, Arabidopsis thaliana
gcagtaccggtctggaattcccgggtcgacccacgcgtccgattacaaagagatttgtgttcgaagcttctaaggtggaagatctcaggaccaaagccgctagtgaagaaacagtagaccaacctacgcgggtggagagcgttactgcgctcatctggaaatgcttcgtcgcatcctcaaagacaactacttgtgatcacaaagtgctggtccagcttgctaacttgcggtccaagataccttcccttctgcaagaaagctctatcggaaatctcatgttctcttctgtggtcttgagtattggtcgaggaggggaagttaaaattgaagaggccgttagagacttacgaaaaaaaaaggaggagttaggaactgtgatcctagacgagggtgggtcatctgactcatcttccatgatcggttcgaaactagcaaatctgatgctcaccaactattctcggttgagctatgagactcatgaaccctataccgtgagtagctggtgtaagctacctctttacgaggccaactttggatgggattctccggtttgggttgttgggaatgtgtctcccgtgttaggcaacttggccatgttgatagattccaaggacggacaaggaattgaagcgttcgtcacactgcctgaagagaacatgtcgtccttcgagcagaacccagagttgctcgcctttgctaccatgaaccctagtgtcttggtttaaatcctgtactgaaatttgttgtttcctcaataaagatttggatacaccgaatctatatatatcttcaagatgtaatgcaagaaatgtaaactactggaatatcatttaatgtttaaacttttctgaatataattcctc

SEQ ID NO: 134360 - DNA, 493 bp, Arabidopsis thaliana
ttccggggacccgtgggcaaggttacccgagaaagatcgatcaaccttttctgtgttccgacttacgatattgatcttatctggcacacacatcagcttcatgctatctcttattgcaatgatttgactaagatgattggtaaggtcttggagcatgatgatacagactctgaccgtagcaaaggtaagaagcttgatactggtttctctggaactactgctcaatgggaagaaacatttggtcgaaggtattggaaagccggtgctatgaaccgtggtaataccccaaagccagtcacaacttctccttatgtttgttctggaaagaaatcaattgcgaaagagggaagagtcccagaatgtaatccaatatccagaggtgaaagtcattgaagttatcttggagatggttgggggttaagaacttaccagatgctcacaaaggaaaggtctttgttctgttcagcaaaactcaaccagattctctgtttaa

SEQ ID NO: 134361 - DNA, 593 bp, Arabidopsis thaliana
gcaggtaccggtttcggattcccgactcgacccacgcgtccgcaaggctcaagaaatgctgaagaacaatgagatcaccaaaccggttgctaccatggacttagcttgggttggggccacagctttaattggattccctcttatattcatcatcaaattgctttctgcagtctccaatcctaaggggaagaagagacacaaccataaaaaagaaccaaccaccgggtaccgcagagccaaacgccgacatcctcaccaatgatacaataggactataacttgaagagatcaaaaaggtggtttgtatatacctttctggtttctgagacttataatagttaaatatctattggctgaagaagttgaagcagaggtgttctacaaaactataggtctctcttgactctctgtagtgacaaaatcttagaacaatctttttcagttttcatagtttatgggtttttataaagtagagaagagaagaaaagaaaagagttgtaaatcttctcacattgatacagatgtgattggggattttgggtttcccatgttaatgtaaccaggcccagcccaattgtgttgggtacaagttg

SEQ ID NO: 134362 - DNA, 553 bp, Arabidopsis thaliana
tcgcccgcaggtaccggtcctggattcccgggtcgacccacgcgtccgcattcttttccttgtgattcattattttgcctagttttacttttcaaatagacttctaacaaaagttatgactgaaaaccaattatatagctttataaccatgaagagttcattgtctaaatgcaaacagtcttcttctttgtctttccctttgtttggtctgatcaacttcttcctcatcggttttttcagatgggtttcttttgctcagttatttttctctaggttctggcctcttgttcaacaccagcaatgtgtttccgagaagaagagcaaagatcttgagttccaaacttcgatcaaacacgaagaatatcgtgatgatgatgatgatggtctttgcagagaagatgtagggatggttatgaaaagcttagggctttccactgaccaagaaaacgagggacttcaaaaacagtacagttccaaggaggtttcgagatctgttcgaagagaaggagccaagcttaagggaagtgaagcaagcttttgatgtctttgatga

SEQ ID NO: 134363 - DNA, 546 bp, Arabidopsis thaliana
  unsure (1)..(546): unsure at all n locations
gaaccttctnccccaaaaacccaaactaaacggtnaaaanactnccaccngnnacacagaggagtnccaaagacntaccgtctgtgtttccatgagtcctgggaacctaaaggctgtttgggacgtgcaacttgataacaaagtttttcaaaagagaagttcccggatatgaaagtgttaggtccacccgtgatcggatcctatgatatgataaatgattgggaggattgctgctcagattacttctcagatgggtctgattacttggcttgggagttttttgaagatggtgtaatgggagagttctatgaggatgagtttgagcatggttgggacgataatttttatgcggaaaacgcagttttagacatggaaccgcatatttggcccaccatctccatgaaccaggccttgttatgttcgaagtctctacctaaaagttgcaactaggaatggttttagcctctcttaagtgtcttaatctatgtatggtgcttgaacttgtgtggcttctttgtgttattctaatctaaaaggcttttttcc

SEQ ID NO: 134364 - DNA, 499 bp, Arabidopsis thaliana
  unsure (1)..(499): unsure at all n locations
gagagttttgcagaaacatgcatccattggatgtagcaagtgttgtctctcacgacgatgaagcttatgctatcgccaatacaatgccgaagctgaagcggttagagatagcttaccaccgagtcagcacagaaggagtactcaagatcttatcgtgctgtgtttttcttgagttcttggaacttagaggctgttgggacgtgcaacttgataacaagtttttcaaagagaagtttccggatatgaaagtgttaggtccacgcgtgatcggattctatgatatgataaatgattgggaggattgctgctcagattacttctcagatgggtctgattacttggcttgggagttttttgaagatggtgtaaggggagagttctatgaggatgagtttgagcatggttgggccgataatttttatgcggaaaacgcagttttaggcatggacccgcatatttgccccactcttgaccaggctttaatntccnagctttccca

SEQ ID NO: 134365 - DNA, 539 bp, Arabidopsis thaliana
  unsure (1)..(539): unsure at all n locations
cggtaccggtcctggaatgcccggactcgacccacgcgtccgtttttcttggcaggaacgagttatgatagaattaggcttgtttatcttgatgaaatgggtggaatggctatctccattccaaaaatatttacaatgttcactattttatcgatggcttcccttgcattgccgggcatgagtggttttattgcagaattcattgttttttttggaataattaccagccaaaaatattttttaatttccaaaattttcattatttttgtaatggcaattggaatgatattaactcctatatatttattatctatgttacgccaaatgttctatggatacaagttaattaatatcaaaaacttttctttttttgattctggaccccgagagttatttctttcaatctctattcttttacccataattggtattgggatttatcctgattttgtgctctcattagcaagtgacaaggtcgaatccattttatctaattatttttatggatggttcaggaaaaaaagnggccgcntggggnc

SEQ ID NO: 134366 - DNA, 606 bp, Arabidopsis thaliana
  unsure (1)..(606): unsure at all n locations
nnnnnnnnnnnnnnnnnnnnnnnnnnnnnnnnnnnnnnnnnnnnnnnnnnnnnnnnnnnnnnnnnnnnncgcggaaactcagtatatcaccccccgcggatcaccaaccctcgacgagttgctgaaagactgcgacagtttccgaaaaggagattccggcgacggcgtaaaaagcgacgatcctgcacatcacataatagatgtcgaagccttgtacctaatacctgtcccgtacgtcttaaactttaacaatcttcaatacgatgtcacacttcgccggcggtttggcttctcacggcaaaacggagtaaagactctactcgatgatggttccggagaggcttctgacggcgatatcctcgccgttctcggtgcaagtggagcaggaaaatcaaccgttgattcgatgcactagcggggaagagttgctgagggaaagcttgaagaggctctgtaacccttaaacgggggagaaagttctggcaatctcgattgtttgaaaggtatatcggcgtttgttattcaaancngtntttnttttcccgttggtnaccngtaaanaacccnnaatgttcggttccgggttttggttnccnnnaggtttct

SEQ ID NO: 134367 - DNA, 598 bp, Arabidopsis thaliana
  unsure (1)..(598): unsure at all n locations
ccnnnnnnannnnnnnnnnnntttttttttaatcagatgctaatttggatatttaagaagaaatacttgtttattttacagnatattcttttaaagaacggccgctgaaatgagtataaattttacaacttcttcacaaatgtatagtaacatcgagaagctaattcttcaagcttcacttaaatatgtagctaatgcgcacaaatgtatttgtgggcgctagtaagtagtaacctcacgtcctcttattcctgctcccaaacagcaaggcgaagtaaaataagatcctaaagaagagacctgaagcaaacgtaatccacaagcaatcccacttgctcaattgcgtaataccctgttgtgcaagtaagtcagaccccgtcctcaagcatgtggactccgttatcttcgttctcagagatttactgagagtttcaaggagcttaaccttcccggagtcagacactcccccgagaagagtactgtcgaaaacctggacacccctaacaaaacaacgagacgggtcatcaaactcgttggttaagcagcctcttanggttnnttgggattnnatttnatgnaccnggcccntaaccgggta

SEQ ID NO: 134368 - DNA, 722 bp, Arabidopsis thaliana
  unsure (1)..(722): unsure at all n locations
cnnnnnnnnnnnnnnnnnnnnnnnnnnnnnnnnnnnnnnnnnnnnnnnnnnnnnnnnnnnnnnnnnnnnnnnnnnnnnnnnnnnnnnnnnnnnnnnnnncggccgctattaacttcaacattggtgttgtcgtgttgtcgtttcagacataaacccatgaagcttggataaattagaagaaagtagatcaactctatttcaagaaaataagaggaattgaagtaacattagaagttgaagtctttttgttcactaagcattctcataaaatttgtttgacaaaaacataaaataatgtttagtgtcaagaagatgatgccaccaacttaacctgatctgctcgggtacaacaaacatatcccacagttcgatccatctccgcaagaacaacttcccagcatagaaccaatcacggggttacggatcagcatagattgttcactatctttgagacagtagcaaagatgctaagatttcggaacggtgacattaagtatcttcacttcttggtaaggcctgtcgttcttgtctgtcttcacttttctctataccctgaacggcggnccattnccttnaaaactntttccaaaaacagtgtgcttattgcntggcccggtgtagcccctntttgtgttaaggccttnggcccttttntgtttgggccggaatttccatggcaattgnncggccttnatgcttagatttttgaatnggccnaatgc

SEQ ID NO: 134369 - DNA, 818 bp, Arabidopsis thaliana
gaaagatcacactactgttttttggactcgagcttcttcttcaacaatgcctctctctctccgacttgctccatctccgacgtctttccgttattctccgcggccgcctaccggcgccggaggattttcccccgtgaagcagcactcccggatcccgaattcgggcgtcgcgaacgaaaattggattctgttctggtggtggtggtgttttagattccggtagaaggattggttcctgtgtggtgaggtgtagctttagaaacagtgaatgtcacttgtttgggcccagggtgaccggaggtctgaataaggacacgttcttggccaaatttgttaaaagcccgccggtgcattaagattgttttgtccctcgacatggtcactcagtggtgtggtccttgcaaagtgattgctcccaaatacaaagagctatcggagaagtacccaggacatggtgtttccttaagcttgaattgtaacccaagacaaacaaagccattggcgaaagagctaggaattagagtggttcccaacttttaaaatcttgaaagacaacaaggtagtaaaggaagtgaccggggcaaaatatgaagacttacttgcagccattgaagcagcaaggtcaggctgagtctctctctatatcactcattatgtaaagtattaggatcattctccatccatgtaattcgtttggttctatgtatgtaactctttgctgttcccttaaccggaatcggttgttcactatctatgtataaatgctggaaagttatggaatgatgagctgaatgtgtatctgtatgcatcaaaaaaaa

SEQ ID NO: 134370 - DNA, 663 bp, Arabidopsis thaliana
  unsure (1)..(663): unsure at all n locations
nnnnnnnnnnnnnnnnnnnnnnnnnnnnnnnnnnnnnnnnnnnnnnnnnnnnnnnnnnnnnnnnnnnnnnnnnnnnnnnnnnnnnnnnnnncggccgcttttgctccaaatcctgcagattgtaatctggaaactgaagcatgtataggccaataaattacattctccaaggaaattgcttaaatgtgttcgcttaagtaagtatacagacaaacaaacaaaaacactgatccattacactttactttccagcaatttctattagctatttaaggcgacagctatgcatgttgtaacatgagcagacaaaacttacgtcgaaaaccaacctcagttgattagaggcgtacccatctgcgaatctgcacctatatcagttgcgaagtccttaggcaatgggatatttaattccgagcaaacaagcttcacaatattagccgttacacctcccatagacatcttgttcagtgttactgcaatgggaaatctgttgttgatgtcacagaagcctgttgatcctcctaaccctgaatgtccaaagccaaccagngacccatcttgagaatgggggngcttaaaccaagcccaaanttccatcaggactactaagccntggaggctccagaccctgnagnacngggtcncggggggaaaanatatgaa

SEQ ID NO: 134371 - DNA, 674 bp, Arabidopsis thaliana
  unsure (1)..(674): unsure at all n locations
aacatttcaaaccgacgatttctttatgattccgcataaaattacacaaaccggattcggtttgtacctatggtcctatgatgatgatatatgtatataaacataacattacaaccaaattaagaaaaaaagagcgaaaaattctgaagcaacaaaaatccattttttttcttcttttcttaatacacaattaacgaagcagaggagcaatcaaaagcgagagttttgattcttcggcttccctctcgacgtcactttgatcatgagatttctcacaatgttcttcttcttcaacccaatgatccgtacgcagtcacgtttttccttgaaccgggtccatcctgattcatacctactggtttattcgataaccgacgtttataccgcttcaaaaccgaagccaaattctctttcccctttgggaaagccacatcacctgcagctgtaccggttcggccttttctacaagagattgccatttcaacgtctttgattagatcaagaagtgtgactgcggttgtgcatttgcctttagccggttttgcagccggaggtaacattccgttagctgaagtcggactcgctctctggtggtccttggatttgaggaaaaagacgggtattgggncnagttttanngcggttaatatccttaggggttancgagtactttt

SEQ ID NO: 134372 - DNA, 496 bp, Arabidopsis thaliana
  unsure (1)..(496): unsure at all n locations
annnnaaggggccgggtttaggccccnatgttggtgttgttgtttctgagaactggacatctccttgnttcccacgaattcacagagatcggccgctaaaaaaatgcttctttacaattcactagtccgcggtagaatcacccgaaccatgacgctctcttctgatcatatctagtagatcttgaacaacttctgacatcagtggtctaaattctggttcagactgaacacaccgggatattatatcagcaaagtgtgacaatgactttgcagggtattgtccattaagagatggatcaaccattttgcccaatgcatcgatatcatgaagctgtgggattgcccacctcaccaagaactgctctcctctactccggtccctatcgtaggacattctacccntcaatagttctnacattacaacaccaaaactatatacatnactctnccatgtatagattccagagtcgaactttggagctccatatccgtaagc

SEQ ID NO: 134373 - DNA, 612 bp, Arabidopsis thaliana
atataaaattttaactatttatgggataacattttctccacaatcataaactgacaagcttatacccaaaattaacaaaattataatacttgaaaaaaagaaaaagaaaaaaagaagtcactcttgctaaaaatgccaatatatattatctatatagtaagcaccgccgccacgattacccctttgttttcaaccccaccagatgctattactactacttatacccccacaacttaggaagtaagctctaaactaccctcccaatggacaaaacagatcgtactaagagaaatctacattaaagacgagggaaaattgaaatatccataatgtagaatccccattatgcccttccatcaatcacctaggccttggcttcgccggacaactgagagcttgccggagtttcctctgccccgacggactcgaattagagctagcgataggcattccgaaagtcatggtctgtgagagattcaccatgtccaccattgattgcgtctgagaagacgatgcagttgaatcactgatatcgcctctcgccgttgctcgctgacaggagtgcgagctcagaccggagagcacgtgagccctacccgaagcctcatatac

SEQ ID NO: 134374 - DNA, 604 bp, Arabidopsis thaliana
  unsure (1)..(604): unsure at all n locations
cnnnnnnnnnnnnnnnnnnnnnnnnnnnnnnnnnnnnnnnnnnnnnnnnnnnnnnnnnnnnnnnnnnnnnnnccacgcgtccgcaccgctattcaacaacaactccatcgtgaacaccacgcgcctcaacactttcctcggcttgtcttcttcttcgccaaacacttacaacaccaacaatctcttgttacgaccgtttgctcaaaaactcactccagcgactcctctcttatccggatcacaaattcagcaatatcaaaaccctaacaacggtttcgaggatatgaatctgcaagctcttcttcaagctcatatttcaaaccctagaagcaatgagcacgatcagtttggtcttggtatgatgcagactccatctactaatcctcctactacaacggcagcggctaacgggaacataaacaccggtgataatggaagctacggtggctccgatcatgaacataataatgacggtacttggttatcttcgtcttccgaccagagaacataaatatatttatgtatagtccaagtccgaaatcaaagctaatctcttgacatgattactcaacaaattaaacatagcacatatagcatgatgaag

SEQ ID NO: 134375 - DNA, 585 bp, Arabidopsis thaliana
  unsure (1)..(585): unsure at all n locations
cnnnnnnnnnnnnnnnnnnnnnnnnnnnnnnnnnnnnnnnnnnnnnnnnnnnnnnnnnnnnnnnnnnnnnnccacgcgtccgggagcaagtagtgaagagagaacattggctatgataaagccagttggagtctctggtaactatactgaagaaatcaaaacgatcgtcgttgaggctggtttcaatatcgtcaaggagatgcttactcagctggacaaggagacagcttctgcgttttacgaggagcactcatcgaggagcttttttcctcatcttgttacatacatgacgagtggtccggtgttggtgatggtattggagaagcgaaatgcagtttctgattggcgtgatttaatcggtccaacagatgcggaaaaggctaagatatctcaccctcacaggttcgatttgttgccaaacacaattcttgactttgcaaactcaaatcatcagagcattatgtggtaagaactcacagaagaactgtgtgcacggctcggattcaacatcgtcagctgaaagagagataaagtttttcttcaaggatgtagtttcaggtgacattgctacacaacaacatgacg

SEQ ID NO: 134376 - DNA, 535 bp, Arabidopsis thaliana
aataacccttacttaaggggaccaaagctggaggttcaacgggggggggggcggttttaaacttggggattccccgggcttgaggaattcgggggccgttaattaaattaccaaaattatcttaaggtccggttcattttttggaattaagggtattacctattggtttgggccaccaccaaaaggaacaccttggcctgagagagggttattaggactccatttaagaaacctacattctgaaatcaagaccgcaaactgagttatcagcgaggcaggctgcgattttgttaccttctttgttccaacacacttcgaatatccctccatttcctgtgtatgtctttacgattttaccttctttaatcgaccatatgtgtatcgatttgtccaaagacccactcgctatgtactccccgtttggactaaacgccagtgagtaaaccggttcctgtgtccattgaaactacagagcatcttcccgagttctgcatcccatagctttactgttgagtcaaatgatgcacttgcaaga

SEQ ID NO: 134377 - DNA, 686 bp, Arabidopsis thaliana
  unsure (1)..(686): unsure at all n locations
accgggttacgaanaagtnnattgtcctctttgncacaanctcgaantcccnccatttcntgggangccttaccngtttcctnntaatcgaccaanatgggaacgnattgtccaaaggcccactcgctatgtacnccccgtttgggactaaccgccagtggntaaaccggntnccctgtggnccattgaaactacagagcatcttccccgagtcntgcatcccatagctttactgttgagtcaaatgatgcacttgcaagagttagctgtttgttaggattgttagttcctggtcctgtagggctccatctgattgtataaatttccttagtatgctctcggaggtccatgaacaaaggtgctttgttttatattccatatcttagcagtactatcatctgagcatgaggccaataatgaaccagtaggatcccatttcacacagttgacctcaccctgatgcccagtaaaggttttggcaggcctagtttctccaatcttacataagtagatcatgctgtccgtggaactcgttgcaaaagatacattgttgcgccaatcaacatcaagtgttggacctgaatgaaattcaaattgttgcttccactcctctgcctttacgtcccaaacaacagcagttctatcaacactaccggttagaagatagtcccccttcttgttccctc

SEQ ID NO: 134378 - DNA, 540 bp, Arabidopsis thaliana
aattacccttacttaaggggaccaaaggttgaggttccacgggggggggggccgttttagacttagggattccccgggctgtgaggatttgggggccgcccaaacatttatcacgcttcgaccaacgggcacatggcatttttgagaaaaagaatgttcagttgtggttacagttgaagataaatttaaattgggaaagactaaaaccgaaaatctttagcaaacaatcggctatggatcttgcacaaatacgttactccttaacacatgaagaaaagatctcaagaaaccgccaacttatgaagaaaaacgcagacctgtgggtatggatgaacatggttttaagatgaagaccattcttatcttctattcagaccacgatggtcccagccttaattaattatacacttctcaccggcattctgaatcacccttagagaaaacctccaccagtccaagcggtgtctgatttcccgttgtgaccagcagatttcttatcgcctgctctttggtaatgaccatcgaacccatcatctttgg

SEQ ID NO: 134379 - DNA, 592 bp, Arabidopsis thaliana
  unsure (1)..(592): unsure at all n locations
aggggaaacaaaagctgggagctccaccgcgggtggcgggccgctctagaactagtggatccccgggcttgaggaattcgcgggcgctgcatatacagtggcagtctaatacaatctatagtagagtaccagctgggatacaaaacttggagattccttataaccagaatttttttcgggccttttaggtggaagggtactttggttggaggcaagtggaccggtctttcgaacgaagcacttagaatcatttcttctttggaggttcaaatggtgggggggatgaccgaaggggcctggcggtgtccattttatagagtattgggtagcttcttaacattaagagcatcttaatttaacggtggagaatattacggattggctggtaatgatgcgggttcaagatcggttccgccgagattccagcataatcagaggtgaagactaatgatttactgtccgggctgaagatcgggtggtttgttctcccacccgtcccgctttggatgagcttccttaaccctgttccgttggggtggatcaagnagagctcaaaactacccgagccagggctttctcgatctagaactag

SEQ ID NO: 134380 - DNA, 546 bp, Arabidopsis thaliana
  unsure (1)..(546): unsure at all n locations
aaattgaacaacactgatcttacgaagaaaagccatgtataatatatatttatatcttttaacaaatcatgtttgtttcttacttaccaataatttctgaaacaaagatggataaaagatgatccaactgtgaacctggcgggcggcaaaatgcagacagtcacttcctcttgctgttcccaatactgaggagctcaaggctctggagggtaatgtcacgagcggctctcgttggtgcagcttttgtggctactgaggaggacgaaggagcgaactgggtcctcagagttgtagaagaccgatcattgtttgggatgagtctgcttaatcgattctctgtgaaatcagctgaaggaagtggctcgaacacttgacccagcaattgcttttctttgacgaactcaggttcctagataaagaagtttgggcctcccctggtttgcggggccctgggctgcaaganatccccgggggccttggcaacaaacggtcagcttgaacgccggcccgngccattctccggggaancccgaaacccnggaccnc

SEQ ID NO: 134381 - DNA, 591 bp, Arabidopsis thaliana
  unsure (1)..(591): unsure at all n locations
tatagggcgttttgggtcccgaccccccccctggaggtcgacggtatcgataagctggatatcgaattcgcggccgccttgacttcacatagagtatcaaagtatctgtggttactatattattacaacaatcttttttttagaatggctcttgtaagaaacttttcattggttgtacagcctttgaccaactattacatttccaataccaatccttgttttagagtaaaggttttgacatcttcttttacgatttcgcttaggtcatgtttgttttcgttatcttcaccgggtagttttccccgaggctcgaacagagactccatgtaacagtttaacatacccgaagaagctaagctttccatcagtgtgtctgatccaatcatgtaggactgaaatgtacccggtatagatggcccaacaaccaagttcagaggcaaagttcttcgatggcaatagcttcgggtttccattcttgtcgaaaaggtccataaggatgtcgggttgcttttnttcccaacaatanagggggctggggcttgntggccgtttttggnggtgcnaaaactttnaaaaccatncccnngtttt

SEQ ID NO: 134382 - DNA, 552 bp, Arabidopsis thaliana
gggtccgggcccccccttgggggccgccggttcggctagcctggttttcgatttcggggccggggagatttcttttttttttttttttttccgaggcctccgaccattatttaccgattttccggggacccaccgtttactacgccgtttaatccaccgccaaaaccgaaaccagggattctctttctattcctcgtgggggtattcaggtttccaatcttctttctcttcctggtccttaccggtatcgcctctgttcttatcctccctttcctccttttttctctccatcgtcaccaccgacgtcgtcgtcgtaatcgccgacaagaatcctcagatgggttatcttcaagattcgggaaaaagcttcctcaattcaaattctccgaacctagcacatacacacggtacgagagcgatggtgtggttggttttgatggattcagacaaggacaatggtgtcggaatcttcctggttgtggacacgtgtttcatcgaaagtgtgtggacacttggttgctcaaagcctcgacgtgtcctatttgcagagct

SEQ ID NO: 134383 - DNA, 1046 bp, Arabidopsis thaliana
atagacgagctatgacgtcgcatgcacgcgtacgtaagcttggatcctctagagcggccgccctttttttttttttttttttttagtaaaaattcaaagcaaacaaagtaattattattctaattaagatataatcacacataatatgtttcatactaaacatcataaggaggacagtaatcaacgtatatgagtttgggacttagaaatcaaactactgaagcatcaacaaaaatgctcagaagttagtaagtaccatagctatgtctcagaacaatccaaccaagtttcttggatttgagtttactaacttggtgcttcagtctctctctgacctggatggtttatgcagcagctgcatcaaacctcttcatcatgtcgcaacgtggcgtttcgcggatatatccccattgttgtctctgaagctcatggcgacaattctggccaagtatagacaagtaaatctctatcaacttcgctcttcaaccctctgtctctcggagctaacttatcgggatattccctgctcgaacttggctggcctaacaaagtaagtgacgcccccatgcggggtgaatttgagctcgtagttatacgatgggaaagcgagtaaattggttgaggagaaggcaaaaagttgagtagtagtatgaacacaacaggaagtatttgaagaagtacacgaggattgaatcctgtatcagaagcttgattagctgttctagttcctccaccaaaattgaatgatcggaactgagtagtagcaggattcatttcaccaccaccaaagaagcttctgaaaatctcatcagcatcaaattcatcgtcgtagaatccattgaatccgttgtttcttctcgcatctcggcgtggttgataagcaggctcatcggaaccactgccgtcgtactttcttctagtgtcttcgttgcttaggcattgaaaagctttagagacggatttaaaagcttcttcagaaccaggagctttgttcttatcaggatgaactttcaacgagagtttccgataagatttcctcaaatctt

SEQ ID NO: 134384 - DNA, 536 bp, Arabidopsis thaliana
  unsure (1)..(536): unsure at all n locations
aaaacacaaacacttaaaatgctagcaactgtatgagtttcagcagggcaattctccttctcttgccttcaccttactcaacaatatggaaggtgagaattactaaaataaacccctactgaaagattaagtcaataccaaatccatactccatctcattctcctgagattttgagtaaaaaggatgatccatttgagttctgttcgaccccgcaaatcatcggttaagctaacgaacctgattcctaatcgataaagctgctataaggggttagctcgagttaccggcatatatacacattgcatctgatcttggagaatcatcctcgggctaatgctcccttcaaaggctgtctttagccataaggctctctctttaggcggtagacatcagtatgccaaaccgggcggtgatcttccaagctcccgttctcnaagntnaactttggccctntngntnnggcaatcgggtgtgttgtcttgccncttcctcttgtggnnctnnangatcggttaagnccgggttaagcnanngc

SEQ ID NO: 134385 - DNA, 596 bp, Arabidopsis thaliana
  unsure (1)..(596): unsure at all n locations
nnnnnnnnnnnnnnnnnnnnnngccccccctcgagttcgacggtatcgataagcttgatatcgaattcgcggccgcatatattacccaatacaatcaaagtatgagacatttctcataagacgagagcatactcttaaaattccccaatacaaacacctatacccaaaaaatttaattccctgcataatcttattaaggaagactgataatctcagaaacgcacaaaaccggagacttttcatgtattaggatagtatccatatgggtaactaacagaatgagatctgtagtgaagattctgttgagtattattattcatttgatctccagactctataggcttcggcttaggcttagccacacgcttgctgctctgttcttggaccgctccaaagactatctcattagacttttcactgtcctgctcataataagtatgcgggatcgatgagtaatgccttcgatgctgctgctgctgttgttgctgatgctgatgcttctggtgctgctttttgctgctgttgctgcttggttggggacctaagggtccagctactttangattcgggggttntnacgnaggtcttaattttnc

SEQ ID NO: 134386 - DNA, 872 bp, Arabidopsis thaliana
  unsure (1)..(872): unsure at all n locations
ctggtatccgaatacagggccgccccgtatattcctgaaggctacggtccttttaaaatttgggaaggtccggttggcgaatgactttaaccccgctggggtccttagccccgtggaggcaatgagaaggaaactttggatgtacctaacattaccgggtttccgaggctggccggcttatcggacctttcttttgatgatgggcccgaggatcgaaactgggctctgaaggtgttgttcgtttcgctaaaggaatggggaaacaggttttccacacctttctgggagagtatcttccatcgcatctggtttccaattttcgaccatgtgagccttcctggaaaggaaagcttaacatcttccggggatgaaaaatttcggagaaacaggcattcatcccccttcagctgcctttgcattctttttcaatacgttttacaaggaagtatgttttatgctgcctccacttttaagtttgctcctagactgtgcgatgaaatcagatcagacagttgtttcaatttcattaggagcattggttcacctcatcgaggttggaggccaccaatttagtgagggagactgggatatgctcttgaaaagcataagagatgcatcatacacaactcaaccgctggagctgttgaatgctttgagttttgacaatccgaaaaagaacctagttttggcaggagacatagaggccgatgcctctaaattctccacgngttgatcgtaatccggacggttattaaagntaattgggaaantttccgccccaggaatttcccaggnnttggtacccatgggancttcccnnngaattctggggttaccncctnaaggnttanttgttcggaaggtnggccnnt

SEQ ID NO: 134387 - DNA, 602 bp, Arabidopsis thaliana
  unsure (1)..(602): unsure at all n locations
agggcgattggggtcccggcccccccctggaggtcgacggtatcgataggctgggcaaaaaaatagctttttccatcaaaggcctatgttcatttgtatccactggactcaatttttccccaatgaagctacaaggtatgcacataatcatatcttacatttccaaatacagaagaaacgttcaggggcagtcttcaaaggaaccgtgtcggcattaactcgttgattctaaggggcatactatagaactcatcgttcctgccgtctccgttcctgtgctggaagggcttccaccacgggattcctcttgcgtcgtcacttgcatgtcttgcttccaacgtgttatctagtatggtcgcaagaatggtcgccaccaacggagccgaagcaaatatcgtattaagtatatcgttgaaccatcctcctgctgtcctaactggtccatatcctgctcttgaagtgttggcaagaaagtactgagcgatggaaagacttaagaagagggggacaccattgcggacatgtttctcatcgnatnagtncngnaaactgttaaacggnnttcnacaggaacaacggntcnaggagtcaggtttggtntc

SEQ ID NO: 134388 - DNA, 606 bp, Arabidopsis thaliana
  unsure (1)..(606): unsure at all n locations
tatagggcggattggggtgccgaaccccccctcgaggtcgacgggatcgattaggctggttttcgatttcgcggccgttagacttattcttgtgcatgccacctccaagagagaatgtgggttttgagaagtcagattctactgtgtcacgggaggcaaaccttgttgaaagcacgttagaaacatctggaatgaagcctaccgaattaccttcagttggttcagtgcctaaaccatctattttagtgaatagatcggaaaatgctaatatgttgagttttccagcgggccctgcatcagcggggatcacaccaccagcaattgttccacccaacggtgagcctaaaacttctgggatgccttctgagaccagtgatgtagattctgcgtatgctccttcacctcaacttcctctaagccccagactatcaagtaaactttctggctatcacactcctgtagaagcgtttgagcaagtgctaccacatcataagcttggtggcaaaacaagttctgctggttatttttatgtgaggcaaactggttatttttgggggagaatttgggtgttntttttcggggaanctttngggaagncggnttttc

SEQ ID NO: 134389 - DNA, 546 bp, Arabidopsis thaliana
  unsure (1)..(546): unsure at all n locations
cccccctggagtccgagggaatcactaggctggatatcgaattcgcggccgccattccattacgctttttttctcttcccaggtctcatttcagaatccaatttcccctcagacccggaaaagaaactcaactacgtcgctgtttcacgactctgtcatcattaacggacggtggagcaccaatttccggtgggaaggagctgtggctgcacaacacgatgagccggaagaaggagctgtttaagcctaaggtcgaaggtaaagttggaatgtacgttggcggtgtcactgcttacgatctcagtcacattggacacgcacgagtctacgtcactttcgatgtactcttgaggtaccttaagcatctaggatatgaagtgtcttacgttcgaaatttcacggatgtggatgacaagattattgccagagcggaagaatttgaggaagatccaatcagtttgagcagacggttctgtgaggaatttaatcgggatatggaacagcttcaatgtttagatccgtctgtccaaccaggggtttaagnca

SEQ ID NO: 134390 - DNA, 556 bp, Arabidopsis thaliana
cccccccctcgataacggcgggtatcgcatagcttgatatcggattccggggccggttcacttctatctttaattcggccggggcagatcccacccctcttggacccggtccaatcggtccgatctaaatctgttcagctttctaatctccattccgctactgagttaccatctcacttccgttcgtacgctccgtctctctaagaagcttcgagatctagcgggattttcctgatccagataaagatcgatctcactaaagctgcacagtttccatttcgagaatcttaacaatgtgtaaagagtatgatctcttttggcattgatgtgattgattgaggaaatcaaagtttgttactgaggatttggagcagcaaattgagatccttgaagctattgaaggtgtttcggaggagaggcatggaaagggttgaattcaagctgaagttggggctggtttgccaagttttctataaccttggagagcttaagtctacgggggatcaattggtgaataagtataagggaatggctgtgaagagtgtgagtgttgcta

SEQ ID NO: 134391 - DNA, 583 bp, Arabidopsis thaliana
  unsure (1)..(583): unsure at all n locations
tttagggcggttttgggtcccgacacccccctggaggtcgacggtatcgataagctggatatggaattcgcggccgcacgagttacattcaaaatcgtcataatggtaaaagaacaattgaagcatcattacactttcacatggttgagatgttgttacttatttgagttttaaatggatcctttcaggaagttgtcgacctttgaattggttgcagaagagagaaacttcatgcaaacaggaggattaactccggctatagcgagcacggagctcggcaaagaccaaatgccatctccgcatatcaaaccagaagccaccgctgtcccaaaagcttcagccttggctgcatctactctttcccagataaaaagtatccaaacttcccacacacatgtcaattgcgaagtaaggtcccaagaaaaacggtatagccattgccatgggaagtgggatgaaccttccccaattgctatggggactatctttactatgtttacgggatcgccacaccgagaccggtggtncgacaagaattccccggaggatggganctccacccagttagcnggtcggnaaaant

SEQ ID NO: 134392 - DNA, 572 bp, Arabidopsis thaliana
ctatagggcgaattgggtgaccggaaccccccctcgaggtcgacggtatcgcataagcttgatatcgaattcgcggccgccaaagacacactcacaatttaaaaaaaaacgtttcttttctcttcgattcccgattacggcttttgattttgtgggactcttctcagtttttctgggcttttggtttttggattctatcttctttcatttttcagattttttattttattttgttgtatttctatattgggaaacaaaatcatgcagaggatcgtcgataatgctcttgctatcacaaaagagtcagtgaaaactctgacttatgagtctttgaacaacattgcaagatgcattaatggattttctgcgcttctcttgacacttttgcccggaaagtccaatgttcttgaaggtcttcatggatgggagcttaggcctacattgcgtggacctcgtttaccacgcttggatgcataatggagtctcttctttcaaccacttcattcacgaactccctgtggattctgatacttctagcttggactattcctctggtgatgatgatagtgatg

SEQ ID NO: 134393 - DNA, 547 bp, Arabidopsis thaliana
tctccagctctaaacgaccctctcttagggaagctgggctgctgctcgcccggtgcgggatcctcggtaaaaccacgcctccccgggctggaagaattcccgggcggttattaagccttctactttttgcttctaaaattccttgcggcaccaagagagctctggttaatcctcaaactcaatttttctttcgatggggggcccaagaatttaattgggcccctggccggttcaaaaggatttacccaattcccaccaccgggttattaaaccccttccgacccaaaaaaccggaggccccctggccagccaggctcttctttagtcttccccgttggaggactatcacgatggctgggcagtggcctttgcaccgacgttctttcacagcttccttcacaggacggcgacttaccgggcttacttgcaagccctccttcaaaagtttctggacaaatccaccagcatcactgggtccaaacacttcccacaatccatcgcaaccaagaatcatgaagttttctctctcagttaattcaaaagcatg

SEQ ID NO: 134394 - DNA, 580 bp, Arabidopsis thaliana
  unsure (1)..(580): unsure at all n locations
gctctaatacgactcactataggggaaagctgggtacgcctggcagtaccgggcccgaattcccgggtccggcccaagccttccgaaaaggttcgaaaggcttgtcgatcggaaaattcaccattgccggatcctgattcatggcaaggtaaattaaccaggaccggccaccgctctgttccttcaccgactgaagaaagtgtagtgtctacacaggtccagtgattggttcgattctgattgatgacgtagaagattgtgttctggtattggcgtcgcatcagatcagaatccattgcgctaggaagagtgatttctacctgagagtgaggagtcgtcccataattgaagacagtaacggtgtcagatttgctccttattgtttggattacaaagggattgatgaagatttgaagacggctgggtttggaggaggagactaacaactgggccaatgtggatgatttccggtggctgagagctgtacagtcgccgaattggtcactttttgccggaagaagaaagggcctttttgcttaccatttccggggnttttnnncaaaacnnnaggtcccaaatt

SEQ ID NO: 134395 - DNA, 536 bp, Arabidopsis thaliana
  unsure (1)..(536): unsure at all n locations
ccnnnnnnnnnnnnnnnnnnnnnnnnnnnnnnnnnnnnnnnnnnnnnnnnnnnnnnnnnnnnnnnnnnnnnnnccacgcgtccgacgacactcctctcttgagcccttactcctgcagccgccgctgtccagaagattcccaaacccaaaccaaagaaagctacaccgttatctgttgtgacacggctgtggcagatacaacacaccagaagagtctcaacaaccaacataaaaagaaaccgaagaaagtcgctgagccattcgaggatgcaaagaaaagaggtgacgcgttggcgcaaaagatgaaagatctcaatatggtggatctgagagacgtggatcacgcattggatgtaagggaagcgcttcgatgctattcaagcatcagcaagtccttgtgtatcttgacatttgttgacaaatttctttcacaggacatgtttttacggtgttctctgatcctcgtacctctgctaagatcaacggttcaaggagaaaggcaggctccttcaggctttaaagttcctctggatcag

SEQ ID NO: 134396 - DNA, 501 bp, Arabidopsis thaliana
cgcgtacgtaagcttggatcctctagagcggtcgcccttttttttttttttatctcataaactcatatcaatataataactgtgggtcttttcatcacatagttgaactgcttattgttgatttatcatgaccttagagaaaaatacagaaatacaatttagaattcaggtacaggttcttcttcaacgggagcaagaacccattcaccatcttcgttcttgatcagtcctttgttcttctctacccaccaagatcctggcaccaaacactcagctttcaagaactcgcatgacttgttcactaatgcaatacttctcttaaccatcagtttaaactctcctttcttcccattccatccagctacaacatgtaacatcgcctgaagattatgccaatcccctggattccttgaatcgcttaggaacggggacttctttgtatcgatcacaaagtttattcctaatgccacataccctaaaagtccccctgggtatcgagta

SEQ ID NO: 134397 - DNA, 602 bp, Arabidopsis thaliana
  unsure (1)..(602): unsure at all n locations
ataacttccattcgccccttccttaacctggattcttttaaaccggccgcctttttttttttttttttttgccaaaaaaaccattacatttaacaaaccactgcctaaaaggggtcatgtttaaaaaatgttactggtctattaagtagccttttgaagttgcaccagaaactgagcattacgatgatctgttacgggtaaaaaagggaaaatcattactctctcaatcttctttgtccttactttaatgatgtatgtgcagtgcaaaagccctaaggattccactgatgtggctgttttttttataacctttggctgaagtacatgttcatgaaatatcttgacgggttgaatccgcttaagataagaataggagacaggacaatgacaactccgattgggtagaggaagaatgttgttcgctccaaaaatggaagcacgtcatatcctaggaagttaagataatggtagtacgaagccccgaccatgaaaagcagattcgatagcagtaaagggatgaatccgtgtgctatcaggagcggtgataagaagtaatgtacgacgtagagcagnacaaacattggaaagaacgagttgcagtg

SEQ ID NO: 134398 - DNA, 533 bp, Arabidopsis thaliana
  unsure (1)..(533): unsure at all n locations
aggtgacctataaaaaatcttgacgtcgtgtgcacgcgtccgtaagcttggatcctctagagcggccgccctttttttttttttttttttttttttccaaacaaaaatttatccgggttcctacgggtttttaattccggtttaggatatttaaaaaaaaaaattactctaccaaaaatcctaatccaaacaaattacccactacaaattaataaaaagcccaaaatacaattcaaaaaagcccaaaacaaaaactaatagcccacccctagaaaatattagggttttgaccaaaagatatgagctgccgaagggttgcggctgcggctccaggtgacgtaacgacgacggccatctctgatgatcctattcatcctttcatcgtcattggccgggctattcatcttcctcctttcaacttcattcgcctcggacgcgtggnnnnnnnnnnnnnnnnnnnnnnnnnnnnnnnnnnnnnnnnnnnnnnnnnnnnnnnnnnnnnnnnnnnnnnnnnnnnnnnnnnnnnnnnnnnn

SEQ ID NO: 134399 - DNA, 519 bp, Arabidopsis thaliana
  unsure (1)..(519): unsure at all n locations
nnnnnnnnnnnnnnnnnnnnnnnnnnnnnnnnnnnnnnnnnnnnnnnnnnnnnnnnnnnnnnnnnnnnnnnnnnnnnnnnnnnnnnnnnnnnnnnnnnaaatgaaagctacgggagaagcttccaaatttcactgataagtgttttatgttatgcaataaaaacaaaagaaaatttgtttttgtgggactgaaacatctagtctatgtatcagtggccatttccaagcttccatctttgtcttttgtcgaatgattgaggaaattcccaagcagcctttgaatccaacaccatgttaggtaccttgtccccgaagaatattttggtgttacgagcaatggcatcgatgaatttgagttcaagaaattcaggggtgagcttcaacttttttgcttcagcttctctcagtacacggtagtaatctgcatccgcgagactcttttgacggtcaaggtacttctgattctcgatatcagcttctctccttgaactgtctttctcagtcaacttctgttgcatc

SEQ ID NO: 134400 - DNA, 610 bp, Arabidopsis thaliana
  unsure (1)..(610): unsure at all n locations
nnnnnnnnnnnnnnnnnnnnnnnnnnnnnnnnnnnnnnnnnnnnnnnnnnnnnnnnnnnnnnnnnnnnnnnnctttttttttttttttcttcaatcaatatttgtttaacgaaataagtttcaagagaagacaagctactatgatttttagtctcaagagtcttacatttttatactgaaaaccaaacttatagagctttacatttagaaaaccgaaaaaactatcaatcattaggttagcctttggattcacgacgacgtatcagatttgcgttcagcgtctgcggcagactgcatttgagctgcgtattgtaagttccagagaacatcttccaaaggaaggtcttgcggaagggtccaagccaaacacatttattggcgattgagatcgcaatcggtaaagactcctgcgagcttgttgttaggactgttggacttactattttccgccgaccggcttggctccccaatggggtcattccgttgaaaaaaccccccttttangggccgggccnaaaaggtccnnagttgacccgngtgnanacggcccccttanncttttttgcctgggggccnntttcccannttggcncaagggngccaaccngtt

SEQ ID NO: 134401 - DNA, 804 bp, Arabidopsis thaliana
gactgtttttggtatatatgatcccctgcaaaactctattactgagattagattcatgttggctttcagaatctgttcttctgtggctttcgtgtctcttttcctaacttgtgattgtttccagaagcttccctttgttttccgaagcttctgttaccggggcgctgtggtcctgttctactttgattaatgtcggaagcaggtgtgtgttgttgatatgttctcttttgccgtttgaatttgttgccatcttgtttggctgtagtttctgatgaagcttctctgtaatttcttttccgcggccctctggatggatcgatggatgtagtctgtgactcattggtctcttctttgtcttttgatttccccgaacggttctctaaaactgtctcgatgaaactcttgtgcttgtctggtgtggctaactggactgcgcgggtgccgcacttccttaccataaactctcaacctatgaccggtaaccctccgacttaaaataatgccttgaaacagacgaccaggggaagaattccgtataagaggttctgcagtagactgtgcaagtcctgagcttgcgatgttgagactaaaactttcacaaaacctaaaacagcttttataatctcaatggatttagtgtgaagcaatgataaaacagatgaaagaagctcaggtgacgatacgcatatctcagggtctttgtataccaaggcagataatgcagacactgctccactccttatgtgcggcgaccggacgcgtgggtcgacccgggaattccggaccggtactgcaggacgggcc
